United States Patent Application Publication US 2023/0026259 A1 - sequence listing, part 88

SEQ ID NO: 195949 - DNA, 583 bp, Homo sapiens
  Payload ID: 18663
  Gene Name: tubulin tyrosine ligase-like family member 4
  ENST ID: ENST00000448224
  CDS Start-End: 1-583
ggaggaaggaccggctatggcggaacctgtcacgtatgcagagccgctttggcaagaaggagttcagtttcttcccccagtcctttatcctgccccaggacgccaagctcctgcgcaaagcgtgggagagcagcagccgccaaaagtggattgtgaagccaccagcatcagctcgaggcattggcatccaggttattcacaagtggagtcagctccccaagcgaaggcccctcctggtacagaggtatctacacaaaccctacctcatcagcggcagcaagtttgacctgcggatctatgtttatgtcacttcctacgatcctctgcggatttacctcttttcagatggactggtccgctttgccagttgcaaggcactgaaggctttgtggaactacctgagccagaagggagtcaatagcgacgccatctgggagaagataaaggatgttgttgtcaaaactatcatctcgtcagagccctatgtgaccagcctgctcaagatgtatgtgcgacggccctatagctgccatgaactctttggttttgacatcatgctagacgaaaacctcaagccctgggt

SEQ ID NO: 195950 - DNA, 3723 bp, Homo sapiens
  Payload ID: 18663
  Gene Name: tubulin tyrosine ligase-like family member 4
  ENST ID: ENST00000457313
  CDS Start-End: 412-3333
agactctcggtctgtccgctgggggcgcgcgcggtgtgtggcaggcggcagcggcgctggcggccgagtgcgcttgtcacgcgtggcggtgcgtggttgctaggggcgcctgaggctgccgggtagcccagcaggccgagggaggaaccagcatatttcttttgccccagcactttatgtagctctgggaccacggctgtcattgcaggccacagcagttcctgttacctacactctctcccggacttgttcaacagcaccctgctataccgccgctccagctataggcaaaaaccgtaccagcaactggagtctttctgcttgcgttcgagcccgtcagaaaaaagccctttttctctccctcaaaagagcctccctgtcagtctcactgccaacaaggccacttcttccatggtcttctccatggcccagcccatggcctcctcatccacagaaccatacctctgcttggcagcggctggggaaaacccttcagggaagagcctggcctctgccatctcagggaagatcccatctccactctcttcctcctataagcccatgctgaataataattccttcatgtggccaaatagcacgccagtgcctttattgcagaccacacagggcctgaagccagtatcgccacccaagatccagcctgtctcctggcatcattcagggggtactggagactgtgcaccgcagcctgttgaccataaggtgcccaaaagcattggcactgtcccagctgatgccagtgcccatatcgccttgtctaccgctagctcccacgacacatccaccaccagtgttgcctcttcctggtataaccggaataacttagccatgagggcagagccactttcctgtgctctggatgacagctctgattcccaggatccaactaaggagattcggttcactgaggccgtgaggaaattgaccgcaagaggctttgagaagatgccgaggcaaggctgccagcttgaacagtctagtttcctgaaccccagcttccagtggaatgtcctcaacaggagcaggcggtggaaacctcctgcggtaaatcagcagtttcctcaggaggatgctggatcggtcaggcgggtcctccctggtgcctcagataccttggggttggacaatacagtcttctgtaccaagcgtatcagcattcacctccttgcctcacatgccagtgggctcaatcacaaccctgcctgtgaatctgtaattgactcctcagcatttggagaaggcaaagctccaggtcccccttttcctcaaactcttggcatagccaacgtggccacccgcctctcttccatccagctgggccagtctgagaaggagagacctgaggaggccagggagctggactcatctgatagggatattagttcagctactgacctccagccagatcaggctgagactgaagatacagaagaagaactagtagatggtttggaagactgttgtagccgtgatgagaatgaagaggaggagggagactcagagtgctcctcattaagtgctgtctcccccagcgaatcggtggccatgatctctagaagctgtatggaaattctgaccaaacccctttccaatcatgagaaagttgtccgaccagccctcatctacagtctctttcccaacgttccccctaccatctattttggcactcgggatgagagagtggagaaacttccctgggaacagaggaagttgctccgatggaagatgagcacagtgacccccaacattgtcaagcagaccattggacggtcccacttcaaaatcagcaaaagaaacgatgactggctgggctgctggggtcaccacatgaagtctcctagtttccgatccattcgagagcatcagaagctaaaccatttcccaggctcattccagattgggaggaaggaccggctatggcggaacctgtcacgtatgcagagccgctttggcaagaaggagttcagtttcttcccccagtcctttatcctgccccaggacgccaagctcctgcgcaaagcgtgggagagcagcagccgccaaaagtggattgtgaagccaccagcatcagctcgaggcattggcatccaggttattcacaagtggagtcagctccccaagcgaaggcccctcctggtacagaggtatctacacaaaccctacctcatcagcggcagcaagtttgacctgcggatctatgtttatgtcacttcctacgatcctctgcggatttacctcttttcagatggactggtccgctttgccagttgcaagtattcgccttccatgaagagccttggcaataagttcatgcacctgaccaactacagtgtcaataaaaagaatgccgagtaccaggccaatgcagatgaaatggcttgccagggccacaaatgggcactgaaggctttgtggaactacctgagccagaagggagtcaatagcgacgccatctgggagaagataaaggatgttgttgtcaaaactatcatctcgtcagagccctatgtgaccagcctgctcaagatgtatgtgcgacggccctatagctgccatgaactctttggttttgacatcatgctagacgaaaacctcaagccctgggtcctggaagtcaacatttccccaagcctccactccagctctccactggatatcagcatcaaaggccagatgattcgtgaccttctgaatctggcaggttttgtcctgcccaatgcagaggatatcatttccagccccagcagctgcagcagctccaccaccagcctgcccacctcccctggggacaaatgtcgaatggctccagagcatgtcactgcacagaagatgaagaaagcctattatctgacccagaaaattcctgatcaggacttctatgcatctgtgctggatgtcctgacaccagatgatgttcggattctggttgagatggaagatgagttttctcgccgtggtcagtttgaacgaatttttccttctcatatctcctctcgctatctccgcttttttgagcagccacgatatttcaacattctcaccacccaatgggaacagaaataccatggcaacaagcttaaaggagtagatctgctccggagttggtgctacaaagggttccacatgggagttgtctctgattctgctccagtgtggtctctcccgacatcacttctgactatctcaaaggatgacgtgatactcaatgccttcagcaaatcagagactagcaagctgggaaacccagttcctcaaaggacagtgaggacaccagcaaagagcccagcctttctacccagacgttacctgtgatcaagtgctctgggcagacttcaagactttctgcttcctccactttccagtcaatcagtgactccctcctggctgtgagcccataactggcctctctccaaaagcctctgcccaggagcatgggcatcagctacctcacgggaaccagcctgctgttcagaccagtctgaccccctacccctttcaccctgtccctcctcagagtattttttgaagtggttgcattatagagatgggtatttgtagggccggagggatggtagtgatggggagaaggtgaggaagggtcaccctctgtcacctgtctgcctggctggcacctcatatctcagcagagaagccagtggtggccacgcagccttataaagcaggttttggtttctaccttaa

SEQ ID NO: 195951 - DNA, 3971 bp, Homo sapiens
  Payload ID: 18663
  Gene Name: tubulin tyrosine ligase-like family member 4
  ENST ID: ENST00000442769
  CDS Start-End: 260-3667
gaggctgccgggtagcccagcaggccgagggaggaagtagcgtggagccggtgccgagccggggcgaagctggatcccctagatagactgtcttcaagctcactgatattttcctctgcttgatccattgtgctgttgagagcctctagtaaatttttcagactgacagacttcaaggatgcagctgctactaccggaggtgtgtggcaccttacctcagcaaggccatgagaccgtgtggccatgatgtgggcccctcatggcctcagcaggaacacagcactatagtattggcctccgccagaaaaacagcttcaagcagagtggtccctcaggcacagtacctgccacgccacctgagaaaccctcggagggcagagtctggcctcaggcccatcagcaagtgaagccaatctggaagctggaaaagaagcaagtggagacactgtcagcagggttgggcccaggcctcttgggcgtcccaccccagccagcatatttcttttgccccagcactttatgtagctctgggaccacggctgtcattgcaggccacagcagttcctgttacctacactctctcccggacttgttcaacagcaccctgctataccgccgctccagctataggcaaaaaccgtaccagcaactggagtctttctgcttgcgttcgagcccgtcagaaaaaagccctttttctctccctcaaaagagcctccctgtcagtctcactgccaacaaggccacttcttccatggtcttctccatggcccagcccatggcctcctcatccacagaaccatacctctgcttggcagcggctggggaaaacccttcagggaagagcctggcctctgccatctcagggaagatcccatctccactctcttcctcctataagcccatgctgaataataattccttcatgtggccaaatagcacgccagtgcctttattgcagaccacacagggcctgaagccagtatcgccacccaagatccagcctgtctcctggcatcattcagggggtactggagactgtgcaccgcagcctgttgaccataaggtgcccaaaagcattggcactgtcccagctgatgccagtgcccatatcgccttgtctaccgctagctcccacgacacatccaccaccagtgttgcctcttcctggtataaccggaataacttagccatgagggcagagccactttcctgtgctctggatgacagctctgattcccaggatccaactaaggagattcggttcactgaggccgtgaggaaattgaccgcaagaggctttgagaagatgccgaggcaaggctgccagcttgaacagtctagtttcctgaaccccagcttccagtggaatgtcctcaacaggagcaggcggtggaaacctcctgcggtaaatcagcagtttcctcaggaggatgctggatcggtcaggcgggtcctccctggtgcctcagataccttggggttggacaatacagtcttctgtaccaagcgtatcagcattcacctccttgcctcacatgccagtgggctcaatcacaaccctgcctgtgaatctgtaattgactcctcagcatttggagaaggcaaagctccaggtcccccttttcctcaaactcttggcatagccaacgtggccacccgcctctcttccatccagctgggccagtctgagaaggagagacctgaggaggccagggagctggactcatctgatagggatattagttcagctactgacctccagccagatcaggctgagactgaagatacagaagaagaactagtagatggtttggaagactgttgtagccgtgatgagaatgaagaggaggagggagactcagagtgctcctcattaagtgctgtctcccccagcgaatcggtggccatgatctctagaagctgtatggaaattctgaccaaacccctttccaatcatgagaaagttgtccgaccagccctcatctacagtctctttcccaacgttccccctaccatctattttggcactcgggatgagagagtggagaaacttccctgggaacagaggaagttgctccgatggaagatgagcacagtgacccccaacattgtcaagcagaccattggacggtcccacttcaaaatcagcaaaagaaacgatgactggctgggctgctggggtcaccacatgaagtctcctagtttccgatccattcgagagcatcagaagccagcatcagctcgaggcattggcatccaggttattcacaagtggagtcagctccccaagcgaaggcccctcctggtacagaggtatctacacaaaccctacctcatcagcggcagcaagtttgacctgcggatctatgtttatgtcacttcctacgatcctctgcggatttacctcttttcagatggactggtccgctttgccagttgcaagtattcgccttccatgaagagccttggcaataagttcatgcacctgaccaactacagtgtcaataaaaagaatgccgagtaccaggccaatgcagatgaaatggcttgccagggccacaaatgggcactgaaggctttgtggaactacctgagccagaagggagtcaatagcgacgccatctgggagaagataaaggatgttgttgtcaaaactatcatctcgtcagagccctatgtgaccagcctgctcaagatgtatgtgcgacggccctatagctgccatgaactctttggttttgacatcatgctagacgaaaacctcaagccctgggtcctggaagtcaacatttccccaagcctccactccagctctccactggatatcagcatcaaaggccagatgattcgtgaccttctgaatctggcaggttttgtcctgcccaatgcagaggatatcatttccagccccagcagctgcagcagctccaccaccagcctgcccacctcccctggggacaaatgtcgaatggctccagagcatgtcactgcacagaagatgaagaaagcctattatctgacccagaaaattcctgatcaggacttctatgcatctgtgctggatgtcctgacaccagatgatgttcggattctggttgagatggaagatgagttttctcgccgtggtcagtttgaacgaatttttccttctcatatctcctctcgctatctccgcttttttgagcagccacgatatttcaacattctcaccacccaatgggaacagaaataccatggcaacaagcttaaaggagtagatctgctccggagttggtgctacaaagggttccacatgggagttgtctctgattctgctccagtgtggtctctcccgacatcacttctgactatctcaaaggatgacgtgatactcaatgccttcagcaaatcagagactagcaagctgggaaaacaaagctcctgtgaggttagcctactactctctgaagacgggaccacgcccaaatccaagaagactcaagctggcctttccccttatccccagaaacccagttcctcaaaggacagtgaggacaccagcaaagagcccagcctttctacccagacgttacctgtgatcaagtgctctgggcagacttcaagactttctgcttcctccactttccagtcaatcagtgactccctcctggctgtgagcccataactggcctctctccaaaagcctctgcccaggagcatgggcatcagctacctcacgggaaccagcctgctgttcagaccagtctgaccccctacccctttcaccctgtccctcctcagagtattttttgaagtggttgcattatagagatgggtatttgtagggccggagggatggtagtgatggggagaaggtgaggaagggtcaccctctgtcacctgtctgcctggctggcacctcatatctcagcagagaagccagtggtggccacgcagccttataaagcaggttttggtttctaccttaa

SEQ ID NO: 195952 - DNA, 601 bp, Homo sapiens
  Payload ID: 18663
  Gene Name: tubulin tyrosine ligase-like family member 4
  ENST ID: ENST00000417855
  CDS Start-End: 1-488
ctgcacagaagatgaagaaagcctattatctgacccagaaaattcctgatcaggacttctatgcatctgtgctggatgtcctgacaccagatgatgttcggattctggttgagatggaagatgagttttctcgccgtggtcagtttgaacgaatttttccttctcatatctcctctcgctatctccgcttttttgagcagccacgatatttcaacattctcaccacccaatgggaacagaaataccatggcaacaagcttaaagatctgctccggagttggtgctacaaagggttccacatgggagttgtctctgattctgctccagtgtggtctctcccgacatcacttctgactatctcaaaggatgacgtgatactcaatgccttcagcaaatcagagactagcaagctgggaaacccagttcctcaaaggacagtgaggacaccagcaaagagcccagcctttctacccagacgttacctgtgatcaagtgctctgggcagacttcaagactttctgcttcctccactttccagtcaatcagtgactccctcctggctgtgagcccataactggcctctctccaaaagcctctgccc

SEQ ID NO: 195953 - DNA, 588 bp, Homo sapiens
  Payload ID: 18663
  Gene Name: tubulin tyrosine ligase-like family member 4
  ENST ID: ENST00000424644
  CDS Start-End: 287-588
agcgtggagccggtgccgagccggggcgaagctggatcccctagatagactgtcttcaagctcactgatattttcctctgcttgatccattgtgctgttgagagcctctagtaaatttttcagatgctgccatgaaagcaggcccacctttccttactggagaatattttgtgaatttgatttagaaaactgacagacttcaaggatgcagctgctactaccggaggtgtgtggcaccttacctcagcaaggccatgagaccgtgtggccatgatgtgggcccctcatggcctcagcaggaacacagcactatagtattggcctccgccagaaaaacagcttcaagcagagtggtccctcaggcacagtacctgccacgccacctgagaaaccctcggagggcagagtctggcctcaggcccatcagcaagtgaagccaatctggaagctggaaaagaagcaagtggagacactgtcagcagggttgggcccaggcctcttgggcgtcccaccccagccagcatatttcttttgccccagcactttatgtagctctgggaccacggctgtcattgcaggccacagcag

SEQ ID NO: 195954 - DNA, 476 bp, Homo sapiens
  Payload ID: 18663
  Gene Name: tubulin tyrosine ligase-like family member 4
  ENST ID: ENST00000434241
  CDS Start-End: 1-302
gaaacgatgactggctgggctgctggggtcaccacatgaagtctcctagtttccgatccattcgagagcatcagaagctaaaccatttcccaggctcattccagattgggaggaaggaccggctatggcggaacctgtcacgtatgcagagccgctttggcaagaaggagttcagtttcttcccccagtcctttatcctgccccaggacgccaagctcctgcgcaaagcgtgggagagcagcagccgccaaaagtggattgtgaagccagtattcgccttccatgaagagccttggcaataagttcatgcacctgaccaactacagtgtcaataaaaagaatgccgagtaccaggccaatgcagatgaaatggcttgccagggccacaaatgggcactgaaggctttgtggaactacctgagccagaagggagtcaatagcgacgccatctgggagaagataaaggatgttgttgt

SEQ ID NO: 195955 - DNA, 712 bp, Homo sapiens
  Payload ID: 18663
  Gene Name: tubulin tyrosine ligase-like family member 4
  ENST ID: ENST00000415717
  CDS Start-End: 410-712
tctcggtctgtccgctgggggcgcgcgcggtgtgtggcaggcggcagcggcgctggcggccgagtgcgcttgtcacgcgtggcggtgcgtggttgctaggggcgcctgaggctgccgggtagcccagcaggccgagggaggaagtagcgtggagccggtgccgagccggggcgaagctggatcccctagatagactgtcttcaagctcactgatattttcctctgcttgatccattgtgctgttgagagcctctagtaaatttttcaggtcactacctctttttcaacactagatggcatcttggccccagactgacagacttcaaggatgcagctgctactaccggaggtgtgtggcaccttacctcagcaaggccatgagaccgtgtggccatgatgtgggcccctcatggcctcagcaggaacacagcactatagtattggcctccgccagaaaaacagcttcaagcagagtggtccctcaggcacagtacctgccacgccacctgagaaaccctcggagggcagagtctggcctcaggcccatcagcaagtgaagccaatctggaagctggaaaagaagcaagtggagacactgtcagcagggttgggcccaggcctcttgggcgtcccaccccagccagcatatttcttttgccccagcactttatgtagctctgggaccacggctgtcattgcaggccacagcagt

SEQ ID NO: 195956 - DNA, 811 bp, Homo sapiens
  Payload ID: 18663
  Gene Name: tubulin tyrosine ligase-like family member 4
  ENST ID: ENST00000417196
  CDS Start-End: 1-539
tggaaattctgaccaaacccctttccaatcatgagaaagttgtccgaccagccctcatctacagtctctttcccaacgttccccctaccatctattttggcactcgggatgagagagtggagaaacttccctgggaacagaggaagttgctccgatggaagatgagcacagtgacccccaacattgtcaagcagaccattggacggtcccacttcaaaatcagcaaaagaaacgatgactggctgggctgctggggtcaccacatgaagtctcctagtttccgatccattcgagagcatcagaagctaaaccatttcccaggctcattccagattgggaggaaggaccggctatggcggaacctgtcacgtatgcagagccgctttggcaagaaggagttcagtttcttcccccagtcctttatcctgccccaggacgccaagctcctgcgcaaagcgtgggagagcagcagccgccaaaagtggattgtgaagccagtatctacacaaaccctacctcatcagcggcagcaagtttgacctgcggatctatgtttatgtcacttcctacgatcctctgcggatttacctcttttcagatggactggtccgctttgccagttgcaagtattcgccttccatgaagagccttggcaataagttcatgcacctgaccaactacagtgtcaataaaaagaatgccgagtaccaggccaatgcagatgaaatggcttgccagggccacaaatgggcactgaaggctttgtggaactacctgagccagaagggagtcaatagcgacgccatctggg

SEQ ID NO: 195957 - DNA, 738 bp, Homo sapiens
  Payload ID: 18663
  Gene Name: tubulin tyrosine ligase-like family member 4
  ENST ID: ENST00000436668
  CDS Start-End: 1-738
gataaaggatgttgttgtcaaaactatcatctcgtcagagccctatgtgaccagcctgctcaagatgtatgtgcgacggccctatagctgccatgaactctttggttttgacatcatgctagacgaaaacctcaagccctgggtcctggaagtcaacatttccccaagcctccactccagctctccactggatatcagcatcaaaggccagatgattcgtgaccttctgaatctggcaggttttgtcctgcccaatgcagaggatatcatttccagccccagcagctgcagcagctccaccaccagcctgcccacctcccctggggacaaatgtcgaatggctccagagcatgtcactgcacagaagatgaagaaagcctattatctgacccagaaaattcctgatcaggacttctatgcatctgtgctggatgtcctgacaccagatgatgttcggattctggttgagatggaagatgagttttctcgccgtggagtagatctgctccggagttggtgctacaaagggttccacatgggagttgtctctgattctgctccagtgtggtctctcccgacatcacttctgactatctcaaaggatgacgtgatactcaatgccttcagcaaatcagagactagcaagctgggaaaacaaagctcctgtgaggttagcctactactctctgaagacgggaccacgcccaaatccaagaagactcaagctggcctttcccc

SEQ ID NO: 195958 - DNA, 1595 bp, Homo sapiens
  Payload ID: 18664
  Gene Name: tubulin tyrosine ligase-like family member 5
  Uniprot ID: Q6EMB2
  ENST ID: ENST00000286650
  CDS Start-End: 206-1015
gggaagcagccgtcggcggctgccctgagccttcctggggaaggaggagggaggtaggcgcagagcgcggtccacgcctgctcgccccgaaccatgggaagatgagacaggaatctgtgccatccaaattgcttgatccagtgaatctgctaggaaaggtctctgaggcccccgtctgctgactgcatgacaaaccctaaaggaaatgccaatcgtgatggcccgggacctggaggaaacagcatcatcctcagaggatgaggaggtcataagtcaagaggatcatccatgcatcatgtggactggaggctgcaggagaattccagttttggtattccatgccgacgctattcttacaaaggacaacaatattagagtaattggagaacgttatcatttgtcttataagattgtacgaacggacagtcgcctagtacgcagcattctgacagcccatggatttcatgaagttcacccaagcagcactgactataacctaatgtggacaggatcccacctgaagcccttcttactgcgcaccctctctgaagcacaaaaagttaatcactttcccaggtcttatgaacttacccggaaggaccgactgtacaaaaacattattcgaatgcagcatacacatggattcaaggcttttcacatcctcccccagaccttcctcctgccagctgagtacgcggaattttgtaattcatattcgaaggaccggggaccttggatagtaaaaccagtggcatcttcaagggggcggggcgtctacctgatcaacaatccaaaccagatctccctggaagagaacattttggtctcccgttacattaacaaccccctgctcatagatgatttcaagtttgacgtgcgcctctatgtgctcgtgacttcctatgatcctcttgtcatctatctctatgaagaaggattggctagaaaatgcaattggaagatgggaaataccatggataaaagaaggctacctatttatgtacaggtgctttgacagatattattgtactctgacaactattattttagaatggtcttttaatgattttagagacttagtttttttcacatgtatcctatgacttgaaatcagtgagagcagactaaccaaacctcgctggtggagctctgtgttccgttcgcctctaggtggcagtcacagcatttataagtcctgtcatattcttaactgagattttgagtttgagccctgggaacattggagactaccaaaactccctagttctggcctcttccttgaaaattgagaaagggaagaactgaaacatctcgcagttattagataaagggctggaccaggcatctgaacatgagctgactactagctctaatcaggtttttataggaaagaaattgtcgataatatttgtagacacacgtgctctcacgttttgaagtatcactatacaaaattaggtataaaagcctattcctggccaggcgtggtggctcacacctgtaatcctagcactttgggaggccgagacgggaggattgcctgaggccaggagttcaagaccagtttgggcaacattgtgagaccccatctcatt

SEQ ID NO: 195959 - DNA, 4683 bp, Homo sapiens
  Payload ID: 18664
  Gene Name: tubulin tyrosine ligase-like family member 5
  Uniprot ID: Q6EMB2
  ENST ID: ENST00000298832
  CDS Start-End: 206-4051
gggaagcagccgtcggcggctgccctgagccttcctggggaaggaggagggaggtaggcgcagagcgcggtccacgcctgctcgccccgaaccatgggaagatgagacaggaatctgtgccatccaaattgcttgatccagtgaatctgctaggaaaggtctctgaggcccccgtctgctgactgcatgacaaaccctaaaggaaatgccaatcgtgatggcccgggacctggaggaaacagcatcatcctcagaggatgaggaggtcataagtcaagaggatcatccatgcatcatgtggactggaggctgcaggagaattccagttttggtattccatgccgacgctattcttacaaaggacaacaatattagagtaattggagaacgttatcatttgtcttataagattgtacgaacggacagtcgcctagtacgcagcattctgacagcccatggatttcatgaagttcacccaagcagcactgactataacctaatgtggacaggatcccacctgaagcccttcttactgcgcaccctctctgaagcacaaaaagttaatcactttcccaggtcttatgaacttacccggaaggaccgactgtacaaaaacattattcgaatgcagcatacacatggattcaaggcttttcacatcctcccccagaccttcctcctgccagctgagtacgcggaattttgtaattcatattcgaaggaccggggaccttggatagtaaaaccagtggcatcttcaagggggcggggcgtctacctgatcaacaatccaaaccagatctccctggaagagaacattttggtctcccgttacattaacaaccccctgctcatagatgatttcaagtttgacgtgcgcctctatgtgctcgtgacttcctatgatcctcttgtcatctatctctatgaagaaggattggctaggtttgcaactgtgcgatatgatcaaggagccaagaacattcggaaccagttcatgcatctgacaaactacagtgtcaacaagaaaagtggagattacgtcagttgtgacgatccagaagtggaggattatggaaacaaatggagcatgagtgctatgcttaggtacctgaaacaagaaggcagagatacaaccgcattgatggcccatgtagaagacctgatcattaagactataatctctgctgaactagctattgctactgcctgtaaaacctttgttcctcatcgcagcagttgttttgaactctatggctttgacgtgctcatagattctactctgaagccatggttgttggaagtgaatctctctccttctttggcctgtgatgcgcctctggacctaaagattaaagccagtatgatttcagatatgttcactgttgtaggatttgtgtgccaagatcctgcccagcgggcatcaactcggccaatttatcccacctttgagtcttccaggcgaaaccctttccagaaacctcagcgttgccgtccactctctgccagtgatgcggaaatgaaaaacctcgtgggctcagcccgggagaaagggccagggaagttgggtggttctgtgcttggtctgtcaatggaggagatcaaagttttacgaagggtgaaggaggagaatgatcggcgaggtggatttattcgcatatttcctacatctgagacatgggaaatatatgggtcctacctcgagcataagacctcaatgaactatatgctggcaacacgcctcttccaggacagaatgactgctgatggagcgccagaattgaagatagagagtctgaattcaaaggccaagctgcatgctgcactttacgagaggaagctcctgtctctggaggtgcgaaaacgtagacgacggagtagcagattgagggcaatgaggccaaaatacccagtgattacccaaccagctgaaatgaatgttaaaactgagacagagagtgaagaggaggaagaagtcgcattagataatgaagatgaagaacaggaggcttcccaggaggagtctgcaggatttcttagagaaaatcaagccaaatatacaccctcattgacagctttggtagaaaatacacccaaagaaaattccatgaaagttcgtgaatggaataataaaggtggacactgctgcaaacttgagactcaggagctagagcctaaatttaacctgatgcagattcttcaagataatggcaatcttagcaaaatgcaggcccgaatagcattctctgcctatctccagcatgttcaaattcgcctgatgaaagacagtggcggtcagacgttcagtgccagttgggctgccaaagaggatgaacagatggagctggttgttcgtttcctcaagcgagcatcaaataacctccagcattcactgaggatggtattacccagtcgacgattggcacttctggaacgcagaagaatcctggcccaccagctgggtgactttatcattgtatacaacaaggaaacagaacaaatggctgaaaagaaatcaaagaagaaagttgaggaagaagaggaagatggggtgaatatggaaaactttcaggagttcatcagacaagcaagtgaggctgaactggaggaggtgttgactttttatacccaaaagaacaagtctgctagtgtcttcctggggactcactctaaaatttctaagaacaacaacaattattctgatagtggggcaaaaggtgatcaccctgagactataatggaagaagtgaaaataaagccacctaaacagcaacagacgacagaaattcattctgataaattatctcgatttaccacttcagcagaaaaagaggcaaaattagtttatagcaattcctcctctggtcctactgctactctgcagaaaattcccaacacccatttgtcatctgttacaacctctgacctctctccagggccttgccaccattcttctttatctcaaattccttcagctatccccagcatgcctcaccagccaacaattttactgaacacagtctctgccagtgcttctccctgcctacatcccggggcacagaacatcccaagccctactggcctgccacgctgtcgatcaggaagtcacaccattggtcccttttcttccttccaaagtgctgcacacatctatagccagaaactgtctcgtccctcttcagcaaaggcaggatcgtgctatctaaacaagcatcattcaggaatagccaaaacacaaaaagagggagaagatgcttctttatatagcaaacggtacaaccaaagtatggttacagctgaacttcagcggctagctgagaagcaggcagcgagacagtattctccatccagccacatcaacctcctcacccaacaggtaacaaacctgaatttggcaactggcatcataaacagaagcagtgcttcagctcccccaaccctccgacccatcatcagtcctagtggcccgacatggtctacacagtcagacccccaagctcccgagaatcactccagctctcctggaagcaggagcctgcagacagggggatttgcctgggaaggagaagtagaaaacaacgtgtacagccaggctacaggggtggtcccccagcacaagtatcaccccacagcaggcagctatcagcttcaatttgccctgcagcaacttgaacaacaaaaacttcagtcccggcagctcctggaccagagtcgagcccggcaccaggcaatctttggcagccagacactacctaactccaatttatggacaatgaataatggtgcaggttgtagaatttccagtgccacagctagtggccagaagccaaccactctgccacaaaaagtggtaccacctccaagttcttgcgcctccctggttcccaaacccccacccaaccacgaacaagtgctcagaagggcaacatcccagaaagcttccaaagggtcctccgcggaagggcagctgaatggactccagagcagccttaaccctgcagcctttgtgcccatcaccagctctacagatcctgctcacactaaaatatgaaccacaaacacacagagaaacaacctgttcaccactcctgggtgcatgattgagggtgaagcatccaccagcacttcaaggggtccatagtatttttttttttgctgcctcaaagtccccaaagccttcgagcagaagtggcagtagatggttgccaatcagccaatgcagactttcactgggacaacaagaaagcagatcttctgggttttgatggaacttggcagtggggacattcagctgatgcattatataccccgtcagagcacacttgtatcttttaccttccctttgccccatgcccccaaactgcttaggtcttctctgtccctttactgctgctgcacagagatgatataaaagaggctctttggctatttgcattttgcttcctcttcttttccagattacagtatgaagctttattttctttgtacaagcttaaaatttcaacatcatcatccgccaaagttgttcctcccttttcggaggatctagggggaaagaggagcattcatcacaagtttcctagagagaggagacaaatcggtgtgccattgacaacatgagccagggtaaaggcaccctttggaattactgatttcaaagattaataaagtaattctattttt

SEQ ID NO: 195960 - DNA, 4168 bp, Homo sapiens
  Payload ID: 18664
  Gene Name: tubulin tyrosine ligase-like family member 5
  ENST ID: ENST00000557636
  CDS Start-End: 216-4061
gtagtaaccggggaagcagccgtcggcggctgccctgagccttcctggggaaggaggagggaggtaggcgcagagcgcggtccacgcctgctcgccccgaaccatgggaagatgagacaggaatctgtgccatccaaattgcttgatccagtgaatctgctaggaaaggtctctgaggcccccgtctgctgactgcatgacaaaccctaaaggaaatgccaatcgtgatggcccgggacctggaggaaacagcatcatcctcagaggatgaggaggtcataagtcaagaggatcatccatgcatcatgtggactggaggctgcaggagaattccagttttggtattccatgccgacgctattcttacaaaggacaacaatattagagtaattggagaacgttatcatttgtcttataagattgtacgaacggacagtcgcctagtacgcagcattctgacagcccatggatttcatgaagttcacccaagcagcactgactataacctaatgtggacaggatcccacctgaagcccttcttactgcgcaccctctctgaagcacaaaaagttaatcactttcccaggtcttatgaacttacccggaaggaccgactgtacaaaaacattattcgaatgcagcatacacatggattcaaggcttttcacatcctcccccagaccttcctcctgccagctgagtacgcggaattttgtaattcatattcgaaggaccggggaccttggatagtaaaaccagtggcatcttcaagggggcggggcgtctacctgatcaacaatccaaaccagatctccctggaagagaacattttggtctcccgttacattaacaaccccctgctcatagatgatttcaagtttgacgtgcgcctctatgtgctcgtgacttcctatgatcctcttgtcatctatctctatgaagaaggattggctaggtttgcaactgtgcgatatgatcaaggagccaagaacattcggaaccagttcatgcatctgacaaactacagtgtcaacaagaaaagtggagattacgtcagttgtgacgatccagaagtggaggattatggaaacaaatggagcatgagtgctatgcttaggtacctgaaacaagaaggcagagatacaaccgcattgatggcccatgtagaagacctgatcattaagactataatctctgctgaactagctattgctactgcctgtaaaacctttgttcctcatcgcagcagttgttttgaactctatggctttgacgtgctcatagattctactctgaagccatggttgttggaagtgaatctctctccttctttggcctgtgatgcgcctctggacctaaagattaaagccagtatgatttcagatatgttcactgttgtaggatttgtgtgccaagatcctgcccagcgggcatcaactcggccaatttatcccacctttgagtcttccaggcgaaaccctttccagaaacctcagcgtccagtatctgcacagtttcagtcgtcaaaggccaagcagcgttgccgtccactctctgccagtgatgcggaaatgaaaaacctcgtgggctcagcccgggagaaagggccagggaagttgggtggttctgtgcttggtctgtcaatggaggagatcaaagttttacgaagggtgaaggaggagaatgatcggcgaggtggatttattcgcatatttcctacatctgagacatgggaaatatatgggtcctacctcgagcataagacctcaatgaactatatgctggcaacacgcctcttccaggacagaatgactgctgatggagcgccagaattgaagatagagagtctgaattcaaaggccaagctgcatgctgcactttacgagaggaagctcctgtctctggaggtgcgaaaacgtagacgacggagtagcagattgagggcaatgaggccaaaatacccagtgattacccaaccagctgaaatgaatgttaaaactgagacagagagtgaagaggaggaagaagtcgcattagataatgaagatgaagaacaggaggcttcccaggaggagtctgcaggatttcttagagaaaatcaagccaaatatacaccctcattgacagctttggtagaaaatacacccaaagaaaattccatgaaagttcgtgaatggaataataaaggtggacactgctgcaaacttgagactcaggagctagagcctaaatttaacctgatgcagattcttcaagataatggcaatcttagcaaaatgcaggcccgaatagcattctctgcctatctccagcatgttcaaattcgcctgatgaaagacagtggcggtcagacgttcagtgccagttgggctgccaaagaggatgaacagatggagctggttgttcgtttcctcaagcgagcatcaaataacctccagcattcactgaggatggtattacccagtcgacgattggcacttctggaacgcagaagaatcctggcccaccagctgggtgactttatcattgtatacaacaaggaaacagaacaaatggctgaaaagaaatcaaagaagaaagttgaggaagaagaggaagatggggtgaatatggaaaactttcaggagttcatcagacaagcaagtgaggctgaactggaggaggtgttgactttttatacccaaaagaacaagtctgctagtgtcttcctggggactcactctaaaatttctaagaacaacaacaattattctgatagtggggcaaaaggtgatcaccctgagactataatggaagaagtgaaaataaagccacctaaacagcaacagacgacagaaattcattctgataaattatctcgatttaccacttcagcagaaaaagaggcaaaattagtttatagcaattcctcctctggtcctactgctactctgcagaaaattcccaacacccatttgtcatctgttacaacctctgacctctctccagggccttgccaccattcttctttatctcaaattccttcagctatccccagcatgcctcaccagccaacaattttactgaacacagtctctgccagtgcttctccctgcctacatcccggggcacagaacatcccaagccctactggcctgccacgctgtcgatcaggaagtcacaccattggtcccttttcttccttccaaagtgctgcacacatctatagccagaaactgtctcgtccctcttcagcaaaggcagcaggatcgtgctatctaaacaagcatcattcaggaatagccaaaacacaaaaagagggagaagatgcttctttatatagcaaacggtacaaccaaagtatggttacagctgaacttcagcggctagctgagaagcaggcagcgagacagtattctccatccagccacatcaacctcctcacccaacaggtaacaaacctgaatttggcaactggcatcataaacagaagcagtgcttcagctcccccaaccctccgacccatcatcagtcctagtggcccgacatggtctacacagtcagacccccaagctcccgagaatcactccagctctcctggaagcaggagcctgcagacagggggatttgcctgggaaggagaagtagaaaacaacgtgtacagccaggctacaggggtggtcccccagcacaagtatcaccccacagcaggcagctatcagcttcaatttgccctgcagcaacttgaacaacaaaaacttcagtcccggcagctcctggaccagagtcgagcccggcaccaggcaatctttggcagccagacactacctaactccaatttatggacaatgaataatggtgcaggttgtagaatttccagtgccacagctagtggccagaagccaaccactctgccacaaaaagtggtaccacctccaagttcttgcgcctccctggttcccaaacccccacccaaccacgaacaagtgctcagaagggcaacatcccagaaagcttccaatacccgcttcagatcctcctttcaaaactatttgtggtatttcttccaagcagtcagctgaactgaggacgacagcctacaaacaactacatgcatctgaactgtctcttgtaaatgagcttttttcagagccagaatcatactctccaggaaatatggagaaagaaa

SEQ ID NO: 195961 - DNA, 1961 bp, Homo sapiens
  Payload ID: 18664
  Gene Name: tubulin tyrosine ligase-like family member 5
  ENST ID: ENST00000556977
  CDS Start-End: 260-634
cgcctgcgcagtggctccgagcgggcggttgcttgttggttgttgtagtaaccggggaagcagccgtcggcggctgccctgagccttcctggggaaggaggagggaggtaggcgcagagcgcggtccacgcctgctcgccccgaaccatgggaagatgagacaggaatctgtgccatccaaattgcttgatccagtgaatctgctaggaaaggtctctgaggcccccgtctgctgactgcatgacaaaccctaaaggaaatgccaatcgtgatggcccgggacctggaggaaacagcatcatcctcagaggatgaggaggtcataagtcaagaggatcatccatgcatcatgtggactggaggctgcaggagaattccagttttggtattccatgccgacgctattcttacaaaggacaacaatattagagtaattggagaacgttatcatttgtcttataagattgtacgaacggacagtcgcctagtacgcagcattctgacagcccatggatttcatgaagttcacccaagcagcactgactataacctaatgtggacaggatcccacctgaagcccttcttactgcgcaccctctctgaagcacaaaaagttaatcactttcccaggtaatgctctttgtagctgctttgcttcatttaaaggtacatgacattggggcatgtagccagcaaaggtaattagtgtccttaaagaagaggaagatgaaaatgaagaagaagaaggacttttttttttttttttgagatgagtatcgctctgtcacccaggctggagtgcagtggcatgatcttggctcactgcaacctctgcctcctgagttcaagcaattctcctgcctcagcctacccagtagctgggaatacaagcttgcaccaccatgcccggctaatttttgtatctttgggagagacgaggtttcgccatgtaggccaggctggtctcaaactcctgacctcaattgatctgcctgccttggcctcccaaagtgctgggattacagacatgagccaccacgcccggccagaagaagaaatttttctggtacggaacagcactctgcaaatcaaactgttgtgttcatatccctgagcatgaatgaacactttctaagggctatatagacatggatggttttaaaggagatagtttctggttctctttcctaaagttgagctgcttgggagtacctcatgaggatgggtttgcctttcttacttccccttcacagttactgttttttcacttttattaaagaatggctcacctagaatcttagtctggtatattgtccttaggtgtagaaattttcagggttccaaagaaaggtagaaaaaaattagtgtctaatttaattctagtaatagcataacaaatcctttttgcatgatggtagtttctatttctttgtttttaaaataattgaaggatgatataatctagctattagctgatcattaaacataattttgatgacagatcattttataattttttgatgtgtaattaggaaggagttcacagagttgagcgtcattggtgtttggatgaattgtatactacaatacttgcaatgataatcagtcatgtatatataaacagttatagccttacggtcacagggaattaaaaatatatgccaattcctatgtataattttgctgtacagaaggtatgatatgatgtaaaagacaagtattaaatacgttaggctaacctgttgtttgtgggaaatgaaagaattaaaaacaagagtgactgggggatagtgtctgtgtggcagtctgagggaggcttttctggcatgctgggaatgttctatacagaacttgagtggtggctacacagttgtgttcactttgtaaaaattcattatgccctgccgtgttctttgtatacttttctgtacatacgttaacttcattaaaaagcatatttt

SEQ ID NO: 195962 - DNA, 2624 bp, Homo sapiens
  Payload ID: 18664
  Gene Name: tubulin tyrosine ligase-like family member 5
  ENST ID: ENST00000554510
  CDS Start-End: 120-2447
agatcaaagttttacgaagggtgaaggaggagaatgatcggcgaggtggatttattcgcatatttcctacatctgagacatgggaaatatatgggtcctacctcgagcataagacctcaatgaactatatgctggcaacacgcctcttccaggacaggggaaacccaagaagaagcttattgacaggaagaacacgaatgactgctgatggagcgccagaattgaagatagagagtctgaattcaaaggccaagctgcatgctgcactttacgagaggaagctcctgtctctggaggtgcgaaaacgtagacgacggagtagcagattgagggcaatgaggccaaaatacccagtgattacccaaccagctgaaatgaatgttaaaactgagacagagagtgaagaggaggaagaagtcgcattagataatgaagatgaagaacaggaggcttcccaggaggagtctgcaggatttcttagagaaaatcaagccaaatatacaccctcattgacagctttggtagaaaatacacccaaagaaaattccatgaaagttcgtgaatggaataataaaggtggacactgctgcaaacttgagactcaggagctagagcctaaatttaacctgatgcagattcttcaagataatggcaatcttagcaaaatgcaggcccgaatagcattctctgcctatctccagcatgttcaaattcgcctgatgaaagacagtggcggtcagacgttcagtgccagttgggctgccaaagaggatgaacagatggagctggttgttcgtttcctcaagcgagcatcaaataacctccagcattcactgaggatggtattacccagtcgacgattggcacttctggaacgcagaagaatcctggcccaccagctgggtgactttatcattgtatacaacaaggaaacagaacaaatggctgaaaagaaatcaaagaagaaagttgaggaagaagaggaagatggggtgaatatggaaaactttcaggagttcatcagacaagcaagtgaggctgaactggaggaggtgttgactttttatacccaaaagaacaagtctgctagtgtcttcctggggactcactctaaaatttctaagaacaacaacaattattctgatagtggggcaaaaggtgatcaccctgagactataatggaagaagtgaaaataaagccacctaaacagcaacagacgacagaaattcattctgataaattatctcgatttaccacttcagcagaaaaagaggcaaaattagtttatagcaattcctcctctggtcctactgctactctgcagaaaattcccaacacccatttgtcatctgttacaacctctgacctctctccagggccttgccaccattcttctttatctcaaattccttcagctatccccagcatgcctcaccagccaacaattttactgaacacagtctctgccagtgcttctccctgcctacatcccggggcacagaacatcccaagccctactggcctgccacgctgtcgatcaggaagtcacaccattggtcccttttcttccttccaaagtgctgcacacatctatagccagaaactgtctcgtccctcttcagcaaaggcaggatcgtgctatctaaacaagcatcattcaggaatagccaaaacacaaaaagagggagaagatgcttctttatatagcaaacggtacaaccaaagtatggttacagctgaacttcagcggctagctgagaagcaggcagcgagacagtattctccatccagccacatcaacctcctcacccaacaggtaacaaacctgaatttggcaactggcatcataaacagaagcagtgcttcagctcccccaaccctccgacccatcatcagtcctagtggcccgacatggtctacacagtcagacccccaagctcccgagaatcactccagctctcctggaagcaggagcctgcagacagggggatttgcctgggaaggagaagtagaaaacaacgtgtacagccaggctacaggggtggtcccccagcacaagtatcaccccacagcaggcagctatcagcttcaatttgccctgcagcaacttgaacaacaaaaacttcagtcccggcagctcctggaccagagtcgagcccggcaccaggcaatctttggcagccagacactacctaactccaatttatggacaatgaataatggtgcaggttgtagaatttccagtgccacagctagtggccagaagccaaccactctgccacaaaaagtggtaccacctccaagttcttgcgcctccctggttcccaaacccccacccaaccacgaacaagtgctcagaagggcaacatcccagaaagcttccaatacccgcttcagatcctcctttcaaaactatttgtggtatttcttccaagcagtcagctgaactgaggacgacagcctacaaacaactacatgcatctgaactgtctcttgtaaatgagcttttttcagagccagaatcatactctccaggaaatatggagaaagaaacctgaggagattgaagtttgccaggcacaagggcaaaactcagactgaatgaatttgaaagggtggggcc

SEQ ID NO: 195963 - DNA, 3071 bp, Homo sapiens
  Payload ID: 18664
  Gene Name: tubulin tyrosine ligase-like family member 5
  Uniprot ID: Q6EMB2
  ENST ID: ENST00000556893
  CDS Start-End: 71-2524
gaaaaacctcgtgggctcagcccgggagaaagggccagggaagttgggtggttctgtgcttggtctgtcaatggaggagatcaaagttttacgaagggtgaaggaggagaatgatcggcgaggtggatttattcgcatatttcctacatctgagacatgggaaatatatgggtcctacctcgagcataagacctcaatgaactatatgctggcaacacgcctcttccaggacaggggaaacccaagaagaagcttattgacaggaagaacacgaatgactgctgatggagcgccagaattgaagatagagagtctgaattcaaaggccaagctgcatgctgcactttacgagaggaagctcctgtctctggaggtgcgaaaacgtagacgacggagtagcagattgagggcaatgaggccaaaatacccagtgattacccaaccagctgaaatgaatgttaaaactgagacagagagtgaagaggaggaagaagtcgcattagataatgaagatgaagaacaggaggcttcccaggaggagtctgcaggatttcttagagaaaatcaagccaaatatacaccctcattgacagctttggtagaaaatacacccaaagaaaattccatgaaagttcgtgaatggaataataaaggtggacactgctgcaaacttgagactcaggagctagagcctaaatttaacctgatgcagattcttcaagataatggcaatcttagcaaaatgcaggcccgaatagcattctctgcctatctccagcatgttcaaattcgcctgatgaaagacagtggcggtcagacgttcagtgccagttgggctgccaaagaggatgaacagatggagctggttgttcgtttcctcaagcgagcatcaaataacctccagcattcactgaggatggtattacccagtcgacgattggcacttctggaacgcagaagaatcctggcccaccagctgggtgactttatcattgtatacaacaaggaaacagaacaaatggctgaaaagaaatcaaagaagaaagttgaggaagaagaggaagatggggtgaatatggaaaactttcaggagttcatcagacaagcaagtgaggctgaactggaggaggtgttgactttttatacccaaaagaacaagtctgctagtgtcttcctggggactcactctaaaatttctaagaacaacaacaattattctgatagtggggcaaaaggtgatcaccctgagactataatggaagaagtgaaaataaagccacctaaacagcaacagacgacagaaattcattctgataaattatctcgatttaccacttcagcagaaaaagaggcaaaattagtttatagcaattcctcctctggtcctactgctactctgcagaaaattcccaacacccatttgtcatctgttacaacctctgacctctctccagggccttgccaccattcttctttatctcaaattccttcagctatccccagcatgcctcaccagccaacaattttactgaacacagtctctgccagtgcttctccctgcctacatcccggggcacagaacatcccaagccctactggcctgccacgctgtcgatcaggaagtcacaccattggtcccttttcttccttccaaagtgctgcacacatctatagccagaaactgtctcgtccctcttcagcaaaggcaggatcgtgctatctaaacaagcatcattcaggaatagccaaaacacaaaaagagggagaagatgcttctttatatagcaaacggtacaaccaaagtatggttacagctgaacttcagcggctagctgagaagcaggcagcgagacagtattctccatccagccacatcaacctcctcacccaacaggtaacaaacctgaatttggcaactggcatcataaacagaagcagtgcttcagctcccccaaccctccgacccatcatcagtcctagtggcccgacatggtctacacagtcagacccccaagctcccgagaatcactccagctctcctggaagcaggagcctgcagacagggggatttgcctgggaaggagaagtagaaaacaacgtgtacagccaggctacaggggtggtcccccagcacaagtatcaccccacagcaggcagctatcagcttcaatttgccctgcagcaacttgaacaacaaaaacttcagtcccggcagctcctggaccagagtcgagcccggcaccaggcaatctttggcagccagacactacctaactccaatttatggacaatgaataatggtgcaggttgtagaatttccagtgccacagctagtggccagaagccaaccactctgccacaaaaagtggtaccacctccaagttcttgcgcctccctggttcccaaacccccacccaaccacgaacaagtgctcagaagggcaacatcccagaaagcttccaatacccgcttcagatcctcctttcaaaactatttgtggtatttcttccaagcagtcagctgaactgaggacgacagcctacaaacaactacatgcatctgaactgtctcttgtaaatgagcttttttcagagccagaatcatactctccaggaaatatggagaaagaaacctgaggagattgaagtttgccaggcacaagggcaaaactcagactgaatgaatttgaaagggtggggccaaagatgttgtaacctgggagacttctctgaagaaagaaaactgtttaagaaacacagactgaactgcagtacttttccttaaatagctgagatgaccttctttaccctgggcttaggtgattctcatcagggtgacctgagtggaagttggtggtaacgactgttctgtgtcagcacccaggacagtggtgtctgttaaggctgccagggattagcagggaggaaagccatcaggactgggtagcctggtagcaccaaatcccaattaatgttacctgaacatgtggtgaggtcagccgtatgatgaaagatgtttaagagattaatgtcagaagaatatgaaaataaacaccggcttaaaaaatgtta

SEQ ID NO: 195964 - DNA, 339 bp, Homo sapiens
  Payload ID: 18664
  Gene Name: tubulin tyrosine ligase-like family member 5
  ENST ID: ENST00000555018
  CDS Start-End: 1-183
aacctcctcacccaacaggtaacaaacctgaatttggcaactggcatcataaacagaagcagtgcttcagctcccccaaccctccgacccatcatcagtcctagtggcccgacatggtctacacagtcagacccccaagctcccgagaatcactccagctctcctggaagcagtttcatataactgaactcaaacaacctcgctgaacaatgctcatttgggaagtgggaaggaaatttcctttatgtagttgagagatgtggctaaagataaaatccacgtagcttctggcaataatgtaagcagcttccaaattaaaaaagaaaccactgtattgaa

SEQ ID NO: 195965 - DNA, 3371 bp, Homo sapiens
  Payload ID: 18665
  Gene Name: tubulin tyrosine ligase-like family member 6
  ENST ID: ENST00000376681
  CDS Start-End: 1-557
agccaatgggagcgttactccttcatccttcgaggagggggccggcaggtgtggttgcaagctggactagcagcccagcggggcgagacgggggagtaggaattgcgggggcctggtatttccccagagcctcctcccaggccagggagatgccacagtgcccgactttggaaagccaggaaggggaaaactccgaagagaagggggacagttccaaagaagatccaaaagaaaccgtcgcgctggcttttgtgagagagaacccaggggcacaaaacggacttcagaatgcccagcagcaaggcaagaagaagaggaagaaaaagaggatgcctttaaaaaatagcaggaaaagaagatttccttgttttaagaaggcgctgatttgtcctggaaatttagtacgccttcagtatgatagcaccatactgacttatcaggatccaactgcagcttgtgcattccagttcttgtttaatatttcaccatgccttgctccattcagactgattgatgaaggaaagcttgtccactttcttattcatagcttcccttaatggggggaagaggaaggagacaagtattttggccaaaaatattttcaattcctgtccctgatgagccagtggagtaaaaggcttgaggcaatgatgttagtgagaagctgcaagcaagatcagctgtaattgcaatacagaatttctaccttctgggtagagtaatagtaccctgatgccatgttttccaccatgctgtacccccttggactcgtgtcctcagcaacagggacggtcaaaccaggcttagcatggcaggctagatttcagacagctccacctgggacaggatgtttctggatacagtcacttgttctggcaagtgtgtctctgtcttgctgctttcctttttctcttttccagatgattggtgatcaatctatccagctgccggtatgagagtgtgcgcagggctgcccaacagtacggctttagagagggaggggaagacgatgactggactctctattggacagattactcagtgtcactggagcgggtgatggaaatgaaaagttaccagaagatcaatcacttccccgggatgagtgaaatctgccggaaggacttgctggccaggaacatgagccgcatgttaaagatgttccctaaagatttccgctttttccctaggacctggtgtcttcctgctgactggggagatttgcagacctacagcaggtcaagaaaaaataagacatacatttgtaagccggattcgggctgccaagggaaaggtatattcatcacccggacagtgaaagaaatcaaaccaggggaggatatgatctgtcagctgtatatttcaaagccctttatcattgatgggtttaagtttgacctacggatttatgtactggtgacatcctgtgaccctctcaggatttttgtgtacaatgaaggactggcccgctttgcgacgacctcttactcccgcccttgcacagacaacctggatgatatctgcatgcacctgactaattattccattaataagcacagttcaaatttcagtcgagatgcacactctggcagtaagaggaagctctccaccttcagtgcatacttggaggaccacagctacaacgtggagcagatatggagggatattgaggacgtcatcatcaagaccctcatctcggcccaccccatcatcaggcataactaccacacctgcttccccaaccacacactcaacagcgcctgctttgagatcctgggctttgacattttgttggaccacaaactcaaaccctggctgctggaggtcaaccactctccaagcttctccaccgactctcggttggataaagaggtgaaagatggtctgctgtatgacaccttagtcctgatcaacctggaaagctgtgacaagaagaaagtcttggaggaggagagacaacgggggcagttcctgcagcagtgttgttctcgggagatgaggattgaggaagccaagggtttccgggccgtgcagttaaagaaaactgaaacgtatgagaaggaaaactgtggagggttccgactgatttatcccagtctgaattcggagaagtatgagaagtttttccaggacaacaactccctcttccagaatactgttgcttccagggctcgggaggagtatgcccggcaactgatccaggagctgagactaaaacgggagaaaaagcccttccaaatgaagaagaaggtagagatgcagggggaatcggcaggcgagcaagtgagaaagaagggcatgaggggctggcaacagaaacaacagcagaaagacaaggccgccacccaagcctccaaacagtacatccagccattgacattagtatcctacacacctgacttgctcttgagtgtcagaggtgaaaggaaaaatgaaacagacagcagcctcaaccaggaggctcccacggaggaggccagctctgttttccccaagctgacgtctgcgaagcccttcagttctctacccgatctgaggaatatcaatctcagcagctcgaagttggagcccagtaaacccaacttcagcatcaaggaggccaagtctgcctctgcagtgaacgtattcactggcactgtgaatcagactggatctctgccacttttcccttcctacctcttaacttgcaggaaacaatgtgtctcttccgacagtgtctccagtgttcacagaatcaactgaagttttgtttgctcatctagatatactggtcttccattagttcctagtagcagcaatggggccaacagccctgcctctgttccctcccagttagcttacagtgctacaggaccatgatttctggggttggattggtgctgccccaggacacactccagttgccgtaccagtggcacttctctgggttcttcacatggcaccatcatccagaatactcccccagataaagcaacttcgggagtagtgtttcagagaaggactcatgatttccaggagtcaaaagccctcagtccaccaacagaactatgccagttggtcttcgtctccaagataaaagatgaggtcagggatgggcatggtgcataactctgagccctgagtgagagaactgaggcagctgcaacttcacaaggtcaaggcccgacctccgcccatccccaccagcccaaagacttgccacctcagtgcccgagcatcctctggtgacctccctcaccagcccaacttaatctcaccagtgaaaacagaggtgaggcgagagtacccagcctgaagatgcttcttctatcagcctgcagaaatgttacactttcccttcaggcatccattaataaaagaaattgccatgc

SEQ ID NO: 195966 - DNA, 3551 bp, Homo sapiens
  Payload ID: 18665
  Gene Name: tubulin tyrosine ligase-like family member 6
  Uniprot ID: Q8N841
  ENST ID: ENST00000393382
  CDS Start-End: 143-2818
aattggattcgggagggagggggcatggcagctactgcaggggccaatcgaaggcctagaaggccccgtatgcaaatatgagggccgggcggacccaaagttagggcgagcgcgggttggggttggggctgtctggcagccaatgggagcgttactccttcatccttcgaggagggggccggcaggtgtggttgcaagctggactagcagcccagcggggcgagacgggggagtaggaattgcgggggcctggtatttccccagagcctcctcccaggccagggagatgccacagtgcccgactttggaaagccaggaaggggaaaactccgaagagaagggggacagttccaaagaagatccaaaagaaaccgtcgcgctggcttttgtgagagagaacccaggggcacaaaacggacttcagaatgcccagcagcaaggcaagaagaagaggaagaaaaagagattggtgatcaatctatccagctgccggtatgagagtgtgcgcagggctgcccaacagtacggctttagagagggaggggaagacgatgactggactctctattggacagattactcagtgtcactggagcgggtgatggaaatgaaaagttaccagaagatcaatcacttccccgggatgagtgaaatctgccggaaggacttgctggccaggaacatgagccgcatgttaaagatgttccctaaagatttccgctttttccctaggacctggtgtcttcctgctgactggggagatttgcagacctacagcaggtcaagaaaaaataagacatacatttgtaagccggattcgggctgccaagggaaaggtatattcatcacccggacagtgaaagaaatcaaaccaggggaggatatgatctgtcagctgtatatttcaaagccctttatcattgatgggtttaagtttgacctacggatttatgtactggtgacatcctgtgaccctctcaggatttttgtgtacaatgaaggactggcccgctttgcgacgacctcttactcccgcccttgcacagacaacctggatgatatctgcatgcacctgactaattattccattaataagcacagttcaaatttcagtcgagatgcacactctggcagtaagaggaagctctccaccttcagtgcatacttggaggaccacagctacaacgtggagcagatatggagggatattgaggacgtcatcatcaagaccctcatctcggcccaccccatcatcaggcataactaccacacctgcttccccaaccacacactcaacagcgcctgctttgagatcctgggctttgacattttgttggaccacaaactcaaaccctggctgctggaggtcaaccactctccaagcttctccaccgactctcggttggataaagaggtgaaagatggtctgctgtatgacaccttagtcctgatcaacctggaaagctgtgacaagaagaaagtcttggaggaggagagacaacgggggcagttcctgcagcagtgttgttctcgggagatgaggattgaggaagccaagggtttccgggccgtgcagttaaagaaaactgaaacgtatgagaaggaaaactgtggagggttccgactgatttatcccagtctgaattcggagaagtatgagaagtttttccaggacaacaactccctcttccagaatactgttgcttccagggctcgggaggagtatgcccggcaactgatccaggagctgagactaaaacgggagaaaaagcccttccaaatgaagaagaaggtagagatgcagggggaatcggcaggcgagcaagtgagaaagaagggcatgaggggctggcaacagaaacaacagcagaaagacaaggccgccacccaagcctccaaacagtacatccagccattgacattagtatcctacacacctgacttgctcttgagtgtcagaggtgaaaggaaaaatgaaacagacagcagcctcaaccaggaggctcccacggaggaggccagctctgttttccccaagctgacgtctgcgaagcccttcagttctctacccgatctgaggaatatcaatctcagcagctcgaagttggagcccagtaaacccaacttcagcatcaaggaggccaagtctgcctctgcagtgaacgtattcactggcactgtgcacttaacctccgtagaaaccaccccagaatccaccacccaactctcaatctccccaaagtctccgccaaccctggctgtgaccgccagctctgagtacagtggcccagagacggacagggtggtatcctttaaatgcaagaagcagcagacccctccacacttaacccagaagaaaatgttaaaatcttttctgcccacaaaatccaagagcttctgggagagtccgaacacaaactggactttgctaaagagtgacatgaacaagccacatttgatatccgagctactcaccaagcttcaactgagtgggaagctctccttcttcccagctcactacaaccccaagctggggatgaataacctgtcacaaaacccctccctgcctggggagtgccactcccgcagtgacagctctggcgagaagaggcagctggatgtgtcctccctcctcttgcagagtcctcagagctataatgttactctgagggacctgctggtgattgccactccagcccaactggatccaaggccttgtagaagccacgcaagtgctatgagggacccatgtatgcaggatcaagaagcatacagccattgcctgatctctggccaaaaaggatgtgagaggagctagaatcagactggatctctgccacttttcccttcctacctcttaacttgcaggaaacaatgtgtctcttccgacagtgtctccagtgttcacagaatcaactgaagttttgtttgctcatctagatatactggtcttccattagttcctagtagcagcaatggggccaacagccctgcctctgttccctcccagttagcttacagtgctacaggaccatgatttctggggttggattggtgctgccccaggacacactccagttgccgtaccagtggcacttctctgggttcttcacatggcaccatcatccagaatactcccccagataaagcaacttcgggagtagtgtttcagagaaggactcatgatttccaggagtcaaaagccctcagtccaccaacagaactatgccagttggtcttcgtctccaagataaaagatgaggtcagggatgggcatggtgcataactctgagccctgagtgagagaactgaggcagctgcaacttcacaaggtcaaggcccgacctccgcccatccccaccagcccaaagacttgccacctcagtgcccgagcatcctctggtgacctccctcaccagcccaacttaatctcaccagtgaaaacagaggtgaggcgagagtacccagcctgaagatgcttcttctatcagcctgcagaaatgttacactttcccttcaggcatccattaataaaagaaattgccatgctt

SEQ ID NO: 195967 - DNA, 2548 bp, Homo sapiens
  Payload ID: 18665
  Gene Name: tubulin tyrosine ligase-like family member 6
  Uniprot ID: Q8N841
  ENST ID: ENST00000433608
  CDS Start-End: 55-1809
atttttccttagtctaagggcacagaatggaaaggttctcattttcctcctccaatgagaattggcaccccaacagcaggccctgggccctcggctgtgatggaggggtgtctcggggtagcagaactaaggaagctctccaccttcagtgcatacttggaggaccacagctacaacgtggagcagatatggagggatattgaggacgtcatcatcaagaccctcatctcggcccaccccatcatcaggcataactaccacacctgcttccccaaccacacactcaacagcgcctgctttgagatcctgggctttgacattttgttggaccacaaactcaaaccctggctgctggaggtcaaccactctccaagcttctccaccgactctcggttggataaagaggtgaaagatggtctgctgtatgacaccttagtcctgatcaacctggaaagctgtgacaagaagaaagtcttggaggaggagagacaacgggggcagttcctgcagcagtgttgttctcgggagatgaggattgaggaagccaagggtttccgggccgtgcagttaaagaaaactgaaacgtatgagaaggaaaactgtggagggttccgactgatttatcccagtctgaattcggagaagtatgagaagtttttccaggacaacaactccctcttccagaatactgttgcttccagggctcgggaggagtatgcccggcaactgatccaggagctgagactaaaacgggagaaaaagcccttccaaatgaagaagaaggtagagatgcagggggaatcggcaggcgagcaagtgagaaagaagggcatgaggggctggcaacagaaacaacagcagaaagacaaggccgccacccaagcctccaaacagtacatccagccattgacattagtatcctacacacctgacttgctcttgagtgtcagaggtgaaaggaaaaatgaaacagacagcagcctcaaccaggaggctcccacggaggaggccagctctgttttccccaagctgacgtctgcgaagcccttcagttctctacccgatctgaggaatatcaatctcagcagctcgaagttggagcccagtaaacccaacttcagcatcaaggaggccaagtctgcctctgcagtgaacgtattcactggcactgtgcacttaacctccgtagaaaccaccccagaatccaccacccaactctcaatctccccaaagtctccgccaaccctggctgtgaccgccagctctgagtacagtggcccagagacggacagggtggtatcctttaaatgcaagaagcagcagacccctccacacttaacccagaagaaaatgttaaaatcttttctgcccacaaaatccaagagcttctgggagagtccgaacacaaactggactttgctaaagagtgacatgaacaagccacatttgatatccgagctactcaccaagcttcaactgagtgggaagctctccttcttcccagctcactacaaccccaagctggggatgaataacctgtcacaaaacccctccctgcctggggagtgccactcccgcagtgacagctctggcgagaagaggcagctggatgtgtcctccctcctcttgcagagtcctcagagctataatgttactctgagggacctgctggtgattgccactccagcccaactggatccaaggccttgtagaagccacgcaagtgctatgagggacccatgtatgcaggatcaagaagcatacagccattgcctgatctctggccaaaaaggatgtgagaggagctagaatcagactggatctctgccacttttcccttcctacctcttaacttgcaggaaacaatgtgtctcttccgacagtgtctccagtgttcacagaatcaactgaagttttgtttgctcatctagatatactggtcttccattagttcctagtagcagcaatggggccaacagccctgcctctgttccctcccagttagcttacagtgctacaggaccatgatttctggggttggattggtgctgccccaggacacactccagttgccgtaccagtggcacttctctgggttcttcacatggcaccatcatccagaatactcccccagataaagcaacttcgggagtagtgtttcagagaaggactcatgatttccaggagtcaaaagccctcagtccaccaacagaactatgccagttggtcttcgtctccaagataaaagatgaggtcagggatgggcatggtgcataactctgagccctgagtgagagaactgaggcagctgcaacttcacaaggtcaaggcccgacctccgcccatccccaccagcccaaagacttgccacctcagtgcccgagcatcctctggtgacctccctcaccagcccaacttaatctcaccagtgaaaacagaggtgaggcgagagtacccagcctgaagatgcttcttctatcagcctgcagaaatgttacactttcccttcaggcatccattaataaaagaaattgccatgcttactgcc

SEQ ID NO: 195968 - DNA, 543 bp, Homo sapiens
  Payload ID: 18665
  Gene Name: tubulin tyrosine ligase-like family member 6
  ENST ID: ENST00000424018
  CDS Start-End: 60-143
attttcctcctccaatgagaattggcaccccaacagcaggccctgggccctcggctgtgatggaggggtgtctcggggtagcagaactaaggtcaaccactctccaagcttctccaccgactctcggttggataaagaggtgaaagatggtctgctgtatgacaccttagtcctgatcaacctggaaagctgtgacaagaagaaagtcttggaggaggagagacaacgggggcagttcctgcagcagtgttgttctcgggagatgaggattgaggaagccaagggtttccgggccgtgcagttaaagaaaactgaaacgtatgagaaggaaaactgtggagggttccgactgatttatcccagtctgaattcggagaagtatgagaagtttttccaggacaacaactccctcttccagaatactgttgcttccagggctcgggaggagtatgcccggcaactgatccaggagctgagactaaaacgggagaaaaagcccttccaaatgaagaagaaggtagagatgcagggggaatcggcagg

SEQ ID NO: 195969 - DNA, 580 bp, Homo sapiens
  Payload ID: 18665
  Gene Name: tubulin tyrosine ligase-like family member 6
  ENST ID: ENST00000456415
  CDS Start-End: 70-216
aaatatgagggccgggcggacccaaagttagggcgagcgcgggttggggttggggctgtctggcagccaatgggagcgttactccttcatccttcgaggagggggccggcaggtgtggttgcaagctggactagcagcccagcggggcgagacgggggagtaggaattgcggaaccactggaggccttcagagggatgcttccagtagggaaatgaggaccaaaagatgaaaaggaggggcctggtatttccccagagcctcctcccaggccagggagatgccacagtgcccgactttggaaagccaggaaggggaaaactccgaagagaagggggacagttccaaagaagatccaaaagaaaccgtcgcgctggcttttgtgagagagaacccaggggcacaaaacggacttcagaatgcccagcagcaaggcaagaagaagaggaagaaaaagagattggtgatcaatctatccagctgccggtatgagagtgtgcgcagggctgcccaacagtacggctttagagagggaggggaagacgatgactggactctctattggacagattactcagtgtc

SEQ ID NO: 195970 - DNA, 1928 bp, Homo sapiens
  Payload ID: 18665
  Gene Name: tubulin tyrosine ligase-like family member 6
  ENST ID: ENST00000416950
  CDS Start-End: 100-726
atttttccttagtctaagggcacagaatggaaaggttctcattttcctcctccaatgagaattggcaccccaacagcaggccctgggccctcggctgtgatggaggggtgtctcggggtagcagaactaaggaagctctccaccttcagtgcatacttggaggaccacagctacaacgtggagcagatatggagggatattgaggacgtcatcatcaagaccctcatctcggcccaccccatcatcaggcataactaccacacctgcttccccaaccacacactcaacagcgcctgctttgagatcctgggctttgacattttgttggaccacaaactcaaaccctggctgctggaggtcaaccactctccaagcttctccaccgactctcggttggataaagaggtgaaagatggtctgctgtatgacaccttagtcctgatcaacctggaaagctgtgacaagaagaaagtcttggaggaggagagacaacgggggcagttcctgcagcagtgttgttctcgggagatgaggattgaggaagccaagggtttccgggccgtgcagttaaagaaaactgaaacgtatgagaaggaaaactgtggagggttccgactgatttatcccagtctgaattcggagaagtatgagaagtttttccaggacaacaactccctcttccagaatactgttgcttccagggctcgggaggagtatgcccggtaggaagacatccgggatgaggcaactgatccaggagctgagactaaaacgggagaaaaagcccttccaaatgaagaagaaggtagagatgcagggggaatcggcaggcgagcaagtgagaaagaagggcatgaggggctggcaacagaaacaacagcagaaagacaaggccgccacccaagcctccaaacagtacatccagccattgacattagtatcctacacacctgacttgctcttgagtgtcagaggtgaaaggaaaaatgaaacagacagcagcctcaaccaggaggctcccacggaggaggccagctctgttttccccaagctgacgtctgcgaagcccttcagttctctacccgatctgaggaatatcaatctcagcagctcgaagttggagcccagtaaacccaacttcagcatcaaggaggccaagtctgcctctgcagtgaacgtattcactggcactgtgaatcagactggatctctgccacttttcccttcctacctcttaacttgcaggaaacaatgtgtctcttccgacagtgtctccagtgttcacagaatcaactgaagttttgtttgctcatctagatatactggtcttccattagttcctagtagcagcaatggggccaacagccctgcctctgttccctcccagttagcttacagtgctacaggaccatgatttctggggttggattggtgctgccccaggacacactccagttgccgtaccagtggcacttctctgggttcttcacatggcaccatcatccagaatactcccccagataaagcaacttcgggagtagtgtttcagagaaggactcatgatttccaggagtcaaaagccctcagtccaccaacagaactatgccagttggtcttcgtctccaagataaaagatgaggtcagggatgggcatggtgcataactctgagccctgagtgagagaactgaggcagctgcaacttcacaaggtcaaggcccgacctccgcccatccccaccagcccaaagacttgccacctcagtgcccgagcatcctctggtgacctccctcaccagcccaacttaatctcaccagtgaaaacagaggtgaggcgagagtacccagcctgaagatgcttcttctatcagcctgcagaaatgttacactttcccttcaggcatccattaataaaagaaattgccatgctt

SEQ ID NO: 195971 - DNA, 7976 bp, Homo sapiens
  Payload ID: 18666
  Gene Name: tubulin tyrosine ligase-like family member 7
  Uniprot ID: Q6ZT98
  ENST ID: ENST00000260505
  CDS Start-End: 379-3042
gttccaggcactccgcgtcgagcaccggagtcccgagccgtggctgccacgggcggtgggcgggcggaggagagcaccggaccaccagtgcaggctgccgagtcggggcggccgcccacggggaagctgcgaggcgcgggagcacctgggggaccgcttgcagcggggacgcgaggacccgggctgggctttcctcacccgggtaccttgttatcccataactttggtatcctgaaatctgaggattccaccaagataatatgataagaactttcagtgatttggggccatatcctacttagactaatgtggaatttccagatttcctgagagcttggtacagcagcacacactgcttgctaatcagcacaggcaataatgccatctctgcctcaagaaggagttattcagggaccctctcccctggatttgaatacagaattaccttatcaaagcacaatgaaaaggaaagtcagaaagaagaaaaagaagggaaccattacagcaaatgttgccgggacaaagtttgaaattgttcgtttagtaatagatgaaatgggatttatgaaaactccagatgaggatgaaacaagtaatcttatatggtgtgattctgctgttcagcaggagaaaatttcagagctgcaaaattatcagaggatcaaccattttccaggaatgggggagatctgtaggaaggatttcttagcaagaaatatgaccaaaatgatcaagtctcggcctctggattatacctttgttcctcgaacttggatctttcctgctgaatatactcaattccaaaattatgtgaaagaattgaagaaaaaacggaagcagaaaacttttatagtgaaaccagctaatggtgcaatgggtcatgggatttctttgataagaaatggtgacaaacttccatctcaggatcatttgattgttcaagaatacattgaaaagcctttcctaatggaaggttacaagtttgacttacgaatttatattctggttacatcgtgtgatccactaaaaatatttctctaccatgatgggcttgtgcgaatgggtacagagaagtacattccacctaatgagtccaatttgacccagttatacatgcatctgacaaactactccgtgaacaagcataatgagcattttgaacgggatgaaactgagaacaaaggcagcaaacgttccatcaaatggtttacagaattccttcaagcaaatcaacatgatgttgctaagttttggagtgatatttcagaattggtggtaaagaccctgattgtagcagaacctcatgtcctgcatgcctatcgaatgtgtagacctggtcaacctccaggaagcgaaagtgtctgctttgaagtcctgggatttgatattttgttggatagaaaactaaagccatggcttctggagattaaccgagccccaagctttggaactgatcagaaaatagactatgatgtaaaaaggggagtgctgctaaatgcgttgaagctactaaacataaggaccagtgacaaaagaagaaacttggccaaacaaaaagctgaggctcaaaggaggctctatggtcaaaattcaattaaaaggctcttaccaggctcctcagactgggaacagcagagacaccagttggagaggcggaaagaagagttgaaagagagactcgctcaagtacgaaagcagatctcacgagaagaacatgaaaatcgacatatggggaattatagacgaatttatcctcctgaagataaagcattacttgaaaagtatgaaaatttgttagctgttgcctttcagaccttcctttcaggaagagcagcttcattccagcgagagttgaataatcctttgaaaaggatgaaggaagaagatattttggatcttctggagcaatgtgaaattgatgatgaaaagttgatgggaaaaactaccaagactcgaggaccaaagcctctgtgttctatgcctgagagtactgagataatgaaaagaccaaagtactgcagcagtgacagcagttatgatagtagcagcagctcttcagaatctgacgaaaatgaaaaagaagagtaccaaaataagaaaagagaaaagcaagttacatataatcttaaaccctccaaccactacaaattaattcaacaacccagctccataagacgttcagtcagctgccctcggtccatctctgctcaatcaccttccagtggggacacccgcccattttctgctcaacaaatgatatctgtgtcacggccaacttctgcatctcggtcacattccttaaaccgtgcttcctcctacatgaggcatctgcctcacagtaatgatgcctgctctaccaactctcaagtgagtgagtctttgcggcaactgaaaacaaaagaacaagaagatgatctaacaagtcagaccttatttgttctcaaagacatgaagatccggtttccaggaaagtcagatgcagaatcagaacttctgatagaagatatcattgataactggaagtatcataaaaccaaagtggcttcatattggctcataaaattggactctgtaaaacaacgaaaagttttggacatagtgaaaacaagtattcgtacagttcttccacgcatctggaaggtgcctgatgttgaagaagtaaatttatatcggattttcaaccgggtttttaatcgcttactctggagtcgtggccaagggctgtggaactgtttctgtgattcaggatcctcttgggagagtatattcaataaaagcccggaggtggtgactcctttgcagctccagtgttgccagcgcctagtggagctttgtaaacagtgcctgctagtggtttacaaatatgcaactgacaaaagaggatcactttcaggcattggtcctgactggggtaattccaggtatttactaccagggagcacccaattcttcttgagaacaccaacctacaacttgaagtacaattcacctggaatgactcgctccaatgttttgtttacatccagatatggccatctgtgaaacagaagggaagatcgccattggttatacataacagcaattcatttttttcctctgaagttgaacatgcaaagaacatgaccattaagtgctgttttatgtatataagacatatatatgtgtgaaaatatatgcacatatgcaccctaataacatatatttattatattaaatgatatatgaaagaagaattagcagaaaatggaatataagacttaacctttctggaaacgtaataaaccatgttaaaattgtttacacaaatatgtgaatgtctagaatctgctaggtttataattaattccttcctactagaaatgttatttttgctgcagagtatataaaacaaattgatcttgaagatccaattacagtgttaaattattttctagataacatgccttttgacctgaaaaagggtttagtataataccttaaaaattctcatatatagtagccattttaaatgaaacaaaaagatttagaagcctggtgttgcttgatgataagattaagaagtttaaaacgggtttatcattactatagcacactgtaaagtgctagaaaagtcataacctgattctccaatctttttattcctctatgtggaaatttagctacttgtaataaggtacattttcagtaaggatctggtgagatcatattatgatctaacatgaaagacaggctgggcgcggtggctcacgcctgtaattccagcactttgggaggccgaggtgagtggatcaccgctggtcaggagtttgagactagcctggccaacatggtgaaaccccatctctactaaaaatacaaaaattagctgggcgtgatggtaagtgcttgtaatcccagctacttgggcggctgagacaggagaatcacttgaacctgggaggcggaggttgcagtgagccgagattgtgccattgcattctagcctgggtgacaagagtgaaactctgtctcaaaaaaaaaaaataataataaaataaaataaataaataaataaaaagaagataaaaataaataaataaaatggaagacaatccaatgggttaaaaataaaatgtaaactagctttcatttttacttttcataatcacataaaggaacagaaaatgatggtaacaaaatctttctatatggcttttatgtcttataccactcatttttatttggaaagtatatctttgatgggtttaacatgtggttaaatacaatttctcctgtttcgcagaagtagaagagttgacacatttcactcattttagtgttacaggataatgagacaaacttatttttataaatctctcaaggttgaaatcaacttatattgcaaattctaatacagtagtttctcattgcaccacagaaacagttaaaggattgtgaatagaagatttcaattatcacatattacaagtcatcagtgtacccttgagggtttttaaaaaatcaaaacagagaacgaagtgttcttgtccaaagttgttatgcataagtttcatagcagtttacttccttttcttgaatacagtttttaaaaccaagagtgagctttcagttttccataaaaatataagccgtactactttgacattgaaatcatcagtgcagccatcacttcttagaatttatttaaacttcttctcccaacagttttattttcttttagctgctaattattttcgaaattcatgaatgttttacctccttttactattctgaaagttatttcaagaagtggccccaaagcaggagaactgagaggggcaaattggcctggtttaattcacagcctgaagaattggcaacctaaagttataagttagatgtattttgcttttcaagccatcttctgagccttttttaggctgaaatgatttgtttatttcccaaattattgctagctacttgattttttatggctacctaacatccacatttggtagatacttttcctctctgcatgcatcccaaagaagaatttgctatttgtggaagaagagaataagggtatcagaatgaaggaaattacagtgactacactgtttatgactccattttgtgaattcttaaatatgctatggatttttttttagaaaaaataatgcaaaaattgggatattacagaatcaccataaagatgatcaacaagtaataagtcttttcatggagttcatttttcttttaaattcatgatttggccacaaaaatatatatataagtgtctgatatatgataacagcccagtttctcggccactcatttgcattatcttaaatcacaaataattacttaatttgctggagtgtgtgctttgcaacttttgtaccagagcaaaatttgtatttaaaacaaaaaataagaatgcccatcactaggagaaacactcctcacagaaaacacacacacacacacacacacaatttaaaaactgagtaaatttaaatgtatgaaagtaccccacaaattgatttcaacaaataaatttcatttctctagctacttatgtctggccttattttgagcgttacaattttattgccttcatttgcctatttagactgatgtagtttgatatgatgaagttgtgaataaaagccttgtgttcattatttatatatactacctggtatgctatggactgtgtctgctgtagtgctattccctaatgagcaactaagagaagacacaacaataaaccatggaagtgttgggaggccatggaaatgatttagaggtataaaatattcccaagtttttattataaatttttattcataggttaaaacatataagcataagtgattgtacaggtgtgactcccttttctaggagagaaaatagctttatttgaaaactccaaaagctacttaatcttaccagaggtttttaataggggaactgggtttacttacaatgaaagcatattttcattctgctatagaaaaacatatccctgctcattcagtaaatctaagattggaatgctttctagaactatgcaatatttgaataatttctagaaatgtctaagaaacaaccttttttattttaaatcatcacttacaaacgtagtctgagactgcaaactagttttcacttgactaatccatcattatagattagttaccatttgctctatataatctattgaagaaactattgttattcatattttgattaattttactagcaacaaatttttattttagtagcattgcatttaccttaaatatgtaaaaatgaagttgtaacaggatcaaatatggaaatggcaatggtaactctgcctagaacatagttgaatgtccttggttgtcggtaagatgcaaagatctatacaaattttatcataggtcaaaattatttctaaatatacaaacagtttcaactatttctttctccctaaaactaaaaccaaaccaaacccaaatgaagaaacctaaacttcttttcatctaatagttatacccaactagataatagtagcttctagacatcaataaaaagatttcattttaactgtctttttaatttgtaaaatatatgagtatggaattttgtatctaacttgaaatttcagatgttttaataatccaaatacgttcttctttagcatgtcaaagtactaatagttaaaaaatttctttagatttaagcatatacattacttgactttttcaaaagtatcaaaaaattgatagctgcagaaatgccattatttgattttctaaaaaacattgattcattcttaaatgtgtattctttaaaaaatagtaaatacctcaagagtgacagaaaactttccttttctgttctgtaatgctaatttaaactttgagtcttagtttacatggtcataggggttaaataaaatgtataactgtacaattaattgtgttcttgtgacctgatgattttttgaaaatttgcttttctctttaagaaatttaagttttcaagggccgtattagttatctaaatattttgggctaatgttgacttataaataaataaaaatttagaaatatattcatgatgacaattttgttacttacactgcctattctttatttcttttttagttcaaaggtgaaattttgacctttgtattaacaaagcctcaagaaaagagaaattctgccttttaaacattggttttccttgcattttatggtggtgtgattttgcctcagcaataataaaacataaaatatgttgttgcatcaagttcagtttgtctgctgagattatttttaagaaccaggttgaagcctctatgcctaaaaaagcgtttattgtctggatacatataaagcaagatatatggctacaaataagtcttgcaaccaaaattggtatattaaaatttactgcacactttgagattgctgccattttttggtgctttttggacctcgtcataaagggatgtatcgtatattagggaaaattactcaagttacacattctacattaactgcgctgtattatctacaggtacaatcaatggaccaatagttcctaaattagtaataaggcttaccttacaaaagtaatgaaataacactgatatttctctttcaaaggctaacagcaattcttggtcctgagctattcagttcatacaataactactgtacatgctacaacatctgaatattaatggttttgctgcagattctgggtatgaggattagcttgaaagcaatacatttgctaacatgaatcatgactcacattatccccgtgtgctttactacctgtatatgaatgcaaatgttgttacagaaaatatgcttgaaatgtcaatacagtgtgcaattagcgttgcattgtcatgctccagcatgtgatatctgtatggtgaagttatttcaattactctgatacattactataataaaaaagtttaacctaagaaa

SEQ ID NO: 195972 - DNA, 2550 bp, Homo sapiens
  Payload ID: 18666
  Gene Name: tubulin tyrosine ligase-like family member 7
  ENST ID: ENST00000485638
  CDS Start-End: 346-2007
tatattccttgggagcagagatgatactaatttatcttactatctccagtacctagcacagagtgtgtactctaaaaaaaatgtttttgatgtactaatatgtaaattagtacatattagggcaaggttgtttttttttttcactgatgaatccatagtccagaatagtgtctaacacttaataggtgctcagtagacatttgttgaatgaatgaaatcaatgaataagtaaatgaaggaatggagaaaatttaaatctttgtggcaaatatcagtagcccagagaaagaaaatatatgctagtttgaatagaaattatttttcctattatgtccaatttacagaatgatcaagtctcggcctctggattatacctttgttcctcgaacttggatctttcctgctgaatatactcaattccaaaattatgtgaaagaattgaagaaaaaacggaagcagaaaacttttatagtgaaaccagctaatggtgcaatgggtcatgggatttctttgataagaaatggtgacaaacttccatctcaggatcatttgattgttcaagaatacattgaaaagcctttcctaatggaaggttacaagtttgacttacgaatttatattctggttacatcgtgtgatccactaaaaatatttctctaccatgatgggcttgtgcgaatgggtacagagaagtacattccacctaatgagtccaatttgacccagttatacatgcatctgacaaactactccgtgaacaagcataatgagcattttgaacgggatgaaactgagaacaaaggcagcaaacgttccatcaaatggtttacagaattccttcaagcaaatcaacatgatgttgctaagttttggagtgatatttcagaattggtggtaaagaccctgattgtagcagaacctcatgtcctgcatgcctatcgaatgtgtagacctggtcaacctccaggaagcgaaagtgtctgctttgaagtcctgggatttgatattttgttggatagaaaactaaagccatggcttctggagattaaccgagccccaagctttggaactgatcagaaaatagactatgatgtaaaaaggggagtgctgctaaatgcgttgaagctactaaacataaggaccagtgacaaaagaagaaacttggccaaacaaaaagctgaggctcaaaggaggctctatggtcaaaattcaattaaaaggctcttaccaggctcctcagactgggaacagcagagacaccagttggagaggcggaaagaagagttgaaagagagactcgctcaagtacgaaagcagatctcacgagaagaacatgaaaatcgacatatggggaattatagacgaatttatcctcctgaagataaagcattacttgaaaagtatgaaaatttgttagctgttgcctttcagaccttcctttcaggaagagcagcttcattccagcgagagttgaataatcctttgaaaaggatgaaggaagaagatattttggatcttctggagcaatgtgaaattgatgatgaaaagttgatgggaaaaactaccaagactcgaggaccaaagcctctgtgttctatgcctgagagtactgagataatgaaaagaccaaagtactgcagcagtgacagcagttatgatagtagcagcagctcttcagaatctgacgaaaatgaaaaagaagagtaccaaaataagaaaagagaaaagcaagttacatataatcttaaaccctccaaccactacaaattaattcaacaacccagctccataagacgttcagtcagctgccctcggtccatctctgctcaatcaccttccagtggggacacccgcccattttctgctcaacaaatgatatctgtgtcacggccaacttctgcatctcggtcacattccttaaaccgtgcttcctcctacatgaggcatctgcctcacagtaatgatgcctgctctaccaactctcaagtgattatactggcacaatgaaataagaccccctccaaatatctgtattctttcaaatttaagagtgagtctttgcggcaactgaaaacaaaagaacaagaagatgatctaacaagtcagaccttatttgttctcaaagacatgaagatccggtttccaggaaagtcagatgcagaatcagaacttctgatagaagatatcattgataactggaagtatcataaaaccaaagtggcttcatattggctcataaaattggactctgtaaaacaacgaaaagttttggacatagtgaaaacaagtattcgtacagttcttccacgcatctggaaggtgcctgatgttgaagaagtaaatttatatcggattttcaaccgggtttttaatcgcttactctggagtcgtggccaagggctgtggaactgtttctgtgattcaggatcctcttgggagagtatattcaataaaagcccggaggtggtgactcctttgcagctccagtgttgccagcgcctagtggagctttgtaaacagtgcctgctagtggtttacaaatatgcaact

SEQ ID NO: 195973 - DNA, 7157 bp, Homo sapiens
  Payload ID: 18666
  Gene Name: tubulin tyrosine ligase-like family member 7
  ENST ID: ENST00000474957
  CDS Start-End: 278-1711
gcttgggcagcgacagctgttccaggcactccgcgtcgagcaccggagtcccgagccgtggctgccacgggcggtgggcgggcggaggagagcaccggaccaccagtgcaggctgccgagtcggggcggccgcccacggggaagctgcgaggcgcgggagcacctgggggaccgcttgcagcggggacgcgaggacccgggctgggctttcctcacccgggaattggtggtaaagaccctgattgtagcagaacctcatgtcctgcatgcctatcgaatgtgtagacctggtcaacctccaggaagcgaaagtgtctgctttgaagtcctgggatttgatattttgttggatagaaaactaaagccatggcttctggagattaaccgagccccaagctttggaactgatcagaaaatagactatgatgtaaaaaggggagtgctgctaaatgcgttgaagctactaaacataaggaccagtgacaaaagaagaaacttggccaaacaaaaagctgaggctcaaaggaggctctatggtcaaaattcaattaaaaggctcttaccaggctcctcagactgggaacagcagagacaccagttggagaggcggaaagaagagttgaaagagagactcgctcaagtacgaaagcagatctcacgagaagaacatgaaaatcgacatatggggaattatagacgaatttatcctcctgaagataaagcattacttgaaaagtatgaaaatttgttagctgttgcctttcagaccttcctttcaggaagagcagcttcattccagcgagagttgaataatcctttgaaaaggatgaaggaagaagatattttggatcttctggagcaatgtgaaattgatgatgaaaagttgatgggaaaaactaccaagactcgaggaccaaagcctctgtgttctatgcctgagagtactgagataatgaaaagaccaaagtactgcagcagtgacagcagttatgatagtagcagcagctcttcagaatctgacgaaaatgaaaaagaagagtaccaaaataagaaaagagaaaagcaagttacatataatcttaaaccctccaaccactacaaattaattcaacaacccagctccataagacgttcagtcagctgccctcggtccatctctgctcaatcaccttccagtggggacacccgcccattttctgctcaacaaatgatatctgtgtcacggccaacttctgcatctcggtcacattccttaaaccgtgcttcctcctacatgaggcatctgcctcacagtaatgatgcctgctctaccaactctcaagtgagtgagtctttgcggcaactgaaaacaaaagaacaagaagatgatctaacaagtcagaccttatttgttctcaaagacatgaagatccggtttccaggaaagtcagatgcagaatcagaacttctgatagaagatatcattgataactggaagtatcataaaaccaaagtggcttcatattggctcataaaattggactctgtaaaacaacgaaaagttttggacatagtgaaaacaagtattcgtacagttcttccacgcatctggaaggtgcctgatgttgaagaagtaaatttatatcggattttcaaccgggtttttaatcgcttactctggagtcgtggccaagggctgtggaactgtttctgtgattcaggttacgtgtaaaatcttagaaaaatataatccaagtgtttgattatatccaagaatccaaggccttgattcttgcctttgcctgtcaacattcccaataataaaacaaaatcctcttgggagagtatattcaataaaagcccggaggtggtgactcctttgcagctccagtgttgccagcgcctagtggagctttgtaaacagtgcctgctagtggtttacaaatatgcaactgacaaaagaggatcactttcaggcattggtcctgactggggtaattccagggactgaacaaggacagcaatcacgaacctaaaggtgataaaacatacttggaaatgaagttatttgacttatataccttcactttcaaaagtccagagcaagagcatccaaaaatgtggtatttactaccagggagcacccaattcttcttgagaacaccaacctacaacttgaagtacaattcacctggaatgactcgctccaatgttttgtttacatccagatatggccatctgtgaaacagaagggaagatcgccattggttatacataacagcaattcatttttttcctctgaagttgaacatgcaaagaacatgaccattaagtgctgttttatgtatataagacatatatatgtgtgaaaatatatgcacatatgcaccctaataacatatatttattatattaaatgatatatgaaagaagaattagcagaaaatggaatataagacttaacctttctggaaacgtaataaaccatgttaaaattgtttacacaaatatgtgaatgtctagaatctgctaggtttataattaattccttcctactagaaatgttatttttgctgcagagtatataaaacaaattgatcttgaagatccaattacagtgttaaattattttctagataacatgccttttgacctgaaaaagggtttagtataataccttaaaaattctcatatatagtagccattttaaatgaaacaaaaagatttagaagcctggtgttgcttgatgataagattaagaagtttaaaacgggtttatcattactatagcacactgtaaagtgctagaaaagtcataacctgattctccaatctttttattcctctatgtggaaatttagctacttgtaataaggtacattttcagtaaggatctggtgagatcatattatgatctaacatgaaagacaggctgggcgcggtggctcacgcctgtaattccagcactttgggaggccgaggtgagtggatcaccgctggtcaggagtttgagactagcctggccaacatggtgaaaccccatctctactaaaaatacaaaaattagctgggcgtgatggtaagtgcttgtaatcccagctacttgggcggctgagacaggagaatcacttgaacctgggaggcggaggttgcagtgagccgagattgtgccattgcattctagcctgggtgacaagagtgaaactctgtctcaaaaaaaaaaaataataataaaataaaataaataaataaataaaaagaagataaaaataaataaataaaatggaagacaatccaatgggttaaaaataaaatgtaaactagctttcatttttacttttcataatcacataaaggaacagaaaatgatggtaacaaaatctttctatatggcttttatgtcttataccactcatttttatttggaaagtatatctttgatgggtttaacatgtggttaaatacaatttctcctgtttcgcagaagtagaagagttgacacatttcactcattttagtgttacaggataatgagacaaacttatttttataaatctctcaaggttgaaatcaacttatattgcaaattctaatacagtagtttctcattgcaccacagaaacagttaaaggattgtgaatagaagatttcaattatcacatattacaagtcatcagtgtacccttgagggtttttaaaaaatcaaaacagagaacgaagtgttcttgtccaaagttgttatgcataagtttcatagcagtttacttccttttcttgaatacagtttttaaaaccaagagtgagctttcagttttccataaaaatataagccgtactactttgacattgaaatcatcagtgcagccatcacttcttagaatttatttaaacttcttctcccaacagttttattttcttttagctgctaattattttcgaaattcatgaatgttttacctccttttactattctgaaagttatttcaagaagtggccccaaagcaggagaactgagaggggcaaattggcctggtttaattcacagcctgaagaattggcaacctaaagttataagttagatgtattttgcttttcaagccatcttctgagccttttttaggctgaaatgatttgtttatttcccaaattattgctagctacttgattttttatggctacctaacatccacatttggtagatacttttcctctctgcatgcatcccaaagaagaatttgctatttgtggaagaagagaataagggtatcagaatgaaggaaattacagtgactacactgtttatgactccattttgtgaattcttaaatatgctatggatttttttttagaaaaaataatgcaaaaattgggatattacagaatcaccataaagatgatcaacaagtaataagtcttttcatggagttcatttttcttttaaattcatgatttggccacaaaaatatatatataagtgtctgatatatgataacagcccagtttctcggccactcatttgcattatcttaaatcacaaataattacttaatttgctggagtgtgtgctttgcaacttttgtaccagagcaaaatttgtatttaaaacaaaaaataagaatgcccatcactaggagaaacactcctcacagaaaacacacacacacacacacacacaatttaaaaactgagtaaatttaaatgtatgaaagtaccccacaaattgatttcaacaaataaatttcatttctctagctacttatgtctggccttattttgagcgttacaattttattgccttcatttgcctatttagactgatgtagtttgatatgatgaagttgtgaataaaagccttgtgttcattatttatatatactacctggtatgctatggactgtgtctgctgtagtgctattccctaatgagcaactaagagaagacacaacaataaaccatggaagtgttgggaggccatggaaatgatttagaggtataaaatattcccaagtttttattataaatttttattcataggttaaaacatataagcataagtgattgtacaggtgtgactcccttttctaggagagaaaatagctttatttgaaaactccaaaagctacttaatcttaccagaggtttttaataggggaactgggtttacttacaatgaaagcatattttcattctgctatagaaaaacatatccctgctcattcagtaaatctaagattggaatgctttctagaactatgcaatatttgaataatttctagaaatgtctaagaaacaaccttttttattttaaatcatcacttacaaacgtagtctgagactgcaaactagttttcacttgactaatccatcattatagattagttaccatttgctctatataatctattgaagaaactattgttattcatattttgattaattttactagcaacaaatttttattttagtagcattgcatttaccttaaatatgtaaaaatgaagttgtaacaggatcaaatatggaaatggcaatggtaactctgcctagaacatagttgaatgtccttggttgtcggtaagatgcaaagatctatacaaattttatcataggtcaaaattatttctaaatatacaaacagtttcaactatttctttctccctaaaactaaaaccaaaccaaacccaaatgaagaaacctaaacttcttttcatctaatagttatacccaactagataatagtagcttctagacatcaataaaaagatttcattttaactgtctttttaatttgtaaaatatatgagtatggaattttgtatctaacttgaaatttcagatgttttaataatccaaatacgttcttctttagcatgtcaaagtactaatagttaaaaaatttctttagatttaagcatatacattacttgactttttcaaaagtatcaaaaaattgatagctgcagaaatgccattatttgattttctaaaaaacattgattcattcttaaatgtgtattctttaaaaaatagtaaatacctcaagagtgacagaaaactttccttttctgttctgtaatgctaatttaaactttgagtcttagtttacatggtcataggggttaaataaaatgtataactgtacaattaattgtgttcttgtgacctgatgattttttgaaaatttgcttttctctttaagaaatttaagttttcaagggccgtattagttatctaaatattttgggctaatgttgacttataaataaataaaaatttagaaatatattcatgatgacaattttgttacttacactgcctattctttatttcttttttagttcaaaggtgaaattttgacctttgtattaacaaagcctcaagaaaagagaaattctgccttttaaacattggttttccttgcattttatggtggtgtgattttgcctcagcaataataaaacataaaatatgttgttgcatcaagttcagtttgtctgctgagattatttttaagaaccaggttgaagcctctatgcctaaaaaagcgtttattgtctggatacatataaagcaagatatatggctacaaataagtcttgcaaccaaaattggtatattaaaatttactgcacactttgagattgctgccattttttggtgctttttggacctcgtcataaagggatgtatcgtatattagggaaaattactcaagttacacattctacattaactgcgctgtattatctacaggtacaatcaatggaccaatagttcctaaattagtaataaggcttaccttacaaaagtaatgaaataacactgatatttctctttcaaaggctaacagcaattcttggtcctgagctattcagttcatacaataactactgtacatgctacaacatctgaatattaatggttttgctgcagattctgggtatgaggattagcttgaaagcaatacatttgctaacatgaatcatgactcacattatccccgtgtgctttactacctgtatatgaatgcaaatgttgttacagaaaatatgcttgaaatgtcaatacagtgtgcaattagcgttgcattgtcatgctccagcatgtgatatctgtatggtgaagttatttcaattactctgatacattactataataaaaaagtttaacctaagaaa

SEQ ID NO: 195974 - DNA, 7828 bp, Homo sapiens
  Payload ID: 18666
  Gene Name: tubulin tyrosine ligase-like family member 7
  Uniprot ID: Q6ZT98
  ENST ID: ENST00000480174
  CDS Start-End: 171-2180
tgttatcccataactttggtatcctgaaatctgaggattccaccaagataatatgataagaactttcagtgatttggggccatatcctacttagactaatgtggaatttccagatttcctgagagcttggtacagcagcacacactgcttgctaatcagcacaggcaataatgccatctctgcctcaagaaggagttattcagggaccctctcccctggatttgaatacagaattaccttatcaaagcacaatgaaaaggaaagtcagaaagaagaaaaagaagggaaccattacagcaaatgttgccgggacaaagtttgaaattgttcgtttagtaatagatgaaatgggatttatgaaaactccagatgaggatgaaacaagtaatcttatatggtgtgattctgctgttcagcaggagaaaatttcagagctgcaaaattatcagaggatcaaccattttccaggaatgggggagatctgtaggaaggatttcttagcaagaaatatgaccaaaatgatcaagtctcggcctctggattatacctttgttcctcgaacttggatctttcctgctgaatatactcaattccaaaattatgtgaaagaattgaagaaaaaacggaagcagaaaacttttatagtgaaaccagctaatggtgcaatgggtcatgggatttctttgataagaaatggtgacaaacttccatctcaggatcatttgattgttcaagaatacattgaaaagcctttcctaatggaaggttacaagtttgacttacgaatttatattctggttacatcgtgtgatccactaaaaatatttctctaccatgatgggcttgtgcgaatgggtacagagaagtacattccacctaatgagtccaatttgacccagttatacatgcatctgacaaactactccgtgaacaagcataatgagcattttgaacgggatgaaactgagaacaaaggcagcaaacgttccatcaaatggtttacagaattccttcaagcaaatcaacatgatgttgctaagttttggagtgatatttcagaattggtggtaaagaccctgattgtagcagaacctcatgtcctgcatgcctatcgaatgtgtagacctggtcaacctccaggaagcgaaagtgtctgctttgaagtcctgggatttgatattttgttggatagaaaactaaagccatggcttctggagattaaccgagccccaagctttggaactgatcagaaaatagactatgatgtaaaaaggggagtgctgctaaatgcgttgaagctactaaacataaggaccagtgacaaaagaagaaacttggccaaacaaaaagctgaggctcaaaggaggctctatggtcaaaattcaattaaaaggctcttaccaggctcctcagactgggaacagcagagacaccagttggagaggcggaaagaagagttgaaagagagactcgctcaagtacgaaagcagatctcacgagaagaacatgaaaatcgacatatggggaattatagacgaatttatcctcctgaagataaagcattacttgaaaagtatgaaaatttgttagctgttgcctttcagaccttcctttcaggaagagcagcttcattccagcgagagttgaataatcctttgaaaaggatgaaggaagaagatattttggatcttctggagcaatgtgaaattgatgatgaaaagttgatgggaaaaactaccaagactcgaggaccaaagcctctgtgttctatgcctgagagtactgagataatgaaaagaccaaagtactgcagcagtgacagcagttatgatagtagcagcagctcttcagaatctgacgaaaatgaaaaagaagagtaccaaaataagaaaagagaaaagcaagttacatataatcttaaaccctccaaccactacaaattaattcaacaacccagctccataagacgttcagtcagctgccctcggtccatctctgctcaatcaccttccagtggggacacccgcccattttctgctcaacaaatgatatctgtgtcacggccaacttctgcatctcggtcacattccttaaaccgtgcttcctcctacatgaggcatctgcctcacagtaatgatgcctgctctaccaactctcaagtgattatactggcacaatgaaataagaccccctccaaatatctgtattctttcaaatttaagagtgagtctttgcggcaactgaaaacaaaagaacaagaagatgatctaacaagtcagaccttatttgttctcaaagacatgaagatccggtttccaggaaagtcagatgcagaatcagaacttctgatagaagatatcattgataactggaagtatcataaaaccaaagtggcttcatattggctcataaaattggactctgtaaaacaacgaaaagttttggacatagtgaaaacaagtattcgtacagttcttccacgcatctggaaggtgcctgatgttgaagaagtaaatttatatcggattttcaaccgggtttttaatcgcttactctggagtcgtggccaagggctgtggaactgtttctgtgattcaggatcctcttgggagagtatattcaataaaagcccggaggtggtgactcctttgcagctccagtgttgccagcgcctagtggagctttgtaaacagtgcctgctagtggtttacaaatatgcaactgacaaaagaggatcactttcaggcattggtcctgactggggtaattccaggtatttactaccagggagcacccaattcttcttgagaacaccaacctacaacttgaagtacaattcacctggaatgactcgctccaatgttttgtttacatccagatatggccatctgtgaaacagaagggaagatcgccattggttatacataacagcaattcatttttttcctctgaagttgaacatgcaaagaacatgaccattaagtgctgttttatgtatataagacatatatatgtgtgaaaatatatgcacatatgcaccctaataacatatatttattatattaaatgatatatgaaagaagaattagcagaaaatggaatataagacttaacctttctggaaacgtaataaaccatgttaaaattgtttacacaaatatgtgaatgtctagaatctgctaggtttataattaattccttcctactagaaatgttatttttgctgcagagtatataaaacaaattgatcttgaagatccaattacagtgttaaattattttctagataacatgccttttgacctgaaaaagggtttagtataataccttaaaaattctcatatatagtagccattttaaatgaaacaaaaagatttagaagcctggtgttgcttgatgataagattaagaagtttaaaacgggtttatcattactatagcacactgtaaagtgctagaaaagtcataacctgattctccaatctttttattcctctatgtggaaatttagctacttgtaataaggtacattttcagtaaggatctggtgagatcatattatgatctaacatgaaagacaggctgggcgcggtggctcacgcctgtaattccagcactttgggaggccgaggtgagtggatcaccgctggtcaggagtttgagactagcctggccaacatggtgaaaccccatctctactaaaaatacaaaaattagctgggcgtgatggtaagtgcttgtaatcccagctacttgggcggctgagacaggagaatcacttgaacctgggaggcggaggttgcagtgagccgagattgtgccattgcattctagcctgggtgacaagagtgaaactctgtctcaaaaaaaaaaaataataataaaataaaataaataaataaataaaaagaagataaaaataaataaataaaatggaagacaatccaatgggttaaaaataaaatgtaaactagctttcatttttacttttcataatcacataaaggaacagaaaatgatggtaacaaaatctttctatatggcttttatgtcttataccactcatttttatttggaaagtatatctttgatgggtttaacatgtggttaaatacaatttctcctgtttcgcagaagtagaagagttgacacatttcactcattttagtgttacaggataatgagacaaacttatttttataaatctctcaaggttgaaatcaacttatattgcaaattctaatacagtagtttctcattgcaccacagaaacagttaaaggattgtgaatagaagatttcaattatcacatattacaagtcatcagtgtacccttgagggtttttaaaaaatcaaaacagagaacgaagtgttcttgtccaaagttgttatgcataagtttcatagcagtttacttccttttcttgaatacagtttttaaaaccaagagtgagctttcagttttccataaaaatataagccgtactactttgacattgaaatcatcagtgcagccatcacttcttagaatttatttaaacttcttctcccaacagttttattttcttttagctgctaattattttcgaaattcatgaatgttttacctccttttactattctgaaagttatttcaagaagtggccccaaagcaggagaactgagaggggcaaattggcctggtttaattcacagcctgaagaattggcaacctaaagttataagttagatgtattttgcttttcaagccatcttctgagccttttttaggctgaaatgatttgtttatttcccaaattattgctagctacttgattttttatggctacctaacatccacatttggtagatacttttcctctctgcatgcatcccaaagaagaatttgctatttgtggaagaagagaataagggtatcagaatgaaggaaattacagtgactacactgtttatgactccattttgtgaattcttaaatatgctatggatttttttttagaaaaaataatgcaaaaattgggatattacagaatcaccataaagatgatcaacaagtaataagtcttttcatggagttcatttttcttttaaattcatgatttggccacaaaaatatatatataagtgtctgatatatgataacagcccagtttctcggccactcatttgcattatcttaaatcacaaataattacttaatttgctggagtgtgtgctttgcaacttttgtaccagagcaaaatttgtatttaaaacaaaaaataagaatgcccatcactaggagaaacactcctcacagaaaacacacacacacacacacacacaatttaaaaactgagtaaatttaaatgtatgaaagtaccccacaaattgatttcaacaaataaatttcatttctctagctacttatgtctggccttattttgagcgttacaattttattgccttcatttgcctatttagactgatgtagtttgatatgatgaagttgtgaataaaagccttgtgttcattatttatatatactacctggtatgctatggactgtgtctgctgtagtgctattccctaatgagcaactaagagaagacacaacaataaaccatggaagtgttgggaggccatggaaatgatttagaggtataaaatattcccaagtttttattataaatttttattcataggttaaaacatataagcataagtgattgtacaggtgtgactcccttttctaggagagaaaatagctttatttgaaaactccaaaagctacttaatcttaccagaggtttttaataggggaactgggtttacttacaatgaaagcatattttcattctgctatagaaaaacatatccctgctcattcagtaaatctaagattggaatgctttctagaactatgcaatatttgaataatttctagaaatgtctaagaaacaaccttttttattttaaatcatcacttacaaacgtagtctgagactgcaaactagttttcacttgactaatccatcattatagattagttaccatttgctctatataatctattgaagaaactattgttattcatattttgattaattttactagcaacaaatttttattttagtagcattgcatttaccttaaatatgtaaaaatgaagttgtaacaggatcaaatatggaaatggcaatggtaactctgcctagaacatagttgaatgtccttggttgtcggtaagatgcaaagatctatacaaattttatcataggtcaaaattatttctaaatatacaaacagtttcaactatttctttctccctaaaactaaaaccaaaccaaacccaaatgaagaaacctaaacttcttttcatctaatagttatacccaactagataatagtagcttctagacatcaataaaaagatttcattttaactgtctttttaatttgtaaaatatatgagtatggaattttgtatctaacttgaaatttcagatgttttaataatccaaatacgttcttctttagcatgtcaaagtactaatagttaaaaaatttctttagatttaagcatatacattacttgactttttcaaaagtatcaaaaaattgatagctgcagaaatgccattatttgattttctaaaaaacattgattcattcttaaatgtgtattctttaaaaaatagtaaatacctcaagagtgacagaaaactttccttttctgttctgtaatgctaatttaaactttgagtcttagtttacatggtcataggggttaaataaaatgtataactgtacaattaattgtgttcttgtgacctgatgattttttgaaaatttgcttttctctttaagaaatttaagttttcaagggccgtattagttatctaaatattttgggctaatgttgacttataaataaataaaaatttagaaatatattcatgatgacaattttgttacttacactgcctattctttatttcttttttagttcaaaggtgaaattttgacctttgtattaacaaagcctcaagaaaagagaaattctgccttttaaacattggttttccttgcattttatggtggtgtgattttgcctcagcaataataaaacataaaatatgttgttgcatcaagttcagtttgtctgctgagattatttttaagaaccaggttgaagcctctatgcctaaaaaagcgtttattgtctggatacatataaagcaagatatatggctacaaataagtcttgcaaccaaaattggtatattaaaatttactgcacactttgagattgctgccattttttggtgctttttggacctcgtcataaagggatgtatcgtatattagggaaaattactcaagttacacattctacattaactgcgctgtattatctacaggtacaatcaatggaccaatagttcctaaattagtaataaggcttaccttacaaaagtaatgaaataacactgatatttctctttcaaaggctaacagcaattcttggtcctgagctattcagttcatacaataactactgtacatgctacaacatctgaatattaatggttttgctgcagattctgggtatgaggattagcttgaaagcaatacatttgctaacatgaatcatgactcacattatccccgtgtgctttactacctgtatatgaatgcaaatgttgttacagaaaatatgcttgaaatgtcaatacagtgtgcaattagcgttgcattgtcatgctccagcatgtgatatctgtatggtgaagttatttcaattactctgatacattactataataaaaaagtttaacctaagaaa

SEQ ID NO: 195975 - DNA, 2028 bp, Homo sapiens
  Payload ID: 18666
  Gene Name: tubulin tyrosine ligase-like family member 7
  ENST ID: ENST00000610996
  CDS Start-End: 397-2028
gcttgggcagcgacagctgttccaggcactccgcgtcgagcaccggagtcccgagccgtggctgccacgggcggtgggcgggcggaggagagcaccggaccaccagtgcaggctgccgagtcggggcggccgcccacggggaagctgcgaggcgcgggagcacctgggggaccgcttgcagcggggacgcgaggacccgggctgggctttcctcacccgggtaccttgttatcccataactttggtatcctgaaatctgaggattccaccaagataatatgataagaactttcagtgatttggggccatatcctacttagactaatgtggaatttccagatttcctgagagcttggtacagcagcacacactgcttgctaatcagcacaggcaataatgccatctctgcctcaagaaggagttattcagggaccctctcccctggatttgaatacagaattaccttatcaaagcacaatgaaaaggaaagtcagaaagaagaaaaagaagggaaccattacagcaaatgttgccgggacaaagtttgaaattgttcgtttagtaatagatgaaatgggatttatgaaaactccagatgaggatgaaacaagtaatcttatatggtgtgattctgctgttcagcaggagaaaatttcagagctgcaaaattatcagaggatcaaccattttccaggaatgggggagatctgtaggaaggatttcttagcaagaaatatgaccaaaatgatcaagtctcggcctctggattatacctttgttcctcgaacttggatctttcctgctgaatatactcaattccaaaattatgtgaaagaattgaagaaaaaacggaagcagaaaacttttatagtgaaaccagctaatggtgcaatgggtcatgggatttctttgataagaaatggtgacaaacttccatctcaggatcatttgattgttcaagaatacattgaaaagcctttcctaatggaaggttacaagtttgacttacgaatttatattctggttacatcgtgtgatccactaaaaatatttctctaccatgatgggcttgtgcgaatgggtacagagaagtacattccacctaatgagtccaatttgacccagttatacatgcatctgacaaactactccgtgaacaagcataatgagcattttgaacgggatgaaactgagaacaaaggcagcaaacgttccatcaaatggtttacagaattccttcaagcaaatcaacatgatgttgctaagttttggagtgatatttcagaattggtggtaaagaccctgattgtagcagaacctcatgtcctgcatgcctatcgaatgtgtagacctggtcaacctccaggaagcgaaagtgtctgctttgaagtcctgggatttgatattttgttggatagaaaactaaagccatggcttctggagattaaccgagccccaagctttggaactgatcagaaaatagactatgatgtaaaaaggggagtgctgctaaatgcgttgaagctactaaacataaggaccagtgacaaaagaagaaacttggccaaacaaaaagctgaggctcaaaggaggctctatggtcaaaattcaattaaaaggctcttaccaggctcctcagactgggaacagcagagacaccagttggagaggcggaaagaagagttgaaagagagactcgctcaagtacgaaagcagatctcacgagaagaacatgaaaatcgacatatggggaattatagacgaatttatcctcctgaagataaagcattacttgaaaagtatgaaaatttgttagctgttgcctttcagaccttcctttcaggaagagcagcttcattccagcgagagttgaataatcctttgaaaaggatgaaggaagaagatattttggatcttctggagcaatgtgaaattgatgatgaaaagttgatgggaaaaactaccaagactcgaggaccaaagggtcgaataactcattatgtagtcaagctctttaagaacacttaa

SEQ ID NO: 195976 - DNA, 2505 bp, Homo sapiens
  Payload ID: 18667
  Gene Name: tubulin tyrosine ligase-like family member 8
  Uniprot ID: A6PVC2
  ENST ID: ENST00000266182
  CDS Start-End: 1-2505
atgaggctcctggatgggaaacagacttccaggtactcagagaatgcctgcgagaagaagattttctctatctacggacactacccggtggtccgggccgctctgcgaaggaagggctgggtagagaagaagttccactttttgcccaaggtcattccggatgtcgaggatgaaggcgcccgggtcaatgatgatacatgtgccaaagtcaaagaaaatcaagaaatggctttggagaaaacagacaacatccacgacgtgatgtctaggttggtaaaaaatgagatgccgtacctcctctggaccatcaagagggacatcattgactatcacagcctgacctacgaccagatgctgaaccactacgcaaagacagcctccttcaccaccaagatcgggctgtgcgtgaacatgcggagcctgccctggtacgtcccggccaaccccgactccttcttcccacgctgctacagcctctgcaccgagagtgagcagcaggagttcctggaagacttccggcgcaccatggcatccagcatcctcaagtgggtggtcagccaccagagctgcagcaggagcagcagaagcaagcccagggaccagagggaggaggccgggagcagcgacctgagcagcaggcaagatgctgaaaatgctgaggcaaagctcaggggcctcccggggcagcttgtggacatcgcgtgcaaggtgtgccaggcctacctggggcagctggagcatgaggacatcgacacgtcagcagatgccgtggaggacctcactgaggccgagtgggaggacctgacccagcagtactactccctcgttcaggtgcctttggggagtagcattgtcttgtgcatcttcaaaatccagaaggttatgatgtcatttgagccccccacagcccgagacaggcagtgccaggctctgctgaatagaatcacgtctgtgaaccctcagacggacattgacgggctccggaacatctggattataaagcccgcggccaagtcccggggccgaggtgagtcccctgacatagtgtgcatggaccgtgtggaggagatcctggagctggcagctgcagaccaccctctttccagggacaacaagtgggtggtccagaagtacatcgagacgccgctgctcatctgtgacaccaagttcgacatcagacagtggttcctcgtcacggactggaaccccctgaccatctggttctacaaggagagttacttgcggttctcaactcagcgcttctccctggacaagctggacagcgccatccacctgtgcaacaacgccgtccagaagtacctgaagaatgatgtgggccgcagccccctgctgcccgcacacaacatgtggaccagcaccaggttccaggagtacctgcagcgccagggccgtggcgccgtgtggggcagcgtcatctacccgtccatgaagaaggccatcgcccacgccatgaaggtggcccaggaccacgtggagcctcgcaagaacagctttgagctctacggggctgacttcgtccttgggagggacttcaggccctggctgatcgagatcaattccagccccaccatgcacccgtccacgccggtcacggcccagctgtgtgcacaggtgcaggaggacaccatcaaggtggccgtggaccgcagctgtgacatcggcaacttcgagctcctgtggaggcagccggtggttgagccgcccccattcagcgggtccgacctctgcgtggcgggcgtcagtgtgaggagagccaggaggcaggtgctgcccgtctgcaacctcaaggcctcggcctcgctgttggacgcgcagccgctgaaggcacggggcccctcggccatgccagaccctgcccagggacccccatcaccagctctccagcgggacttgggactgaaggaagagaaggggctccccctggccttgctggcacccttaaggggggcagccgagagcggtggagccgcacagcccacccgcaccaaagctgctgggaaggtggagctcccggcctgcccctgtcgccacgtggacagtcaggccccaaacaccggtgtccccgtagcccagcccgccaaaagctgggatccaaaccagctaaatgcgcacccgctggagcctgtgctgcggggcctgaagacagcagagggcgcgctgcgtccgccgcccggaggaaaaggagagggcacggtctgcagccgcctgccacaccacgggcaccacgtggccgcctgccagaccacgggcaccacgtgggatggtgggcctggggtgtgcttcctccggcagctcctggcatcagaactgcccatgggccctgggctgccgagggacccccgagcgccgccctgcctcgtgtgccgcgggctgctgccacccgccgggccctgcaagcgctgccgctcgttctgcgccgcggtcctgcagggcgcgtccttcgtgcggctcggcgggcggagctgcagcccgcggaccccgtga

SEQ ID NO: 195977 - DNA, 2549 bp, Homo sapiens
  Payload ID: 18667
  Gene Name: tubulin tyrosine ligase-like family member 8
  ENST ID: ENST00000433387
  CDS Start-End: 1-2549
atggaaccagagaggaaggggctatcgttggcttcttcttcagatggagacgggagagaagaaaataaattaaaacaaggaatttcccaagacttggcttcttcctccagattagacagatacaaaatagcaaggcagttaacagaaaaagcaatcaaggagaagaagattttctctatctacggacactacccggtggtccgggccgctctgcgaaggaagggctgggtagagaagaagttccactttttgcccaaggtcattccggatgtcgaggatgaaggcgcccgggtcaatgatgatacatgtgccaaagtcaaagaaaatcaagaaatggctttggagaaaacagacaacatccacgacgtgatgtctaggttggtaaaaaatgagatgccgtacctcctctggaccatcaagagggacatcattgactatcacagcctgacctacgaccagatgctgaaccactacgcaaagacagcctccttcaccaccaagatcgggctgtgcgtgaacatgcggagcctgccctggtacgtcccggccaaccccgactccttcttcccacgctgctacagcctctgcaccgagagtgagcagcaggagttcctggaagacttccggcgcaccatggcatccagcatcctcaagtgggtggtcagccaccagagctgcagcaggagcagcagaagcaagcccagggaccagagggaggaggccgggagcagcgacctgagcagcaggcaagatgctgaaaatgctgaggcaaagctcaggggcctcccggggcagcttgtggacatcgcgtgcaaggtgtgccaggcctacctggggcagctggagcatgaggacatcgacacgtcagcagatgccgtggaggacctcactgaggccgagtgggaggacctgacccagcagtactactccctcgttcatggcgatgctttcatctccaattcaagaaattacttttcgcagtgccaggctctgctgaatagaatcacgtctgtgaaccctcagacggacattgacgggctccggaacatctggattataaagcccgcggccaagtcccggggccgagacatagtgtgcatggaccgtgtggaggagatcctggagctggcagctgcagaccaccctctttccagggacaacaagtgggtggtccagaagtacatcgagacgccgctgctcatctgtgacaccaagttcgacatcagacagtggttcctcgtcacggactggaaccccctgaccatctggttctacaaggagagttacttgcggttctcaactcagcgcttctccctggacaagctggacagcgccatccacctgtgcaacaacgccgtccagaagtacctgaagaatgatgtgggccgcagccccctgctgcccgcacacaacatgtggaccagcaccaggttccaggagtacctgcagcgccagggccgtggcgccgtgtggggcagcgtcatctacccgtccatgaagaaggccatcgcccacgccatgaaggtggcccaggaccacgtggagcctcgcaagaacagctttgagctctacggggctgacttcgtccttgggagggacttcaggccctggctgatcgagatcaattccagccccaccatgcacccgtccacgccggtcacggcccagctgtgtgcacaggtgcaggaggacaccatcaaggtggccgtggaccgcagctgtgacatcggcaacttcgagctcctgtggaggcagccggtggttgagccgcccccattcagcgggtccgacctctgcgtggcgggcgtcagtgtgaggagagccaggaggcaggtgctgcccgtctgcaacctcaaggcctcggcctcgctgttggacgcgcagccgctgaaggcacggggcccctcggccatgccagaccctgcccagggacccccatcaccagctctccagcgggacttgggactgaaggaagagaaggggctccccctggccttgctggcacccttaaggggggcagccgagagcggtggagccgcacagcccacccgcaccaaagctgctgggaaggtggagctcccggcctgcccctgtcgccacgtggacagtcaggccccaaacaccggtgtccccgtagcccagcccgccaaaagctgggatccaaaccagctaaatgcgcacccgctggagcctgtgctgcggggcctgaagacagcagagggcgcgctgcgtccgccgcccggaggaaaaggagagggcacggtctgcagccgcctgccacaccacgggcaccacgtggccgcctgccagaccacgggcaccacgtgggatggtgggcctggggtgtgcttcctccggcagctcctggcatcagaactgcccatgggccctgggctgccgagggacccccgagcgccgccctgcctcgtgtgccgcgggctgctgccacccgccgggccctgcaagcgctgccgctcgttctgcgccgcggtcctgcagggcgcgtccttcgtgcggctcggcgggcggagctgcagcccgcggacccc

SEQ ID NO: 195978 - DNA, 1540 bp, Homo sapiens
  Payload ID: 18668
  Gene Name: tubulin tyrosine ligase-like family member 9
  ENST ID: ENST00000310998
  CDS Start-End: 197-514
ggatgtcgcctagagccccccggccggcccacaaactcccgtcccccttccggctctgcctggacgtccctgcgggccccgggggaaagcacccaacttctcccgcctcggcttctagcagaaacgtgacggggctggactttgatcgccgagggctctctgctcttcagagtctgcttggaacgggataagagggatggtgccatccagggaagctctgctgggaccaggcacaactgccattaggtgccccaagaaattacagatgacatcattgtatccagagaaaactcaaaggatttacaaactaccagaactaatcattcagcaagggcatcaaatacaagaaccaaaattacaagggccatggattgtcaaagggaaaagagcgagagcagagagcatcgatccggttcaagaccaccctcatgaacacactcatggacgtccttcgccacaggccaggatgggtggaagtgaaggacgaaggggagtgggatttctactggtgtgacgtcagctggctccgggagaacttcgaccacacctacatggatgaacatgtgcggatcagtcacttccggaaccactatgagctgacccggaagaactacatggtgaagaacctgaagcggttccggaagcagctggagcgtgaggcaggaaagctggaggcagccaagtgtgacttcttccccaaaacctttgagatgccttgcgagtaccacctgtttgtagaggagtttcgcaaaaacccaggaatcacctggatcatgaagcctgacacaagaagctctgacgaccagaaagatgatattcccgtggagaactatgtggctcagcgttacattgaaaatccttacctgataggaggccgcaagtttgacctgcgtgtctatgtgctggtgatgtcgtacatcccgctgcgggcctggctctaccgggatggctttgcccgattctccaacacccgcttcacactgaacagcattgatgaccagtatgttcacctcaccaacgtggctgtgcaaaaaacatctcccgactaccacccaaagaaggtggctcctggaggtcaatgcgtccccatcactgacagccagcagccaggaagactatgagctcaagacctgcctcctggaagacaccctgcatgttgtggacatggaagcgaggctgcgtcaacgatcggaagaaacaactgaggcagctcttctgctcccttcaagttcagaagaaagcttccagttgatccccagctgccaggaggaaatcagccttagcaggccttgtgtttgagattgggagctgagccagaaaccggaaaaccctgggctcatgggcaggacagcttcgggagttgagtgtcaagcccgaagggaagacttttggaaggaaaatactggcaaatccaagaagtgaaccagccgactttaggaaagccagaagccaggctactctagaccttctgccttcagagcatgaggacttctcccactcatccctgtacctgaggcacaccaacccagacaggtccagg

SEQ ID NO: 195979 - DNA, 2760 bp, Homo sapiens
  Payload ID: 18668
  Gene Name: tubulin tyrosine ligase-like family member 9
  ENST ID: ENST00000375921
  CDS Start-End: 249-566
gcgggggccttaccccaccctggcaccggcaggcgcgggcggatggggggatgtcgcctagagccccccggccggcccacaaactcccgtcccccttccggctctgcctggacgtccctgcgggccccgggggaaagcacccaacttctcccgcctcggcttctagcagaaacgtgacggggctggactttgatcgccgagggctctctgctcttcagagtctgcttggaacgggataagtgggagggatggtgccatccagggaagctctgctgggaccaggcacaactgccattaggtgccccaagaaattacagatgacatcattgtatccagagaaaactcaaaggatttacaaactaccagaactaatcattcagcaagggcatcaaatacaagaaccaaaattacaagggccatggattgtcaaagggaaaagagcgagagcagagagcatcgatccggttcaagaccaccctcatgaacacactcatggacgtccttcgccacaggccaggatgggtggaagtgaaggacgaaggggagtgggatttctactggtgtgacgtcagctggctccgggagaacttcgaccacacctacatggatgaacatgtgcggatcagtcacttccggaaccactatgagctgacccggaagaactacatggtgaagaacctgaagcggttccggaagcagctggagcgtgaggcaggaaagctggaggcagccaagtgtgacttcttccccaaaacctttgagatgccttgcgagtaccacctgtttgtagaggagtttcgcaaaaacccaggaatcacctggatcatgaagcctgtagcccggtctcaagggaaaggcatcttcctcttccgtaggctgaaggacatcgtggactggaggaaggacacaagaagctctgacgaccagaaagatgatattcccgtggagaactatgtggctcagcgttacattgaaaatccttacctgataggaggccgcaagtttgacctgcgtgtctatgtgctggtgatgtcgatgttcacctcaccaacgtggctgtgcaaaaaacatctcccgactaccacccaaagaagggctgcaagtggacgctgcagcgcttccggcagtacctggcgtccaaacacgggcccgaggcagtggagacactcttcagggacatcgacaacatctttgtcaaaagcctgcagagtgtgcagaaggtgatcatcagtgacaagcactgcttcgagctgtacggctatgacatcctcatcgaccaggacctcaagccgtggctcctggaggtcaatgcgtccccatcactgacagccagcagccaggaagactatgagctcaagacctgcctcctggaagacaccctgcatgttgtggacatggaagcgagcttttccccgattattccagcagaagtttgagggctgattctccttgctggtaactgggacacattcccattcctaaaccactcactgtgactctgcttgaccaggctcacgggaagggagaagcgagtcgggggctttgacctcatgtggaatgatggccctgttagcagagaggagggggctcctgacctgtcgggaatgggaaactttgtgaccaacacacatctcggctgcgtcaacgatcggaagaaacaactgaggcagctcttctgctcccttcaagttcagaagaaagcttccagttgatccccagctgccaggaggaaatcagccttagcaggccttgtgtttgagattgggagctgagccagaaaccggaaaaccctgggctcatgggcaggacagcttcgggagttgagtgtcaagcccgaagggaagacttttggaaggaaaatactggcaaatccaagaagtgaaccagccgactttaggaaagccagaagccaggctactctagaccttctgccttcagagcatgaggacttctcccactcatccctgtacctgaggcacaccaacccagacaggtccaggcatggactccaggttccctatttccagaaggaatgcgattagctttttttggcccagcacccaccctgccagggaggaaggggcaattttccagtgatgaaattgtgaatcaggcagtcacactggacaacatctagcaaggtgaattctgcaactccctactttatttacattttaaaataagcaatatattcatacggtttaaaatccaaagtttacaaaagggtatagggtgacatctccttccctcccacctgtgcgccccaaccctgcaggtgctgttctgagggaatcacactgtgcttgcacaaaaattattagcttataagacaccagccttccccttgctttcctcacttgatgtatcttggagcttgttccttattcttgattatagttgtatggtattgcactatctggagctaacacctgtgacccacactcatgttttaaaagtttctgcattagtcaaaaatatttaaaaggagattcaacttcacaacccatatgtctagcttctcttgaaaacacgtaagaactggccatgacagcctgtgtttctatgtaactatgagccagagccaaggagcggggggaccaggagaggtgtgcccctgccatgctgccatttgttatcacccgcctgtcaaatcacaggtttatttcaaggcaagaaccatgttcataggttgtattctaaatggagtggcgtgcccttactgaaggactagatgaggcaaataaagactagttgctgcta

SEQ ID NO: 195980 - DNA, 1263 bp, Homo sapiens
  Payload ID: 18668
  Gene Name: tubulin tyrosine ligase-like family member 9
  ENST ID: ENST00000375934
  CDS Start-End: 55-894
aagcacgcgaggcgcgcggtggcggtttggatctggcccctggggaatcgcgttatgtcgcgaccgaagaaccaaaattacaagggccatggattgtcaaagggaaaagagcgagagcagagagcatcgatccggttcaagaccaccctcatgaacacactcatggacgtccttcgccacaggccaggatgggtggaagtgaaggacgaaggggagtgggatttctactggtgtgacgtcagctggctccgggagaacttcgaccacacctacatggatgaacatgtgcggatcagtcacttccggaaccactatgagctgacccggaagaactacatggtgaagaacctgaagcggttccggaagcagctggagcgtgaggcaggaaagctggaggcagccaagtgtgacttcttccccaaaacctttgagatgccttgcgagtaccacctgtttgtagaggagtttcgcaaaaacccaggaatcacctggatcatgaagcctgtagcccggtctcaagggaaaggcatcttcctcttccgtaggctgaaggacatcgtggactggaggaaggacacaagaagctctgacgaccagaaagatgatattcccgtggagaactatgtggctcagcgttacattgaaaatccttacctgataggaggccgcaagtttgacctgcgtgtctatgtgctggtgatgtcgatgttcacctcaccaacgtggctgtgcaaaaaacatctcccgactaccacccaaagaagggctgcaagtggacgctgcagcgcttccggcagtacctggcgtccaaacacgggcccgaggcagtggagacactcttcagggacatcgacaacatctttgtcaaaagcctgcagagtgtgcagaaggtgatcatcagtgacaagcactgcttcgagctgtacggctatgacatcctcatcgaccaggacctcaagccgtggctcctggaggtcaatgcgtccccatcactgacagccagcagccaggaagactatgagctcaagacctgcctcctggaagacaccctgcatgttgtggacatggaagcgaggctcacgggaagggagaagcgagtcgggggctttgacctcatgtggaatgatggccctgttagcagagaggagggggctcctgacctgtcgggaatgggaaactttgtgaccaacacacatctcggctgcgtcaacgatcggaagaaacaactgaggcagctcttctgctcccttcaagttcagaaga

SEQ ID NO: 195981 - DNA, 2623 bp, Homo sapiens
  Payload ID: 18668
  Gene Name: tubulin tyrosine ligase-like family member 9
  Uniprot ID: Q3SXZ7
  ENST ID: ENST00000375938
  CDS Start-End: 254-1573
gaggtgggggcgggggccttaccccaccctggcaccggcaggcgcgggcggatggggggatgtcgcctagagccccccggccggcccacaaactcccgtcccccttccggctctgcctggacgtccctgcgggccccgggggaaagcacccaacttctcccgcctcggcttctagcagaaacgtgacggggctggactttgatcgccgagggctctctgctcttcagagtctgcttggaacgggataagagggatggtgccatccagggaagctctgctgggaccaggcacaactgccattaggtgccccaagaaattacagaaccaaaattacaagggccatggattgtcaaagggaaaagagcgagagcagagagcatcgatccggttcaagaccaccctcatgaacacactcatggacgtccttcgccacaggccaggatgggtggaagtgaaggacgaaggggagtgggatttctactggtgtgacgtcagctggctccgggagaacttcgaccacacctacatggatgaacatgtgcggatcagtcacttccggaaccactatgagctgacccggaagaactacatggtgaagaacctgaagcggttccggaagcagctggagcgtgaggcaggaaagctggaggcagccaagtgtgacttcttccccaaaacctttgagatgccttgcgagtaccacctgtttgtagaggagtttcgcaaaaacccaggaatcacctggatcatgaagcctgtagcccggtctcaagggaaaggcatcttcctcttccgtaggctgaaggacatcgtggactggaggaaggacacaagaagctctgacgaccagaaagatgatattcccgtggagaactatgtggctcagcgttacattgaaaatccttacctgataggaggccgcaagtttgacctgcgtgtctatgtgctggtgatgtcggtgtttgctgaatgcctgctgtggtctgggcacaggagacaggatgttcacctcaccaacgtggctgtgcaaaaaacatctcccgactaccacccaaagaagggctgcaagtggacgctgcagcgcttccggcagtacctggcgtccaaacacgggcccgaggcagtggagacactcttcagggacatcgacaacatctttgtcaaaagcctgcagagtgtgcagaaggtgatcatcagtgacaagcactgcttcgagctgtacggctatgacatcctcatcgaccaggacctcaagccgtggctcctggaggtcaatgcgtccccatcactgacagccagcagccaggaagactatgagctcaagacctgcctcctggaagacaccctgcatgttgtggacatggaagcgaggctcacgggaagggagaagcgagtcgggggctttgacctcatgtggaatgatggccctgttagcagagaggagggggctcctgacctgtcgggaatgggaaactttgtgaccaacacacatctcggctgcgtcaacgatcggaagaaacaactgaggcagctcttctgctcccttcaagttcagaagaaagcttccagttgatccccagctgccaggaggaaatcagccttagcaggccttgtgtttgagattgggagctgagccagaaaccggaaaaccctgggctcatgggcaggacagcttcgggagttgagtgtcaagcccgaagggaagacttttggaaggaaaatactggcaaatccaagaagtgaaccagccgactttaggaaagccagaagccaggctactctagaccttctgccttcagagcatgaggacttctcccactcatccctgtacctgaggcacaccaacccagacaggtccaggcatggactccaggttccctatttccagaaggaatgcgattagctttttttggcccagcacccaccctgccagggaggaaggggcaattttccagtgatgaaattgtgaatcaggcagtcacactggacaacatctagcaaggtgaattctgcaactccctactttatttacattttaaaataagcaatatattcatacggtttaaaatccaaagtttacaaaagggtatagggtgacatctccttccctcccacctgtgcgccccaaccctgcaggtgctgttctgagggaatcacactgtgcttgcacaaaaattattagcttataagacaccagccttccccttgctttcctcacttgatgtatcttggagcttgttccttattcttgattatagttgtatggtattgcactatctggagctaacacctgtgacccacactcatgttttaaaagtttctgcattagtcaaaaatatttaaaaggagattcaacttcacaacccatatgtctagcttctcttgaaaacacgtaagaactggccatgacagcctgtgtttctatgtaactatgagccagagccaaggagcggggggaccaggagaggtgtgcccctgccatgctgccatttgttatcacccgcctgtcaaatcacaggtttatttcaaggcaagaaccatgttcataggttgtattctaaatggagtggcgtgcccttactgaaggactagatgaggcaaataaagactagttgctgctatt

SEQ ID NO: 195982 - DNA, 3261 bp, Homo sapiens
  Payload ID: 18668
  Gene Name: tubulin tyrosine ligase-like family member 9
  Uniprot ID: Q3SXZ7
  ENST ID: ENST00000535842
  CDS Start-End: 1-1320
atggtgccatccagggaagctctgctgggaccaggcacaactgccattaggtgccccaagaaattacagaaccaaaattacaagggccatggattgtcaaagggaaaagagcgagagcagagagcatcgatccggttcaagaccaccctcatgaacacactcatggacgtccttcgccacaggccaggatgggtggaagtgaaggacgaaggggagtgggatttctactggtgtgacgtcagctggctccgggagaacttcgaccacacctacatggatgaacatgtgcggatcagtcacttccggaaccactatgagctgacccggaagaactacatggtgaagaacctgaagcggttccggaagcagctggagcgtgaggcaggaaagctggaggcagccaagtgtgacttcttccccaaaacctttgagatgccttgcgagtaccacctgtttgtagaggagtttcgcaaaaacccaggaatcacctggatcatgaagcctgtagcccggtctcaagggaaaggcatcttcctcttccgtaggctgaaggacatcgtggactggaggaaggacacaagaagctctgacgaccagaaagatgatattcccgtggagaactatgtggctcagcgttacattgaaaatccttacctgataggaggccgcaagtttgacctgcgtgtctatgtgctggtgatgtcggtgtttgctgaatgcctgctgtggtctgggcacaggagacaggatgttcacctcaccaacgtggctgtgcaaaaaacatctcccgactaccacccaaagaagggctgcaagtggacgctgcagcgcttccggcagtacctggcgtccaaacacgggcccgaggcagtggagacactcttcagggacatcgacaacatctttgtcaaaagcctgcagagtgtgcagaaggtgatcatcagtgacaagcactgcttcgagctgtacggctatgacatcctcatcgaccaggacctcaagccgtggctcctggaggtcaatgcgtccccatcactgacagccagcagccaggaagactatgagctcaagacctgcctcctggaagacaccctgcatgttgtggacatggaagcgaggctcacgggaagggagaagcgagtcgggggctttgacctcatgtggaatgatggccctgttagcagagaggagggggctcctgacctgtcgggaatgggaaactttgtgaccaacacacatctcggctgcgtcaacgatcggaagaaacaactgaggcagctcttctgctcccttcaagttcagaagaaagcttccagttgatccccagctgccaggaggaaatcagccttagcaggtgccacccaggcctcccccccactcccagatcccagcacagcacctcacagcattcgcctccccacctccagcctggcaccagctttgctggcttagcagctgcagcttactacctgaattgggccccttggatacctccagcccatccccaggcatctttgcaccaggagacagccaatcactgggactgggggaggtttaaccttgacaaactgacttggcagttaggcccaaagagaacaaatacagcaagttctgctacccccaggagatcatatctaataaatgagcacaggccctacttggagtcactgggcaccaggcctggttccggggatactgttggctgcagccaagtcctcctggctttgacacttggatacctcccaagtcagtgctgaaaaggtccttcaggagcaagagtttggaggctaaggaactcgtctttaagctgtgcttacacagcaagcagttattagattgtgtgtttattgggggcctggggaagtactgagccctaaacacatcctcttctccttgcatgtcaggggagcccatggggctccctgaccatcatctgaaaaccagtgggacagggcatccccatttctcagatggacaagacagaccagggaggcagagcttagtgagggtctctgcaaaggtgcatttatctaagtcagatgggtgacttaagtgcttctctaggccttgtgtttgagattgggagctgagccagaaaccggaaaaccctgggctcatgggcaggacagcttcgggagttgagtgtgagtaaaaatctgccttttcacatcttacattgctaagcttcctcttggtttaagaggggttgcaacaagactcggggctgttggggtaactgttccaggggggacttactccctctaccactccgcctgcttcagagtagtttctctggctgcaaatggttgaatctgcctgcctaggtcaagcccgaagggaagacttttggaaggaaaatactggcaaatccaagaagtgaaccagccgactttaggaaagccagaagccaggctactctagaccttctgccttcagagcatgaggacttctcccactcatccctgtacctgaggcacaccaacccagacaggtccaggcatggactccaggttccctatttccagaaggaatgcgattagctttttttggcccagcacccaccctgccagggaggaaggggcaattttccagtgatgaaattgtgaatcaggcagtcacactggacaacatctagcaaggtgaattctgcaactccctactttatttacattttaaaataagcaatatattcatacggtttaaaatccaaagtttacaaaagggtatagggtgacatctccttccctcccacctgtgcgccccaaccctgcaggtgctgttctgagggaatcacactgtgcttgcacaaaaattattagcttataagacaccagccttccccttgctttcctcacttgatgtatcttggagcttgttccttattcttgattatagttgtatggtattgcactatctggagctaacacctgtgacccacactcatgttttaaaagtttctgcattagtcaaaaatatttaaaaggagattcaacttcacaacccatatgtctagcttctcttgaaaacacgtaagaactggccatgacagcctgtgtttctatgtaactatgagccagagccaaggagcggggggaccaggagaggtgtgcccctgccatgctgccatttgttatcacccgcctgtcaaatcacaggtttatttcaaggcaagaaccatgttcataggttgtattctaaatggagtggcgtgcccttactgaaggactagatgaggcaaataaagactagttgctgctattc

SEQ ID NO: 195983 - DNA, 1024 bp, Homo sapiens
  Payload ID: 18668
  Gene Name: tubulin tyrosine ligase-like family member 9
  ENST ID: ENST00000612972
  CDS Start-End: 1-554
tcctggaagacaccctgcatgttgtggacatggaagcgaggctgcgtcaacgatcggaagaaacaactgaggcagctcttctgctcccttcaagttcagaagaaagcttccagttgatccccagctgccaggaggaaatcagccttagcaggtgccacccaggcctcccccccactcccagatcccagcacagcacctcacagcattcgcctccccacctccagcctggcaccagctttgctggcttagcagctgcagcttactacctgaattgggccccttggatacctccagcccatccccaggcatctttgcaccaggagacagccaatcactgggactgggggaggtttaaccttgacaaactgacttggcagttaggcccaaagagaacaaatacagcaagttctgctacccccaggagatcatatctaataaatgagcacaggccctacttggagtcactgggcaccaggcctggttccggggatactgttggctgcagccaagtcctcctggctttgacacttggatacctcccaagtcagtgctgaaaaggtccttcaggagcaagagtttggaggctaaggaactcgtctttaagctgtgcttacacagcaagcagttattagattgtgtgtttattgggggcctggggaagtactgagccctaaacacatcctcttctccttgcatgtcaggggagcccatggggctccctgaccatcatctgaaaaccagtgggacagggcatccccatttctcagatggacaagacagaccagggaggcagagcttagtgagggtctctgcaaaggtgcatttatctaagtcagatgggtgacttaagtgcttctctaggccttgtgtttgagattgggagctgagccagaaaccggaaaaccctgggctcatgggcaggacagcttcgggagttgagtgtgagtaaaaatctgccttttcacatcttacattgctaagcttcctcttggtttaagaggggttgcaacaagactcggggctg

SEQ ID NO: 195984 - DNA, 1808 bp, Homo sapiens
  Payload ID: 18668
  Gene Name: tubulin tyrosine ligase-like family member 9
  ENST ID: ENST00000616761
  CDS Start-End: 47-724
gaggcgcgcggtggcggtttggatctggcccctggggaatcgcgttatgtcgcgaccgaagaaccaaaattacaagggccatggattgtcaaagggaaaagagcgagagcagagagcatcgatccggttcaagaccaccctcatgaacacactcatggacgtccttcgccacaggccaggatgggtggaagtgaaggacgaaggggagtgggatttctactggtgtgacgtcagctggctccgggagaacttcgaccacacctacatggatgaacatgtgcggatcagtcacttccggaaccactatgagctgacccggaagaactacatggtgaagaacctgaagcggttccggaagcagctggagcgtgaggcaggaaagctggaggcagccaagtgtgacttcttccccaaaacctttgagatgccttgcgagtaccacctgtttgtagaggagtttcgcaaaaacccaggaatcacctggatcatgaagcctgtagcccggtctcaagggaaaggcatcttcctcttccgtaggctgaaggacatcgtggactggaggaagggcactacaggaaagagctcagcagcctggaggcccagcctgcctggagcacggtcagtccctctggcagccacgacacaagaagctctgacgaccagaaagatgatattcccgtggagaactatgtggctcagcgttacattgaaaatccttacctgataggaggccgcaagtttgacctgcgtgtctatgtgctggtgatgtcgtacatcccgctgcgggcctggctctaccgggatggctttgcccgattctccaacacccgcttcacactgaacagcattgatgaccagtatgttcacctcaccaacgtggctgtgcaaaaaacatctcccgactaccacccaaagaagggctgcaagtggacgctgcagcgcttccggcagtacctggcgtccaaacacgggcccgaggcagtggagacactcttcagggacatcgacaacatctttgtcaaaagcctgcagagtgtgcagaaggtgatcatcagtgacaagcactgcttcgagctgtacggctatgacatcctcatcgaccaggacctcaagccgtggctcctggaggtcaatgcgtccccatcactgacagccagcagccaggaagactatgagctcaagacctgcctcctggaagacaccctgcatgttgtggacatggaagcgaggctcacgggaagggagaagcgagtcgggggctttgacctcatgtggaatgatggccctgttagcagagaggagggggctcctgacctgtcgggaatgggaaactttgtgaccaacacacatctcggctgcgtcaacgatcggaagaaacaactgaggcagctcttctgctcccttcaagttcagaagaaagcttccagttgatccccagctgccaggaggaaatcagccttagcaggtgccacccaggcctcccccccactcccagatcccagcacagcacctcacagcattcgcctccccacctccagcctggcaccagctttgctggcttagcagctgcagcttactacctgaattgggccccttggatacctccagcccatccccaggcatctttgcaccaggagacagccaatcactgggactgggggaggtttaaccttgacaaactgacttggcagttaggcccaaagagaacaaatacagcaagttctgctacccccaggagatcatatctaataaatgagcacaggccctacttggagtcactgggcaccaggcctggttccggggatact

SEQ ID NO: 195985 - DNA, 2345 bp, Homo sapiens
  Payload ID: 18668
  Gene Name: tubulin tyrosine ligase-like family member 9
  ENST ID: ENST00000619753
  CDS Start-End: 1-119
atgttcacctcaccaacgtggctgtgcaaaaaacatctcccgactaccacccaaagaaggtggctcctggaggtcaatgcgtccccatcactgacagccagcagccaggaagactatgagctcaagacctgcctcctggaagacaccctgcatgttgtggacatggaagcgagaagtttgagggctgattctccttgctggtaactgggacacattcccattcctaaaccactcactgtgactctgcttgaccaggctcacgggaagggagaagcgagtcgggggctttgacctcatgtggaatgatggccctgttagcagagaggagggggctcctgacctgtcgggaatgggaaactttgtgaccaacacacatctcggtatgtagggccaggtggggagtgggcacaagggatggggtcatgggaggtaccaggtagtctaggaggcagcttgggatagtggttagattgtttgaattcaatctgcaacttaccagctgtgtgaccttgggcaagggacttaacctctgttcctcgtttttaaacttggtttctaaaaagtgaaaactttccctgattataaaaaagggattcacactcattgtagaatatttgaaaactagagaaagaaataaaaacatccagacataagcatctttaacaatctggtgtatttccttccagttcttaaaaaatgcatatattcatactttttcttttataaaattggcattgggctagagttttgaatccctcttttccccttggcatttttcattcaagcatattaagagcctccctcttgaatgcactttttggtccagtccggatgaaatcttttacatacattatctcattttatctttaaggagtttttattgtcattttacagatgaggaaatgatatccaggtgctatgtaacttgctgaatgaaggttttggccataagtggtgagccaggactcaaactcccatctgcctggctccaaaacttgagtgcttgtccgctagactctcctgcctcttggcagagtttaaaaaaattaccatatggctgcaaaatatttcagtttgtacatatgccaaaatttactaaaccaatttcttataattggacatttggcacaattgcattttattttttttttacttttataaattataccatgatgaacatcctttcacattaagctcggctgaaattctggccatttcctgaggacagattcctagaagcagaattattgggccaaagggatgggattattacaaccaaatttctttccagaaagattatacgaatttgtcagatttgaatttttagaaaaaagaaatctgtgccaactggtgaggtaaaacatactgactcgttgttttatgtgcattccattgattactggtgaggtttccgttttttaaatttgcatttcttcttttgtaagctgtccatactctttatccatttttctatgggttgtttagttttctaaatgtataaggcttcagatgactatataacactgtccaagcttaatttaatatgcatacaatcacctggaaatcttgttaaactatagattgtgactccataggtctagggtggggcctaagattgtatttctaacaagctcctgggtgatgctctattgattaaccattgctgtgtaacaagccctcccaaaacctagcagcttaaagcaactattttatttgctcatccttcctcaggtctctcctggggtcacttatagggctgcaggcacctggcagatttactggagacttgatggtgtacgacagcctcattcataggtgtgggggttgatactggctgtcagttgggcctctctttccatgtggccactcgtcttccaacagtctggccctggcttcttcacgtggtagactcggggttctaagagggtgagaaaacacactgcaaagccttttgcggcccggactcagaagtcccataaagtcattctgctacaatcaaagcatttgctggtgtagcccagtcactgggtaagaaaatagaccccacctcgccgggcgcggtggctcacgcctgtaatcccaacactttgggaggccgaggcgggcggatcatgaggtcaggagagcgaaaccatcctggctaacacggtgaaacactgtctctactaaaaaatacaaaaaaattagccaggcgtgctggcgggcgcctgtagtcagctactcgggaggctgaggcaggagaatggcgtgaacccgggaggcggagcttgcagtgagccgagattgcgccactgcactccagcctgggcgacagagcgagactgtctcacacagaaaaagaaaaa

SEQ ID NO: 195986 - DNA, 3034 bp, Homo sapiens
  Payload ID: 18668
  Gene Name: tubulin tyrosine ligase-like family member 9
  ENST ID: ENST00000620043
  CDS Start-End: 67-1092
aacgggacgcataagcacgcgaggcgcgcggtggcggtttggatctggcccctggggaatcgcgttatgtcgcgaccgaagatgacatcattgtatccagagaaaactcaaaggatttacaaactaccagaactaatcattcagcaagggcatcaaatacaagaaccaaaattacaagggccatggattgtcaaagggaaaagagcgagagcagagagcatcgatccggttcaagaccaccctcatgaacacactcatggacgtccttcgccacaggccaggatgggtggaagtgaaggagacacaagaagctctgacgaccagaaagatgatattcccgtggagaactatgtggctcagcgttacattgaaaatccttacctgataggaggccgcaagtttgacctgcgtgtctatgtgctggtgatgtcgtacatcccgctgcgggcctggctctaccgggatggctttgcccgattctccaacacccgcttcacactgaacagcattgatgaccagtatgttcacctcaccaacgtggctgtgcaaaaaacatctcccgactaccacccaaagaagggctgcaagtggacgctgcagcgcttccggcagtacctggcgtccaaacacgggcccgaggcagtggagacactcttcagggacatcgacaacatctttgtcaaaagcctgcagagtgtgcagaaggtgatcatcagtgacaagcactgcttcgagctgtacggctatgacatcctcatcgaccaggacctcaagccgtggctcctggaggtcaatgcgtccccatcactgacagccagcagccaggaagactatgagctcaagacctgcctcctggaagacaccctgcatgttgtggacatggaagcgaggctcacgggaagggagaagcgagtcgggggctttgacctcatgtggaatgatggccctgttagcagagaggagggggctcctgacctgtcgggaatgggaaactttgtgaccaacacacatctcggctgcgtcaacgatcggaagaaacaactgaggcagctcttctgctcccttcaagttcagaagaaagcttccagttgatccccagctgccaggaggaaatcagccttagcaggtgccacccaggcctcccccccactcccagatcccagcacagcacctcacagcattcgcctccccacctccagcctggcaccagctttgctggcttagcagctgcagcttactacctgaattgggccccttggatacctccagcccatccccaggcatctttgcaccaggagacagccaatcactgggactgggggaggtttaaccttgacaaactgacttggcagttaggcccaaagagaacaaatacagcaagttctgctacccccaggagatcatatctaataaatgagcacaggccctacttggagtcactgggcaccaggcctggttccggggatactgttggctgcagccaagtcctcctggctttgacacttggatacctcccaagtcagtgctgaaaaggtccttcaggagcaagagtttggaggctaaggaactcgtctttaagctgtgcttacacagcaagcagttattagattgtgtgtttattgggggcctggggaagtactgagccctaaacacatcctcttctccttgcatgtcaggggagcccatggggctccctgaccatcatctgaaaaccagtgggacagggcatccccatttctcagatggacaagacagaccagggaggcagagcttagtgagggtctctgcaaaggtgcatttatctaagtcagatgggtgacttaagtgcttctctaggccttgtgtttgagattgggagctgagccagaaaccggaaaaccctgggctcatgggcaggacagcttcgggagttgagtgtgagtaaaaatctgccttttcacatcttacattgctaagcttcctcttggtttaagaggggttgcaacaagactcggggctgttggggtaactgttccaggggggacttactccctctaccactccgcctgcttcagagtagtttctctggctgcaaatggttgaatctgcctgcctaggtcaagcccgaagggaagacttttggaaggaaaatactggcaaatccaagaagtgaaccagccgactttaggaaagccagaagccaggctactctagaccttctgccttcagagcatgaggacttctcccactcatccctgtacctgaggcacaccaacccagacaggtccaggcatggactccaggttccctatttccagaaggaatgcgattagctttttttggcccagcacccaccctgccagggaggaaggggcaattttccagtgatgaaattgtgaatcaggcagtcacactggacaacatctagcaaggtgaattctgcaactccctactttatttacattttaaaataagcaatatattcatacggtttaaaatccaaagtttacaaaagggtatagggtgacatctccttccctcccacctgtgcgccccaaccctgcaggtgctgttctgagggaatcacactgtgcttgcacaaaaattattagcttataagacaccagccttccccttgctttcctcacttgatgtatcttggagcttgttccttattcttgattatagttgtatggtattgcactatctggagctaacacctgtgacccacactcatgttttaaaagtttctgcattagtcaaaaatatttaaaaggagattcaacttcacaacccatatgtctagcttctcttgaaaacacgtaagaactggccatgacagcctgtgtttctatgtaactatgagccagagccaaggagcggggggaccaggagaggtgtgcccctgccatgctgccatttgttatcacccgcctgtcaaatcacaggtttatttcaaggcaagaaccatgttcataggttgtattctaaatggagtggcgtgcccttactgaaggactagatgaggcaaataaagactagttgctgctattca

SEQ ID NO: 195987 - DNA, 1799 bp, Homo sapiens
  Payload ID: 18668
  Gene Name: tubulin tyrosine ligase-like family member 9
  ENST ID: ENST00000611624
  CDS Start-End: 78-755
gtcgccttggcaacgggacgcataagcacgcgaggcgcgcggtggcggtttggatctggcccctggggaatcgcgttatgtcgcgaccgaagaaccaaaattacaagggccatggattgtcaaagggaaaagagcgagagcagagagcatcgatccggttcaagaccaccctcatgaacacactcatggacgtccttcgccacaggccaggatgggtggaagtgaaggacgaaggggagtgggatttctactggtgtgacgtcagctggctccgggagaacttcgaccacacctacatggatgaacatgtgcggatcagtcacttccggaaccactatgagctgacccggaagaactacatggtgaagaacctgaagcggttccggaagcagctggagcgtgaggcaggaaagctggaggcagccaagtgtgacttcttccccaaaacctttgagatgccttgcgagtaccacctgtttgtagaggagtttcgcaaaaacccaggaatcacctggatcatgaagcctgtagcccggtctcaagggaaaggcatcttcctcttccgtaggctgaaggacatcgtggactggaggaagggcactacaggaaagagctcagcagcctggaggcccagcctgcctggagcacggtcagtccctctggcagccacgacacaagaagctctgacgaccagaaagatgatattcccgtggagaactatgtggctcagcgttacattgaaaatccttacctgataggaggccgcaagtttgacctgcgtgtctatgtgctggtgatgtcgtacatcccgctgcgggcctggctctaccgggatggctttgcccgattctccaacacccgcttcacactgaacagcattgatgaccagtatgttcacctcaccaacgtggctgtgcaaaaaacatctcccgactaccacccaaagaagggctgcaagtggacgctgcagcgcttccggcagtacctggcgtccaaacacgggcccgaggcagtggagacactcttcagggacatcgacaacatctttgtcaaaagcctgcagagtgtgcagaaggtgatcatcagtgacaagcactgcttcgagctgtacggctatgacatcctcatcgaccaggacctcaagccgtggctcctggaggtcaatgcgtccccatcactgacagccagcagccaggaagactatgagctcaagacctgcctcctggaagacaccctgcatgttgtggacatggaagcgaggctcacgggaagggagaagcgagtcgggggctttgacctcatgtggaatgatggccctgttagcagagaggagggggctcctgacctgtcgggaatgggaaactttgtgaccaacacacatctcggctgcgtcaacgatcggaagaaacaactgaggcagctcttctgctcccttcaagttcagaagaaagcttccagttgatccccagctgccaggaggaaatcagccttagcaggtgccacccaggcctcccccccactcccagatcccagcacagcacctcacagcattcgcctccccacctccagcctggcaccagctttgctggcttagcagctgcagcttactacctgaattgggccccttggatacctccagcccatccccaggcatctttgcaccaggagacagccaatcactgggactgggggaggtttaaccttgacaaactgacttggcagttaggcccaaagagaacaaatacagcaagttctgctacccccaggagatcatatctaataaatgagcacaggcccta

SEQ ID NO: 195988 - DNA, 1915 bp, Homo sapiens
  Payload ID: 18669
  Gene Name: tubulin, alpha 1a
  Uniprot ID: Q71U36
  ENST ID: ENST00000301071
  CDS Start-End: 346-1701
ataatggatgctcggccgactgcttctgcacggtctctttgtctaaaggatgcaaacagtctacggatgctagagaaaaaggggtgggggagagattacctcatcccacgtcgcttgcaccaatcaccagtctcctgtcatggcttctctgggcagattgggggtctggaccaacaggaaaaggccccggcccatccccatggtgaccgagttgtatatagggagccgcatccgcctatgtgccgcaggttctcttacatcgaccgcctaagagtcgcgctgtaagaagcaacaacctctcctcttcgtctccgccatcagctcggcagtcgcgaagcagcaaccatgcgtgagtgcatctccatccacgttggccaggctggtgtccagattggcaatgcctgctgggagctctactgcctggaacacggcatccagcccgatggccagatgccaagtgacaagaccattgggggaggagatgattccttcaacaccttcttcagtgagacgggggctggcaagcatgtgccccgggcagtgtttgtagacttggaacccacagtcattgatgaagttcgcactggcacctaccgccagctcttccaccctgagcaacttatcacaggcaaagaagatgctgccaataactatgcccgagggcactacaccattggcaaggagatcattgacctcgtgttggaccgaattcgcaagctggccgaccagtgcacgggtctccagggcttcttggttttccacagctttggtgggggaactggttctgggttcacctcgctgctcatggaacgtctctcagttgattatggcaagaagtccaagctggagttctctatttacccggcgccccaggtttccacagctgtagttgagccctacaactccatcctcaccacccacaccaccctggagcactctgattgtgccttcatggtagacaatgaggccatctatgacatctgtcgtagaaacctcgatattgagcgtccaacctatactaacctgaataggttaataggtcaaattgtgtcctccatcactgcttccctgagatttgatggagccctgaatgttgacctgacagaattccagaccaacctggtgccctatccccgcatccacttccctctggccacatatgcccctgtcatctctgctgagaaagcctaccatgaacagctttctgtagcagagatcaccaatgcttgctttgagccagccaaccagatggtgaaatgtgaccctcgccatggtaaatacatggcttgctgcctgttgtaccgtggtgacgtggttcccaaagatgtcaatgctgccattgccaccatcaagaccaagcgtaccatccagtttgtggattggtgccccactggcttcaaggttggcatcaactaccagcctcccactgtggtgcctggtggagacctggccaaggtacagagagctgtgtgcatgctgagcaacaccacagccattgctgaggcctgggctcgcctggaccacaagtttgacctgatgtatgccaaacgtgcctttgttcactggtacgttggggaggggatggaggaaggtgagttttcagaggcccgtgaggacatggctgcccttgagaaggattatgaggaggttggtgtggattctgttgaaggagagggtgaggaagaaggagaggaatactaaagttaaaacgtcacaaaggtgctgcttttacagggaagcttattctgttttaaacattgaaaagttgtggtctgatcagttaatttgtatgtagcagtgtatgctctcatatacaattactgacctatgctctaaaacatgaatgctttgttacagacccaagctgtccatttctgtgatgggttttgaataaagtattccctgtcttaaatga

SEQ ID NO: 195989 - DNA, 1887 bp, Homo sapiens
  Payload ID: 18669
  Gene Name: tubulin, alpha 1a
  Uniprot ID: Q71U36
  ENST ID: ENST00000295766
  CDS Start-End: 481-1836
tcttttctttcgtaagctctctgggcgagggtggtggtatgttttgtgaggtttagcttagccccaaatcctcaagccccgccgccgccgcagtgcgggtgcaggaaccgggccagtactgcgcccagggcgcagcagagcgctggggaggaacaaaggcggcgcctaggcgcctgtgttatccgagagactttcgggggccgcgggcagcccgtctgccgcgaccgaggggtctggggcgtcccggctgggccccgtgtctgtgcgcacggtttcgctgatgctgaggggccactttctgtctcgcgttgttctctggggaccgggagaggaggaggcacccaaaaagagcgggggcgttgggcgagctgggggacgtgggagggggaacgggaacaaagcgcagcctagggttagcgtgggaagaccctccgcggtctttggcgttttggaaagatacccacacattcccgggaaaacatgcgtgagtgcatctccatccacgttggccaggctggtgtccagattggcaatgcctgctgggagctctactgcctggaacacggcatccagcccgatggccagatgccaagtgacaagaccattgggggaggagatgattccttcaacaccttcttcagtgagacgggggctggcaagcatgtgccccgggcagtgtttgtagacttggaacccacagtcattgatgaagttcgcactggcacctaccgccagctcttccaccctgagcaacttatcacaggcaaagaagatgctgccaataactatgcccgagggcactacaccattggcaaggagatcattgacctcgtgttggaccgaattcgcaagctggccgaccagtgcacgggtctccagggcttcttggttttccacagctttggtgggggaactggttctgggttcacctcgctgctcatggaacgtctctcagttgattatggcaagaagtccaagctggagttctctatttacccggcgccccaggtttccacagctgtagttgagccctacaactccatcctcaccacccacaccaccctggagcactctgattgtgccttcatggtagacaatgaggccatctatgacatctgtcgtagaaacctcgatattgagcgtccaacctatactaacctgaataggttaataggtcaaattgtgtcctccatcactgcttccctgagatttgatggagccctgaatgttgacctgacagaattccagaccaacctggtgccctatccccgcatccacttccctctggccacatatgcccctgtcatctctgctgagaaagcctaccatgaacagctttctgtagcagagatcaccaatgcttgctttgagccagccaaccagatggtgaaatgtgaccctcgccatggtaaatacatggcttgctgcctgttgtaccgtggtgacgtggttcccaaagatgtcaatgctgccattgccaccatcaagaccaagcgtaccatccagtttgtggattggtgccccactggcttcaaggttggcatcaactaccagcctcccactgtggtgcctggtggagacctggccaaggtacagagagctgtgtgcatgctgagcaacaccacagccattgctgaggcctgggctcgcctggaccacaagtttgacctgatgtatgccaaacgtgcctttgttcactggtacgttggggaggggatggaggaaggtgagttttcagaggcccgtgaggacatggctgcccttgagaaggattatgaggaggttggtgtggattctgttgaaggagagggtgaggaagaaggagaggaatactaaagttaaaacgtcacaaaggtgctgcttttacagggaagcttattctgtttt

SEQ ID NO: 195990 - DNA, 984 bp, Homo sapiens
  Payload ID: 18669
  Gene Name: tubulin, alpha 1a
  ENST ID: ENST00000546918
  CDS Start-End: 88-783
atcgaccgcctaagagtcgcgctgtaagaagcaacaacctctcctcttcgtctccgccatcagctcggcagtcgcgaagcagcaaccatgcgtgagtgcatctccatccacgttggccaggctggtgtccagattggcaatgcctgctgggagctctactgcctggaacacggcatccagcccgatggccagatgccaagtgacaagaccattgggggaggagatgattccttcaacaccttcttcagtgagacgggggctggcaagcatgtgccccgggcagtgtttgtagacttggaacccacagtcattggtgagttgacctcagtaacccaagtgagatcccagggtgctgggacaggaggtctgtcctggggggctccgctggtcactcacccactctccctccccgctcctcgtccctcctcctcctcccccctgctcctcccccatcatgttctccagatgaagttcgcactggcacctaccgccagctcttccaccctgagcaacttatcacaggcaaagaagatgctgccaataactatgcccgagggcactacaccattggcaaggagatcattgacctcgtgttggaccgaattcgcaagctggccgaccagtgcacgggtctccagggcttcttggttttccacagctttggtgggggaactggttctgggttcacctcgctgctcatggaacgtctctcagttgattatggcaagaagtccaagctggagttctctatttacccggcgccccaggtttccacagctgtagttgagccctacaactccatcctcaccacccacaccaccctggagcactctgattgtgccttcatggtagacaatgaggccatctatgacatctgtcgtagaaacctcgatattgagcgtccaacctatactaacctgaataggttaataggtcaaattgtgtcctccatcactgcttccctgagatttgatggagccctga

SEQ ID NO: 195991 - DNA, 1384 bp, Homo sapiens
  Payload ID: 18669
  Gene Name: tubulin, alpha 1a
  Uniprot ID: Q71U36
  ENST ID: ENST00000550767
  CDS Start-End: 134-1384
tttacgattttttcacttttcctccccacagcgtgagtgcatctccatccacgttggccaggctggtgtccagattggcaatgcctgctgggagctctactgcctggaacacggcatccagcccgatggccagatgccaagtgacaagaccattgggggaggagatgattccttcaacaccttcttcagtgagacgggggctggcaagcatgtgccccgggcagtgtttgtagacttggaacccacagtcattgatgaagttcgcactggcacctaccgccagctcttccaccctgagcaacttatcacaggcaaagaagatgctgccaataactatgcccgagggcactacaccattggcaaggagatcattgacctcgtgttggaccgaattcgcaagctggccgaccagtgcacgggtctccagggcttcttggttttccacagctttggtgggggaactggttctgggttcacctcgctgctcatggaacgtctctcagttgattatggcaagaagtccaagctggagttctctatttacccggcgccccaggtttccacagctgtagttgagccctacaactccatcctcaccacccacaccaccctggagcactctgattgtgccttcatggtagacaatgaggccatctatgacatctgtcgtagaaacctcgatattgagcgtccaacctatactaacctgaataggttaataggtcaaattgtgtcctccatcactgcttccctgagatttgatggagccctgaatgttgacctgacagaattccagaccaacctggtgccctatccccgcatccacttccctctggccacatatgcccctgtcatctctgctgagaaagcctaccatgaacagctttctgtagcagagatcaccaatgcttgctttgagccagccaaccagatggtgaaatgtgaccctcgccatggtaaatacatggcttgctgcctgttgtaccgtggtgacgtggttcccaaagatgtcaatgctgccattgccaccatcaagaccaagcgtaccatccagtttgtggattggtgccccactggcttcaaggttggcatcaactaccagcctcccactgtggtgcctggtggagacctggccaaggtacagagagctgtgtgcatgctgagcaacaccacagccattgctgaggcctgggctcgcctggaccacaagtttgacctgatgtatgccaaacgtgcctttgttcactggtacgttggggaggggatggaggaaggtgagttttcagaggcccgtgaggacatggctgcccttgagaaggattatgaggaggttggtgtggattctgttgaaggagagggtgaggaagaaggagaggaatactaa

SEQ ID NO: 195992 - DNA, 628 bp, Homo sapiens
  Payload ID: 18669
  Gene Name: tubulin, alpha 1a
  ENST ID: ENST00000552924
  CDS Start-End: 293-628
aggttctcttacatcgaccgcctaagagtcgcgctgtaagaagcaacaacctctcctcttcgtctccgccatcagctcggcagtcgcgaagcagcaaccatggtgagaatcggcttcggctctttgtggccgttgggtggagtcagcgcccccaggctctacttggaaaacctttaagctcttttctttccgtgagtgcatctccatccacgttggccaggctggtgtccagattggcaatgcctgctgggagctctactgcctggaacacggcatccagcccgatggccagatgccaagtgacaagaccattgggggaggagatgattccttcaacaccttcttcagtgagacgggggctggcaagcatgtgccccgggcagtgtttgtagacttggaacccacagtcattgatgaagttcgcactggcacctaccgccagctcttccaccctgagcaacttatcacaggcaaagaagatgctgccaataactatgcccgagggcactacaccattggcaaggagatcattgacctcgtgttggaccgaattcgcaagctggccgaccagtgcacgggtctccagggcttcttggttttccacagctttggtgggggaactggttct

SEQ ID NO: 195993 - DNA, 650 bp, Homo sapiens
  Payload ID: 18669
  Gene Name: tubulin, alpha 1a
  ENST ID: ENST00000550811
  CDS Start-End: 572-650
acaatgagatcatgtaggcagctgctggaaatagagcttgctctgttaaataatgtagcagacagtacaggctagcaccaggcacagcaaatacagcaatgcagcaatgcagaaggcagaccttgtctaaactcctagtattgatggattctgcagacagactgcagaagggtgtggcttcttgcctcagctgcagtacagatgtccggattataatatcaagtcctattcagaggaaactttcatctttatttaaaagggaagaaagcagtaaaattaatcccaattaagtcataattggatttacttcattttacaaaatttgtgctttgaatactgaatactttttaaatatgaaaaatcttctattcaagcatggtagtaggcacaatgggctggtaccacgtgctgaacagggccaaggcgacatcattattcagaccacacccatatgcagcatttgtagcagcgtgagtgcatctccatccacgttggccaggctggtgtccagattggcaatgcctgctgggagctctactgcctggaacacggcatccagcccgatggccagatgccaagtgacaagaccattgggggaggagatgattccttcaacaccttcttcagtgagacgggggctggcaagcatg

SEQ ID NO: 195994 - DNA, 946 bp, Homo sapiens
  Payload ID: 18669
  Gene Name: tubulin, alpha 1a
  ENST ID: ENST00000547939
  CDS Start-End: 288-946
atcgaccgcctaagagtcgcgctgtaagaagcaacaacctctcctcttcgtctccgccatcagctcggcagtcgcgaagcagcaaccatgcatggtagtaggcacaatgggctggtaccacgtgctgaacagggccaaggcgacatcattattcagaccacacccatatgcagcatttgtagcagcgtgagtgcatctccatccacgttggccaggctggtgtccagattggcaatgcctgctgggagctctactgcctggaacacggcatccagcccgatggccagatgccaagtgacaagaccattgggggaggagatgattccttcaacaccttcttcagtgagacgggggctggcaagcatgtgccccgggcagtgtttgtagacttggaacccacagtcattgatgaagttcgcactggcacctaccgccagctcttccaccctgagcaacttatcacaggcaaagaagatgctgccaataactatgcccgagggcactacaccattggcaaggagatcattgacctcgtgttggaccgaattcgcaagctggccgaccagtgcacgggtctccagggcttcttggttttccacagctttggtgggggaactggttctgggttcacctcgctgctcatggaacgtctctcagttgattatggcaagaagtccaagctggagttctctatttacccggcgccccaggtttccacagctgtagttgagccctacaactccatcctcaccacccacaccaccctggagcactctgattgtgccttcatggtagacaatgaggccatctatgacatctgtcgtagaaacctcgatattgagcgtccaacctatactaacctgaataggttaataggtcaaattgtgtcctccatcactgcttccctgagatttgatggagccctgaatgttgacctgacagaatt

SEQ ID NO: 195995 - DNA, 1627 bp, Homo sapiens
  Payload ID: 18670
  Gene Name: tubulin, alpha 1b
  Uniprot ID: P68363
  ENST ID: ENST00000336023
  CDS Start-End: 96-1451
agtgcgttacttacctcgactcttagcttgtcggggacggtaaccgggacccggtgtctgctcctgtcgccttcgcctcctaatccctagccactatgcgtgagtgcatctccatccacgttggccaggctggtgtccagattggcaatgcctgctgggagctctactgcctggaacacggcatccagcccgatggccagatgccaagtgacaagaccattgggggaggagatgactccttcaacaccttcttcagtgagacgggcgctggcaagcacgtgccccgggctgtgtttgtagacttggaacccacagtcattgatgaagttcgcactggcacctaccgccagctcttccaccctgagcagctcatcacaggcaaggaagatgctgccaataactatgcccgagggcactacaccattggcaaggagatcattgaccttgtgttggaccgaattcgcaagctggctgaccagtgcaccggtcttcagggcttcttggttttccacagctttggtgggggaactggttctgggttcacctccctgctcatggaacgtctctcagttgattatggcaagaagtccaagctggagttctccatttacccagcaccccaggtttccacagctgtagttgagccctacaactccatcctcaccacccacaccaccctggagcactctgattgtgccttcatggtagacaatgaggccatctatgacatctgtcgtagaaacctcgatatcgagcgcccaacctacactaaccttaaccgccttattagccagattgtgtcctccatcactgcttccctgagatttgatggagccctgaatgttgacctgacagaattccagaccaacctggtgccctacccccgcatccacttccctctggccacatatgcccctgtcatctctgctgagaaagcctaccatgaacagctttctgtagcagagatcaccaatgcttgctttgagccagccaaccagatggtgaaatgtgaccctcgccatggtaaatacatggcttgctgcctgttgtaccgtggtgacgtggttcccaaagatgtcaatgctgccattgccaccatcaaaaccaagcgcagcatccagtttgtggattggtgccccactggcttcaaggttggcatcaactaccagcctcccactgtggtgcctggtggagacctggccaaggtacagagagctgtgtgcatgctgagcaacaccacagccattgctgaggcctgggctcgcctggaccacaagtttgacctgatgtatgccaagcgtgcctttgttcactggtacgtgggtgaggggatggaggaaggcgagttttcagaggcccgtgaagatatggctgcccttgagaaggattatgaggaggttggtgtggattctgttgaaggagagggtgaggaagaaggagaggaatactaattatccattccttttggccctgcagcatgtcatgctcccagaatttcagcttcagcttaactgacagacgttaaagctttctggttagattgttttcacttggtgatcatgtcttttccatgtgtacctgtaatatttttccatcatatctcaaagtaaagtcattaacatcaaaa

SEQ ID NO: 195996 - DNA, 1875 bp, Homo sapiens
  Payload ID: 18670
  Gene Name: tubulin, alpha 1b
  ENST ID: ENST00000547765
  CDS Start-End: 96-245
agtgcgttacttacctcgactcttagcttgtcggggacggtaaccgggacccggtgtctgctcctgtcgccttcgcctcctaatccctagccactatgcaccgccggggggcgcaagagcgcgcgcccggaattgctcattcatcctgtgccgcagagccccgccccttgtccctgcggacagacatttcttctgcgctggtctggccacgtgcttcctgtgctaggagctgcccggaaatgtgaccacctagtctaaagtgggcttctggggcctgagcgctggatggatgcccaccttcctgtcttggtcctccaaaggaggaagctgtgactgagctgtcttggtctggaaggaggccttcccggtttaggatgggaagcgtgagtgcatctccatccacgttggccaggctggtgtccagattggcaatgcctgctgggagctctactgcctggaacacggcatccagcccgatggccagatgccaagtgacaagaccattgggggaggagatgactccttcaacaccttcttcagtgagacgggcgctggcaagcacgtgccccgggctgtgtttgtagacttggaacccacagtcattgatgaagttcgcactggcacctaccgccagctcttccaccctgagcagctcatcacaggcaaggaagatgctgccaataactatgcccgagggcactacaccattggcaaggagatcattgaccttgtgttggaccgaattcgcaagctggctgaccagtgcaccggtcttcagggcttcttggttttccacagctttggtgggggaactggttctgggttcacctccctgctcatggaacgtctctcagttgattatggcaagaagtccaagctggagttctccatttacccagcaccccaggtttccacagctgtagttgagccctacaactccatcctcaccacccacaccaccctggagcactctgattgtgccttcatggtagacaatgaggccatctatgacatctgtcgtagaaacctcgatatcgagcgcccaacctacactaaccttaaccgccttattagccagattgtgtcctccatcactgcttccctgagatttgatggagccctgaatgttgacctgacagaattccagaccaacctggtgccctacccccgcatccacttccctctggccacatatgcccctgtcatctctgctgagaaagcctaccatgaacagctttctgtagcagagatcaccaatgcttgctttgagccagccaaccagatggtgaaatgtgaccctcgccatggtaaatacatggcttgctgcctgttgtaccgtggtgacgtggttcccaaagatgtcaatgctgccattgccaccatcaaaaccaagcgcagcatccagtttgtggattggtgccccactggcttcaaggttggcatcaactaccagcctcccactgtggtgcctggtggagacctggccaaggtacagagagctgtgtgcatgctgagcaacaccacagccattgctgaggcctgggctcgcctggaccacaagtttgacctgatgtatgccaagcgtgcctttgttcactggtacgtgggtgaggggatggaggaaggcgagttttcagaggcccgtgaagatatggctgcccttgagaaggattatgaggaggttggtgtggattctgttgaaggagagggtgaggaagaaggagaggaatactaattatccattccttttggccctgcagcatgtcatgctcccagaatttcagcttcagcttaactgacagacgttaaagctttctggttagattgttttcacttggtgatcatgtcttttccatgtgtacctgtaatattttt

SEQ ID NO: 195997 - DNA, 574 bp, Homo sapiens
  Payload ID: 18670
  Gene Name: tubulin, alpha 1b
  ENST ID: ENST00000552984
  CDS Start-End: 427-574
agtgcgttacttacctcgactcttagcttgtcggggacggtaaccgggacccggtgtctgctcctgtcgccttcgcctcctaatccctagccactatgagccccgccccttgtccctgcggacagacatttcttctgcgctggtctggccacgtgcttcctgtgctaggagctgcccggaaatgtgaccacctagtctaaagtgggcttctggggcctgagcgctggatggatgcccaccttcctgtcttggtcctccaaaggaggaagctgtgactgagctgtcttggtctggaaggaggccttcccggtttaggatgggaagcgtgagtgcatctccatccacgttggccaggctggtgtccagattggcaatgcctgctgggagctctactgcctggaacacggcatccagcccgatggccagatgccaagtgacaagaccattgggggaggagatgactccttcaacaccttcttcagtgagacgggcgctggcaagcacgtgccccgggctgtgtttgtagacttggaacccacagtcattgatgaagttcgcactggcacctaccgcc

SEQ ID NO: 195998 - DNA, 835 bp, Homo sapiens
  Payload ID: 18670
  Gene Name: tubulin, alpha 1b
  ENST ID: ENST00000550367
  CDS Start-End: 96-835
agtgcgttacttacctcgactcttagcttgtcggggacggtaaccgggacccggtgtctgctcctgtcgccttcgcctcctaatccctagccactatgcgtgagtgcatctccatccacgttggccaggctggtgtccagattggcaatgcctgctgggagctctactgcctggaacacggcatccagcccgatggccagatgccaagtgacaagaccattgggggaggagatgactccttcaacaccttcttcagtgagacgggcgctggcaagcacgtgccccgggctgtgtttgtagacttggaacccacagtcattgatgaagttcgcactggcacctaccgccagctcttccaccctgagcagctcatcacaggcaaggaagatgctgccaataactatgcccgagggcactacaccattggcaaggagatcattgaccttgtgttggaccgaattcgcaagctggctgaccagtgcaccggtcttcagggcttcttggtttccacagctgtagttgagccctacaactccatcctcaccacccacaccaccctggagcactctgattgtgccttcatggtagacaatgaggccatctatgacatctgtcgtagaaacctcgatatcgagcgcccaacctacactaaccttaaccgccttattagccagattgtgtcctccatcactgcttccctgagatttgatggagccctgaatgttgacctgacagaattccagaccaacctggtgccctacccccgcatccacttccctctggccacatatgcccctgtcatctctgctgagaaagcctaccatgaacagctttc

SEQ ID NO: 195999 - DNA, 565 bp, Homo sapiens
  Payload ID: 18670
  Gene Name: tubulin, alpha 1b
  ENST ID: ENST00000549870
  CDS Start-End: 322-565
attcattaaaagcaacgtagactatagtgtagctgttctcaaaagtagtacatcttagaaaaggatctttagaaaagatcgctttagaaaaggaaattcgttttcagattacgtgagtagcctaggtaacacagccagacctcatctccacaaaaaaaatgaaaaaattagccagcttggtggtctgtgcctgtggtcccagctgctccagaggctgagcgtgagtgcatctccatccacgttggccaggctggtgtccagattggcaatgcctgctgggagctctactgcctggaacacggcatccagcccgatggccagatgccaagtgacaagaccattgggggaggagatgactccttcaacaccttcttcagtgagacgggcgctggcaagcacgtgccccgggctgtgtttgtagacttggaacccacagtcattgatgaagttcgcactggcacctaccgccagctcttccaccctgagcagctcatcacaggcaaggaagatgctgccaataactatgcccgagggcactacaccattggcaaggagatcattgacc

SEQ ID NO: 196000 - DNA, 584 bp, Homo sapiens
  Payload ID: 18670
  Gene Name: tubulin, alpha 1b
  ENST ID: ENST00000547476
  CDS Start-End: 359-584
ctagtgcgttacttacctcgactcttagcttgtcggggacggtaaccgggacccggtgtctgctcctgtcgccttcgcctcctaatccctagccactatggagctgcccggaaatgtgaccacctagtctaaagtgggcttctggggcctgagcgctggatggatgcccaccttcctgtcttggtcctccaaaggaggaagctgtgactgagctgtcttggtctggaaggaggccttcccggtttaggatgggaagcgtgagtgcatctccatccacgttggccaggctggtgtccagattggcaatgcctgctgggagctctactgcctggaacacggcatccagcccgatggccagatgccaagtgacaagaccattgggggaggagatgactccttcaacaccttcttcagtgagacgggcgctggcaagcacgtgccccgggctgtgtttgtagacttggaacccacagtcattgatgaagttcgcactggcacctaccgccagctcttccaccctgagcagctcatcacaggcaaggaagatgctgccaataactatgcccgagggcactacaccattg

SEQ ID NO: 196001 - DNA, 3001 bp, Homo sapiens
  Payload ID: 18671
  Gene Name: tubulin, alpha 1c
  Uniprot ID: Q9BQE3
  ENST ID: ENST00000301072
  CDS Start-End: 276-1625
gaacttttgaatccgccaatcagcgccgcgcgcccccactccgcgggtgcggccgggcgcaggccagggctcgaaggtggggccgcagcggcacggggcggggtctggggcccgccctcccgacacgtggccggggaccgggtatataaggcccttcggggccggccaccctttcactacttctcccccggactccttggtagtctgttagtgggagatccttgttgccgtcccttcgcctccttcaccgccgcagaccccttcaagttctagtcatgcgtgagtgcatctccatccacgttggccaggctggtgtccagattggcaatgcctgctgggagctctactgcctggaacacggcatccagcccgatggccagatgccaagtgacaagaccattgggggaggagatgattccttcaacaccttcttcagtgaaacgggtgctggcaagcatgtgccccgggcagtgtttgtagacttggaacccacagtcattgatgaagttcgcactggcacttaccgccagctcttccaccctgagcaactcatcacaggcaaggaagatgctgccaataactatgcccgagggcactacaccattggcaaggagatcattgacctcgtgttggaccgaattcgcaagctggctgaccagtgcaccggtcttcagggcttcttggttttccacagctttggtgggggaactggttctgggttcacctcgctgctcatggaacgtctctcagttgattatggcaagaagtccaagctggagttctccatttacccggcgccccaggtttccacagctgtagttgagccctacaactccatcctcaccacccacaccaccctggagcactctgattgtgccttcatggtagacaatgaggccatctatgacatctgtcgtagaaacctcgatatcgagcgcccaacctacactaaccttaaccgccttattagccagattgtgtcctccatcactgcttccctgagatttgatggagccctgaatgttgacctgacagaattccagaccaacctggtgccctacccccgcatccacttccctctggccacatatgcccctgtcatctctgctgagaaagcctaccacgaacagcttactgtagcagagatcaccaatgcttgctttgagccagccaaccagatggtgaaatgtgaccctcgccatggtaaatacatggcttgctgcctgttataccgtggtgacgtggttcccaaagatgtcaatgctgccattgccaccatcaaaaccaagcgtaccatccagtttgtggattggtgccccactggcttcaaggttggcattaattaccagcctcccactgtggtgcctggcggagacctggccaaggtacagagagctgtgtgcatgctgagcaataccacagctgttgccgaggcctgggctcgcctggaccacaagtttgacctgatgtatgccaagcgtgcctttgttcactggtacgtgggtgaggggatggaggaaggcgagttttcagaggcccgtgaggacatggctgcccttgagaaggattatgaggaggttggagcagatagtgctgacggagaggatgagggtgaagagtattaacctgtgtgctgtacttttacactcctttgtcttggaactgtcttatttttgttctgtaaatgtctattgccgtaaattgttaataaaattgaagtttccattttaaatgtcgagctgacttaaatacttgatccagttaaagttggatgtatgaggctggtagatgaaaccacctgagtcgagggtcttgctctgtcacccaggctggagtgcagtggcatgataatacatagctcattgcagcctcgagctcctggactcatgtgattctcctgcttcagcctcctaagtagctggggactgcaggtgcacaccaccatgcccagctatttttatttcttgtagagatggggccttgctatgctgcccagggtggtcttcaactggcttcaagtgatcctcctgcctcaacctctcaaagttttgattataggcatgagccactgcccagcttcttggtttatctgtttaatttgggcctgaattaagtggttatagaatcattttgtaagtgaggaaacgggttcagattgagccagtgcttctctaactaaaatggatgtgaatcacctgtagatattaaaatgcaggtttggggtcaacctggtggctcatgcacttcgggaggccaagttgggtggatcacgagcccaggaattcgagaccagcctgggcaacatggtgaaaacccatctctaccaaaacaaaaatttgcatgctgtgatggcacctgcctataggtgggaggaccacctgagcccaaggaggttgaggtagtgagccatgattgcaccactgcattccagcctgggtgacggagacccctgactctcaaatttaaaaacaaaatgcaggttctaattctataggcttgaggtgaggcttcagacacgtcttaaattttttttctttgagatggtctctttcccaggctgcagtgcaatggcaccatcatagctcacccccaccttgacctgggctaagccatcctcccacctcagcctcccaagtagccaggactacaggtgtgttccaccatgcctggctgattcttgtaatttttttttttttttttttttttttttttggtagagatggggttttgccatgttgcttaggctggccttgaactcctgggctcaggcaatcctgcctcagcctcccaaagtgctgggattacaggagtgagccactacacctggcccctagatacgttttttaataacctcccaaatgatgctgttggtctgatgtgaccacatgtacagtagcaaagggttagataacagtaactgctggagccaaaattcaagtgcccagccacactgccagaactattgctgtcagtctttaataaagtattagtcacacgagaa

SEQ ID NO: 196002 - DNA, 1695 bp, Homo sapiens
  Payload ID: 18671
  Gene Name: tubulin, alpha 1c
  ENST ID: ENST00000541364
  CDS Start-End: 29-1588
aagtgaacaatgggcgcccagctctaaaatgacagcctggttcaatggggtggaggagctagggagggatgagtgctttgtgtgcttggaattagatccttcaaatggatcctttctgaatgcaaaactgtacatctctaactggattcttatttacttcaccaggactcttcagctccctgcgccttttaacacatgcacatccagcaaaagcagaggagaacctggctgtgattcaaagcgtgagtgcatctccatccacgttggccaggctggtgtccagattggcaatgcctgctgggagctctactgcctggaacacggcatccagcccgatggccagatgccaagtgacaagaccattgggggaggagatgattccttcaacaccttcttcagtgaaacgggtgctggcaagcatgtgccccgggcagtgtttgtagacttggaacccacagtcattgatgaagttcgcactggcacttaccgccagctcttccaccctgagcaactcatcacaggcaaggaagatgctgccaataactatgcccgagggcactacaccattggcaaggagatcattgacctcgtgttggaccgaattcgcaagctggctgaccagtgcaccggtcttcagggcttcttggttttccacagctttggtgggggaactggttctgggttcacctcgctgctcatggaacgtctctcagttgattatggcaagaagtccaagctggagttctccatttacccggcgccccaggtttccacagctgtagttgagccctacaactccatcctcaccacccacaccaccctggagcactctgattgtgccttcatggtagacaatgaggccatctatgacatctgtcgtagaaacctcgatatcgagcgcccaacctacactaaccttaaccgccttattagccagattgtgtcctccatcactgcttccctgagatttgatggagccctgaatgttgacctgacagaattccagaccaacctggtgccctacccccgcatccacttccctctggccacatatgcccctgtcatctctgctgagaaagcctaccacgaacagcttactgtagcagagatcaccaatgcttgctttgagccagccaaccagatggtgaaatgtgaccctcgccatggtaaatacatggcttgctgcctgttataccgtggtgacgtggttcccaaagatgtcaatgctgccattgccaccatcaaaaccaagcgtaccatccagtttgtggattggtgccccactggcttcaaggttggcattaattaccagcctcccactgtggtgcctggcggagacctggccaaggtacagagagctgtgtgcatgctgagcaataccacagctgttgccgaggcctgggctcgcctggaccacaagtttgacctgatgtatgccaagcgtgcctttgttcactggtacgtgggtgaggggatggaggaaggcgagttttcagaggcccgtgaggacatggctgcccttgagaaggattatgaggaggttggagcagatagtgctgacggagaggatgagggtgaagagtattaacctgtgtgctgtacttttacactcctttgtcttggaactgtcttatttttgttctgtaaatgtctattgccgtaaattgttaataaaattgaagtttccattttaaa

SEQ ID NO: 196003 - DNA, 536 bp, Homo sapiens
  Payload ID: 18671
  Gene Name: tubulin, alpha 1c
  ENST ID: ENST00000549818
  CDS Start-End: 28-294
agtgaacaatgggcgcccagctctaaaatgacagcctggttcaatggggtggaggagctagggagggatgagtgctttgtgtgcttggaattagatccttcaaatggatcctttctgaatgcaaaactgtacatctctaactggattcttatttacttcaccaggactcttcagctccctgcgccttttaacacatgcacatccagcaaaagcagaggagaacctggctgtgattcaaagtgtgtgaacccagctctgtcccttgggttccgtacatataaatggagcagctgagggaactggataagaagtcgattttgtagttacaggctgttccgtatcacccatttacaagagtctcactctactgcccaggctggagtgcagtggtacaatcttggctcactgcagcctccgccttccgggttccagtgatcctcctgcctcagcctcccaagtagctgagattacagcgtgagtgcatctccatccacgttggccaggctggtgtccagattggcaatgcctgctgggag

SEQ ID NO: 196004 - DNA, 575 bp, Homo sapiens
  Payload ID: 18671
  Gene Name: tubulin, alpha 1c
  ENST ID: ENST00000552125
  CDS Start-End: 1-247
gaatgcaaaactgtacatctctaactggattcttatttacttcaccaggactcttcagctccctgcgccttttaacacatgcacatccagcaaaagcagaggagaacctggctgtgattcaaagagtctcactctactgcccaggctggagtgcagtggtacaatcttggctcactgcagcctccgccttccgggttccagtgatcctcctgcctcagcctcccaagtagctgagattacagcgtgagtgcatctccatccacgttggccaggctggtgtccagattggcaatgcctgctgggagctctactgcctggaacacggcatccagcccgatggccagatgccaagtgacaagaccattgggggaggagatgattccttcaacaccttcttcagtgaaacgggtgctggcaagcatgtgccccgggcagtgtttgtagacttggaacccacagtcattgatgaagttcgcactggcacttaccgccagctcttccaccctgagcaactcatcacaggcaaggaagatgctgccaataactatgcccgagggcactacaccattggcaag

SEQ ID NO: 196005 - DNA, 696 bp, Homo sapiens
  Payload ID: 18671
  Gene Name: tubulin, alpha 1c
  ENST ID: ENST00000549183
  CDS Start-End: 102-494
cactacttctcccccggactccttggtagtctgttagtgggagatccttgttgccgtcccttcgcctccttcaccgccgcagaccccttcaagttctagtcatgcgtgagtgcatctccatccacgttggccaggctggtgtccagattggcaatgcctgctgggagctctactgcctggaacacggcatccagcccgatggccagatgccaagtgacaagaccattgggggaggagatgattccttcaacaccttcttcagtgaaacgggtgctggcaagcatgtgccccgggcagtgtttgtagacttggaacccacagtcattgatgaagttcgcactggcacttaccgccagctcttccaccctgagcaactcatcacaggcaaggaagatgctgccaataactatgcccgagggcactacaccattggcaaggagatcattgacctcgtgttggaccgaattcgcaagctggtaagtatagtactttaaataaagtgggatgagagtttcttttgcagttctgagaccaaactacagaaatcattctttgcaactaaaatgagactatttgcattgcaactaaaatgtatctgttcactaaattaattggatttctgaaccagatgatcttggatttatgggacaactatggggtagaagtaagtgctctttagcctattttgcttcaagc

SEQ ID NO: 196006 - DNA, 1800 bp, Homo sapiens
  Payload ID: 18671
  Gene Name: tubulin, alpha 1c
  ENST ID: ENST00000552448
  CDS Start-End: 25-291
gaacaatgggcgcccagctctaaaatgacagcctggttcaatggggtggaggagctagggagggatgagtgctttgtgtgcttggaattagatccttcaaatggatcctttctgaatgcaaaactgtacatctctaactggattcttatttacttcaccaggactcttcagctccctgcgccttttaacacatgcacatccagcaaaagcagaggagaacctggctgtgattcaaagtgtgtgaacccagctctgtcccttgggttccgtacatataaatggagcagctgagggaactggataagaagtcgattttgtagttacaggctgttccgtatcacccatttacaagcgtgagtgcatctccatccacgttggccaggctggtgtccagattggcaatgcctgctgggagctctactgcctggaacacggcatccagcccgatggccagatgccaagtgacaagaccattgggggaggagatgattccttcaacaccttcttcagtgaaacgggtgctggcaagcatgtgccccgggcagtgtttgtagacttggaacccacagtcattgatgaagttcgcactggcacttaccgccagctcttccaccctgagcaactcatcacaggcaaggaagatgctgccaataactatgcccgagggcactacaccattggcaaggagatcattgacctcgtgttggaccgaattcgcaagctggctgaccagtgcaccggtcttcagggcttcttggttttccacagctttggtgggggaactggttctgggttcacctcgctgctcatggaacgtctctcagttgattatggcaagaagtccaagctggagttctccatttacccggcgccccaggtttccacagctgtagttgagccctacaactccatcctcaccacccacaccaccctggagcactctgattgtgccttcatggtagacaatgaggccatctatgacatctgtcgtagaaacctcgatatcgagcgcccaacctacactaaccttaaccgccttattagccagattgtgtcctccatcactgcttccctgagatttgatggagccctgaatgttgacctgacagaattccagaccaacctggtgccctacccccgcatccacttccctctggccacatatgcccctgtcatctctgctgagaaagcctaccacgaacagcttactgtagcagagatcaccaatgcttgctttgagccagccaaccagatggtgaaatgtgaccctcgccatggtaaatacatggcttgctgcctgttataccgtggtgacgtggttcccaaagatgtcaatgctgccattgccaccatcaaaaccaagcgtaccatccagtttgtggattggtgccccactggcttcaaggttggcattaattaccagcctcccactgtggtgcctggcggagacctggccaaggtacagagagctgtgtgcatgctgagcaataccacagctgttgccgaggcctgggctcgcctggaccacaagtttgacctgatgtatgccaagcgtgcctttgttcactggtacgtgggtgaggggatggaggaaggcgagttttcagaggcccgtgaggacatggctgcccttgagaaggattatgaggaggttggagcagatagtgctgacggagaggatgagggtgaagagtattaacctgtgtgctgtacttttacactcctttgtcttggaactgtcttatttttgttctgtaaatgtctattgccgtaaattgttaataaaattgaagtttccat

SEQ ID NO: 196007 - DNA, 1551 bp, Homo sapiens
  Payload ID: 18672
  Gene Name: tubulin, alpha 3c
  Uniprot ID: Q13748
  ENST ID: ENST00000400113
  CDS Start-End: 106-1458
aatcccagacagcgcacggcgggaggctgtcgttgggcgtgcgcagctgcagcggcggttgaggtcaagtagtagcgttgggctgcggcagcggaggagctcaacatgcgtgagtgtatctctatccacgtggggcaggcaggagtccagatcggcaatgcctgctgggaactgtactgcctggaacatggaattcagcccgatggtcagatgccaagtgataaaaccattggtggtggggacgactccttcaacacgttcttcagtgagactggagctggcaagcacgtgcccagagcagtgtttgtggacctggagcccactgtggtcgatgaagtgcgcacaggaacctataggcagctcttccacccagagcagctgatcaccgggaaggaagatgcggccaataattacgccagaggccattacaccatcggcaaggagatcgtcgacctggtcctggaccggatccgcaaactggcggatctgtgcacgggactgcagggcttcctcatcttccacagttttgggggtggcactggctctgggttcgcatctctgctcatggagcggctctcagtggattacggcaagaagtccaagctagaatttgccatttacccagccccccaggtctccacggccgtggtggagccctacaactccatcctgaccacccacacgaccctggaacattctgactgtgccttcatggtcgacaatgaagccatctatgacatatgtcggcgcaacctggacatcgagcgtcccacgtacaccaacctcaatcgcctgattgggcagatcgtgtcctccatcacggcctccctgcgatttgacggggccctgaatgtggacttgacggaattccagaccaacctagtgccgtacccccgcatccacttccccctggccacctacgccccggtcatctcagccgagaaggcctaccacgagcagctgtccgtggctgagatcaccaatgcctgcttcgagccagccaatcagatggtcaagtgtgaccctcgccacggcaagtacatggcctgctgcatgttgtacaggggggatgtggtcccgaaagatgtcaacgcggccatcgccaccatcaagaccaagcgcaccatccagtttgtagattggtgcccaactggatttaaggtgggcattaactaccagccccccacggtggtccctgggggagacctggccaaggtgcagcgggctgtgtgcatgctgagcaacaccacggccatcgcggaggcctgggctcgcctggaccataagttcgatctcatgtatgccaagcgggcctttgtgcactggtacgtgggagaaggcatggaggagggggagttctctgaggcccgcgaggacctggcagctctggagaaggattatgaagaggtgggcgtggattccgtggaagccgaggctgaagaaggtgaagaatactgaggggagggtgtggtgggttctccactccactgccacccccagcgtggctgctttcaagttctttgcaattaaaggttctgtataaaaccaaga

SEQ ID NO: 196008 - DNA, 1386 bp, Homo sapiens
  Payload ID: 18672
  Gene Name: tubulin, alpha 3c
  Uniprot ID: Q13748
  ENST ID: ENST00000618094
  CDS Start-End: 49-1305
gttgaggtcaagtagtagcgttgggctgcggcagcggaggagctcaacatgcgtgagtgtatctctatccacgtggggcaggcaggagtccagatcggcaatgcctgctgggaactgtactgcctggaacatggaattcagcccgatggtcagatgccaagtgataaaaccattggtggtggggacgactccttcaacacgttcttcagtgagactggagctggcaagcacgtgcccagagcagtgtttgtggacctggagcccactgtggtcgatgaagtgcgcacaggaacctataggcagctcttccacccagagcagctgatcaccgggaaggaagatgcggccaataattacgccagaggccattacaccatcggcaaggagatcgtcgacctggtcctggaccggatccgcaaactggcggatctgtgcacgggactgcagggcttcctcatcttccacagttttgggggtggcactggctctgggttcgcatctctgctcatggagcggctctcagtggattacggcaagaagtccaagctagaatttgccatttacccagccccccaggtctccacggccgtggtggagccctacaactccatcctgaccacccacacgaccctggaacattctgactgtgccttcatggtcgacaatgaagccatctatgacatatgtcggcgcaacctggacatcgagcgtcccacgtacaccaacctcaatcgcctgattgggcagatcgtgtcctccatcacggcctccctgcgatttgacggggccctgaatgtggacttgacggaattccagaccaacctagtgccgtacccccgcatccacttccccctggccacctacgccccggtcatctcagccgagaaggcctaccacgagcagctgtccgtggctgagatcaccaatgcctgcttcgagccagccaatcagatggtcaagtgtgaccctcgccacggcaagtacatggcctgctgcatgttgtacaggggggatgtggtcccgaaagatgtcaacgcggccatcgccaccatcaagaccaagcgcaccatccagtttgtagattggtgcccaactggatttaaggtgggcattaactaccagccccccacggtggtccctgggggagacctggccaaggtgcagcgggctgtgtgcatgctgagcaacaccacggccatcgcggaggcctgggctcgcctggacctggcagctctggagaaggattatgaagaggtgggcgtggattccgtggaagccgaggctgaagaaggtgaagaatactgaggggagggtgtggtgggttctccactccactgccacccccagcgtggctgctttcaagttctttgcaattaaaggttctgt

SEQ ID NO: 196009 - DNA, 1546 bp, Homo sapiens
  Payload ID: 18673
  Gene Name: tubulin, alpha 3d
  Uniprot ID: Q13748
  ENST ID: ENST00000321253
  CDS Start-End: 108-1460
aatcccgtgcggcgcgcacaggcaggaggttgcagttgggcgctcagcagctgtggcagccggttgaggtctggcagtagcgttgggctgaagcagcggagttcgccatgcgcgagtgtatctctatccacgtggggcaggcgggtgtccagatcggcaatgcctgctgggaactgtactgccttgaacatggaattcagcccgatggccaaatgccaagtgataaaaccattggtggcggggacgactccttcaacacgttcttcagtgagactggagctggcaagcacgtgcccagagcagtgtttgtggacctggagcccactgtggtcgatgaagtgcgcacagggacctacaggcagctcttccacccggagcagctgatcaccgggaaggaagatgcagccaataattacgccaggggccattacaccatcggcaaggagattgttgacctagtcctggaccggatccgcaaactggcggatctgtgcacaggactgcagggcttcctcatcttccacagctttgggggcggcactggctctgggttcgcatctctgctcatggagcggctctcagtggattacggcaagaagtccaagctagagtttgccatttacccagccccccaggtctccacagccgtggtggagccctacaactccatcctgaccacccacacgaccctggaacattctgactgtgccttcatggtcgacaatgaagccatctatgacatatgtcggcgcaacctggacattgaacgtcccacgtacaccaacctcaatcgcctgattgggcagatcgtgtcctccatcacagcctccctgcgatttgatggggccctgaatgtggacttgacggaattccagaccaacctagtgccgtacccccgcatccacttccccctggccacctatgccccagtcatctcagctgagaaggcctaccacgagcagctgtctgtggccgagatcaccaatgcctgcttcgagccagccaatcaaatggtcaagtgtgaccctcgccacggcaagtacatggcctgctgcatgttgtacaggggggacgtggtccccaaagacgtcaacgcggccatcgccaccatcaagaccaagcgcaccatccagtttgtggattggtgcccgactggatttaaggtgggcattaactaccagccccccacagtggtccccgggggagacctggccaaggtgcagcgggccgtgtgcatgctgagcaacaccacggccattgcggaggcctgggcccgcctggaccataagttcgatctcatgtatgccaagcgggcctttgtgcactggtacgtgggcgaaggcatggaagagggagagttctctgaggcccgcgaggacctggcagctctagagaaggattatgaagaggtgggcgtggattccgtggaagctgaggctgaagaaggcgaagaatactgaggggagggtgtggtgggttctcccctgccacccccgggatggctgcttccaagttgtttgcaattaaaggttctgtataaaaccaa

SEQ ID NO: 196010 - DNA, 1542 bp, Homo sapiens
  Payload ID: 18674
  Gene Name: tubulin, alpha 3e
  Uniprot ID: Q6PEY2
  ENST ID: ENST00000312988
  CDS Start-End: 102-1454
gtgcggcgcgcgtgggcaggtcattgcagttgggcgctcagcagctgtggcagccggttgaggtctggaagtagcgttgggctgaagcagcggagttcgccatgcgcgagtgtatctctatccacgtggggcaggcgggtgtccagatcggcaatgcctgctgggaactgtactgccttgaacatggaattcagcccgatggtcaaatgccaagtgataaaaccattggtggcggggacgactccttcaacacgttcttcagtgagactggagctggcaagcacgtgcccagagcagtgtttgtggacctggagcccactgtggtcgatgaagtgcgcacagggacctacaggcagctcttccacccagagcagctgatcaccgggaaggaagatgcagccagtaattacgccaggggccattacaccatcggcaaggagattgttgacctagtcctggaccggatccgcaaactggcggatctgtgcacaggactgcagggcttcctcatcttccacagctttgggggcggcactggctctgggttcgcatctctgctcatggagcggctctcagtggattacagcaagaagtccaagctagagtttgccatttacccagccccccaggtctccacagccgtggtggagccctacaactccatcctaaccacccacacgaccctggaacattctgactgtgccttcatggtcgacaatgaagccatctatgacatatgtcggcgcaacctggacattgaacgtcccacgtacaccaacctcaatcgcctgattgggcagatcgtgtcctccatcacggcctccctgcgatttgatggggccctgaatgtggacttgacggaattccagaccaacctcgtgccgtacccccgcatccacttccccctggccacctacgccccagtcatctcagctgagaaggcctaccacgagcagctgtctgtggccgagatcaccaatgcctgcttcgagccagccaatcagatggtcaagtgtgaccctcgccatggcaagtacatggcctgctgcatgttgtacaggggggacgtggtccccaaagacgtcaatgcggccatcgccaccatcaagaccaagcgcactatccagtttgtggattggtgcccgactggatttaaggtgggcattaactaccagccccccacagtggtccccgggggagacctggccaaggtgcagcgggccgtgtgcatgctgagcaacaccacggccattgcggaggcctgggcccgcctggtccataagttcgatctcatgtatgccaagtgggcctttgtgcactggtacgtgggcgaaggcatggaagagggagagttctctgaggcccgcgaggacctggcagctctagagaaggattgtgaagaggtgggcgtggattccgtggaagctgaggctgaagaaggcgaagcatactgaggggagggtgtggtgggttctcccctgccacccctaggatggctgctttcaagttgtttgcaattaaagattctgtataaaaccaaga

SEQ ID NO: 196011 - DNA, 2162 bp, Homo sapiens
  Payload ID: 18675
  Gene Name: tubulin, alpha 4a
  Uniprot ID: P68366
  ENST ID: ENST00000248437
  CDS Start-End: 175-1521
gcttaccctcccgggaggcgtggcctgcgggccgcccagcctctagtgggcgagcggggaacgcgggccccgccccccccccgcctataagggcggtgcggcactgcagctagcgcagttctcactgagacctgtcaccccgactcaacgtgagacgcaccgcccggactcaccatgcgtgaatgcatctcagtccacgtggggcaggcaggtgtccagatgggcaatgcctgctgggagctctattgcttggaacatgggattcagcctgatgggcagatgcccagtgacaagaccattggtggaggggacgactccttcaccaccttcttctgtgaaactggtgctggaaaacacgtaccccgggcagtttttgtggatctggagcctacggtcattgatgagatccgaaatggcccataccgacagctcttccacccagagcagctcatcactgggaaagaggatgctgccaacaactatgcccgtggtcactataccattggcaaggagatcattgacccagtgctggatcggatccgcaagctgtctgaccagtgcacaggacttcagggcttcctggtgttccacagctttggtgggggcactggctctggcttcacctcactcctgatggagcggctctctgttgactatggcaagaaatccaagctggaattctccatctacccagccccccaggtgtctacagccgtggtcgagccctacaactctatcctgaccacccacaccaccctggagcactcagactgtgccttcatggtggacaacgaagcaatctatgacatctgccgccgcaacctagacatcgagcgcccaacctacaccaacctcaatcgcctcattagccaaattgtctcctccatcacagcttctctgcgctttgacggggccctcaatgtggacctgacagagttccagaccaacctggtgccctaccctcgcatccacttccccctggccacctatgcaccagtcatctctgcagaaaaggcataccacgagcagctgtcggtggcagagatcaccaatgcctgctttgagcctgccaaccagatggtaaagtgtgatccccggcacggcaagtacatggcctgctgcctgctgtaccgtggagatgtggtgcccaaggatgtcaacgctgccattgccgccatcaagaccaagcgcagcattcagtttgtggactggtgccccacaggcttcaaggttggtatcaactaccagcctcccactgtggtgcctgggggtgacctggccaaggtgcagcgtgccgtgtgcatgctgagcaacacgaccgccatcgccgaggcctgggcccgcctggaccacaagttcgacctgatgtatgccaagagggcgtttgtgcactggtatgtgggtgagggcatggaggagggtgagttctccgaggcccgtgaggatatggctgccctggagaaggattatgaggaggtgggcatcgactcctatgaggacgaggatgagggagaagaataaagcagctgcctggagcctattcactatgtttattgcaaaatcctttcgaaataaacagtttccttgcacggtttcttgttccctctgagtgcttgagcttctgctgccttccccttcatgctgctgctgctctgtttgctgttcatgacccttatcccttccatcgctgaaggtgagacctgcaaaggggttcttgccaggcccaggaagcataaccccagggactttaaattgaagtcctagggttactcagtatagggaggaaatgaggaccaaaatccaggcacaaactgttgaaggatgagtcttcagctcctttccaagtaggagtataatccagtggtttctgtctttgaaagttagactgctaccctgttcttcctgctgcctctacatttaccaactctggaagcaaggcttggcccaggctcctctgtgcattatgagggtttgggagtggggctgggctggcccagagttcctgggcatggagccacgtcataagcttgggggatgggagggaacacaggcgatctcctagagttgtttgtgccactgcacctctgagcagctttgcatagcttcctgtcttgctgctttgctggagctggggctgtgccattaaaagtcaggtcatctcc

SEQ ID NO: 196012 - DNA, 2499 bp, Homo sapiens
  Payload ID: 18675
  Gene Name: tubulin, alpha 4a
  Uniprot ID: P68366
  ENST ID: ENST00000392088
  CDS Start-End: 557-1858
gatgacagcgccactgacccgcgggcggccggcgagccgcggcagattccggggtcggccccggcagacaggctgcggggctcgactctgcgggagcgcctaaggcattggcaatctggggctcaggctgtgcagttctgggtcctcggccgcccacaggcgtcggcgaaaggctgccgccccggccggggaccaggaagcgtcaggcagctggcaagggctccccggggacgcgccacagcctcacagccggcccgagtctcctgggaggcagggctggaagggcaggggtgaaggccagctgtggccgcttgggaaggaccgcctcgcctgctcccgacctaagtcagaacacctggatgaccggtgcctccaggacgcaggtgcaggtgagactcgccctgccacagcaccctgcatctccgcggaggccctcgggagcccagcgtgtctgctcaaaacgaggaaagaatggttaaagcccgaatcgcgactcttaatcccagcgggacagcgtgaatgcatctcagtccacgtggggcaggcaggtgtccagatgggcaatgcctgctgggagctctattgcttggaacatgggattcagcctgatgggcagatgcccagtgacaagaccattggtggaggggacgactccttcaccaccttcttctgtgaaactggtgctggaaaacacgtaccccgggcagtttttgtggatctggagcctacggtcattgatgagatccgaaatggcccataccgacagctcttccacccagagcagctcatcactgggaaagaggatgctgccaacaactatgcccgtggtcactataccattggcaaggagatcattgacccagtgctggatcggatccgcaagctgtctgaccagtgcacaggacttcagggcttcctggtgttccacagctttggtgggggcactggctctggcttcacctcactcctgatggagcggctctctgttgactatggcaagaaatccaagctggaattctccatctacccagccccccaggtgtctacagccgtggtcgagccctacaactctatcctgaccacccacaccaccctggagcactcagactgtgccttcatggtggacaacgaagcaatctatgacatctgccgccgcaacctagacatcgagcgcccaacctacaccaacctcaatcgcctcattagccaaattgtctcctccatcacagcttctctgcgctttgacggggccctcaatgtggacctgacagagttccagaccaacctggtgccctaccctcgcatccacttccccctggccacctatgcaccagtcatctctgcagaaaaggcataccacgagcagctgtcggtggcagagatcaccaatgcctgctttgagcctgccaaccagatggtaaagtgtgatccccggcacggcaagtacatggcctgctgcctgctgtaccgtggagatgtggtgcccaaggatgtcaacgctgccattgccgccatcaagaccaagcgcagcattcagtttgtggactggtgccccacaggcttcaaggttggtatcaactaccagcctcccactgtggtgcctgggggtgacctggccaaggtgcagcgtgccgtgtgcatgctgagcaacacgaccgccatcgccgaggcctgggcccgcctggaccacaagttcgacctgatgtatgccaagagggcgtttgtgcactggtatgtgggtgagggcatggaggagggtgagttctccgaggcccgtgaggatatggctgccctggagaaggattatgaggaggtgggcatcgactcctatgaggacgaggatgagggagaagaataaagcagctgcctggagcctattcactatgtttattgcaaaatcctttcgaaataaacagtttccttgcacggtttcttgttccctctgagtgcttgagcttctgctgccttccccttcatgctgctgctgctctgtttgctgttcatgacccttatcccttccatcgctgaaggtgagacctgcaaaggggttcttgccaggcccaggaagcataaccccagggactttaaattgaagtcctagggttactcagtatagggaggaaatgaggaccaaaatccaggcacaaactgttgaaggatgagtcttcagctcctttccaagtaggagtataatccagtggtttctgtctttgaaagttagactgctaccctgttcttcctgctgcctctacatttaccaactctggaagcaaggcttggcccaggctcctctgtgcattatgagggtttgggagtggggctgggctggcccagagttcctgggcatggagccacgtcataagcttgggggatgggagggaacacaggcgatctcctagagttgtttgtgccactgcacctctgagcagctttgcatagcttcctgtcttgctgctttgctggagctggggctgtgccattaaaagtcaggtcatctcc

SEQ ID NO: 196013 - DNA, 648 bp, Homo sapiens
  Payload ID: 18675
  Gene Name: tubulin, alpha 4a
  ENST ID: ENST00000447205
  CDS Start-End: 189-648
gtgactcagcaccccgcgtctgagctgagagggttggtgggaacggggttcggcctcctgaagcgagctggccctctccagccgaagcccgggtgcgcggatgggcagagacagctggcgctgagcactgcgcgggccgaggccagcgtgaatgcatctcagtccacgtggggcaggcaggtgtccagatgggcaatgcctgctgggagctctattgcttggaacatgggattcagcctgatgggcagatgcccagtgacaagaccattggtggaggggacgactccttcaccaccttcttctgtgaaactggtgctggaaaacacgtaccccgggcagtttttgtggatctggagcctacggtcattgatgagatccgaaatggcccataccgacagctcttccacccagagcagctcatcactgggaaagaggatgctgccaacaactatgcccgtggtcactataccattggcaaggagatcattgacccagtgctggatcggatccgcaagctgtctgaccagtgcacaggacttcagggcttcctggtgttccacagctttggtgggggcactggctctggcttcacctcactcctgatggagcggctctctgttgactatggcaagaaatccaagctggaat

SEQ ID NO: 196014 - DNA, 615 bp, Homo sapiens
  Payload ID: 18675
  Gene Name: tubulin, alpha 4a
  ENST ID: ENST00000398989
  CDS Start-End: 148-615
ggcgatggggccaacagcggcctctagtgtctggaggaggaagtgtcagcgctactgccgcagtctgaccagtgcacaggacttcagggcttcctggtgttccacagctttggtgggggcactggctctggcttcacctcactcctgatggagcggctctctgttgactatggcaagaaatccaagctggaattctccatctacccagccccccaggtgtctacagccgtggtcgagccctacaactctatcctgaccacccacaccaccctggagcactcagactgtgccttcatggtggacaacgaagcaatctatgacatctgccgccgcaacctagacatcgagcgcccaacctacaccaacctcaatcgcctcattagccaaattgtctcctccatcacagcttctctgcgctttgacggggccctcaatgtggacctgacagagttccagaccaacctggtgccctaccctcgcatccacttccccctggccacctatgcaccagtcatctctgcagaaaaggcataccacgagcagctgtcggtggcagagatcaccaatgcctgctttgagcctgccaaccagatggtaaagtgtgatccccggcac

SEQ ID NO: 196015 - DNA, 565 bp, Homo sapiens
  Payload ID: 18675
  Gene Name: tubulin, alpha 4a
  ENST ID: ENST00000425551
  CDS Start-End: 207-565
atttggaaaccgtcaccccgccatttcggtgtgggaagagcgcgcgggccctgccggactttagtgctttaggggttaatttcgggctgacagggacggagcctaaggcagtgagcgccccagtaccctcaaaccttattgctggcccctgctgtctgagcttacaagcattaccgccgctatttccgtgcgggctgacacgggagatgaaagtgcgtgaatgcatctcagtccacgtggggcaggcaggtgtccagatgggcaatgcctgctgggagctctattgcttggaacatgggattcagcctgatgggcagatgcccagtgacaagaccattggtggaggggacgactccttcaccaccttcttctgtgaaactggtgctggaaaacacgtaccccgggcagtttttgtggatctggagcctacggtcattgatgagatccgaaatggcccataccgacagctcttccacccagagcagctcatcactgggaaagaggatgctgccaacaactatgcccgtggtcactataccattggcaaggagatcattgacccagt

SEQ ID NO: 196016 - DNA, 940 bp, Homo sapiens
  Payload ID: 18675
  Gene Name: tubulin, alpha 4a
  ENST ID: ENST00000427737
  CDS Start-End: 400-940
gggtttgaggcggacgtgagagaagaaggtggtgtgagtgtcctggtttcctggctgcccaccatcagaacctcctgcctacatttggggaattcccatcgcaagggccctaatggaaagcaggccaccatttgccacaaagccccaatgcttgctctccctgactcggctctggggttgcaggcagaagacatgagctccgccaatcggatgctccaactgggactttgaatctggagcaagtcacggaatagcaaggctggtttaggaattcatttctgcggcggcggtggaggcgatggggccaacagcggcctctagtgtctggaggaggaagtgtcagcgctactgccgcagcgtgaatgcatctcagtccacgtggggcaggcaggtgtccagatgggcaatgcctgctgggagctctattgcttggaacatgggattcagcctgatgggcagatgcccagtgacaagaccattggtggaggggacgactccttcaccaccttcttctgtgaaactggtgctggaaaacacgtaccccgggcagtttttgtggatctggagcctacggtcattgatgagatccgaaatggcccataccgacagctcttccacccagagcagctcatcactgggaaagaggatgctgccaacaactatgcccgtggtcactataccattggcaaggagatcattgacccagtgctggatcggatccgcaagctgtctgaccagtgcacaggacttcagggcttcctggtgttccacagctttggtgggggcactggctctggcttcacctcactcctgatggagcggctctctgttgactatggcaagaaatccaagctggaattctccatctacccagccccccaggtgtctacagccgtggtcgagccctacaactctatcctgaccacccacaccaccctgg

SEQ ID NO: 196017 - DNA, 673 bp, Homo sapiens
  Payload ID: 18675
  Gene Name: tubulin, alpha 4a
  ENST ID: ENST00000456818
  CDS Start-End: 79-673
aaacccaatccccgctttgggctgggaaataactgtaaagactccagagggagagcggatgtagggctgggctgcaggatggcgcccatcctgcccgggacaaggcgggtcacctctggggcctcaccgcaggttccacttcctttctggcgtgaatgcatctcagtccacgtggggcaggcaggtgtccagatgggcaatgcctgctgggagctctattgcttggaacatgggattcagcctgatgggcagatgcccagtgacaagaccattggtggaggggacgactccttcaccaccttcttctgtgaaactggtgctggaaaacacgtaccccgggcagtttttgtggatctggagcctacggtcattgatgagatccgaaatggcccataccgacagctcttccacccagagcagctcatcactgggaaagaggatgctgccaacaactatgcccgtggtcactataccattggcaaggagatcattgacccagtgctggatcggatccgcaagctgtctgaccagtgcacaggacttcagggcttcctggtgttccacagctttggtgggggcactggctctggcttcacctcactcctgatggagcggctctctgttgactatggcaagaaatccaagctggaattctccatctacccagcccccc

SEQ ID NO: 196018 - DNA, 1380 bp, Homo sapiens
  Payload ID: 18676
  Gene Name: tubulin, alpha 4b
  Uniprot ID: Q9H853
  ENST ID: ENST00000490341
  CDS Start-End: 166-891
gtctctgcccatccgcgcacccgggcttcggctggagagggccagctcgcttcaggaggccgaaccccgttcccaccaaccctctcagctcagacgcggggtgctgagtcacggggggggggtggttctgtggatagttggaatgcatacacagaggaaagggggatgcggcaccagcagacagagagacaagaccccagccagcccctgtccaggcagcatggcacataccgccagatcttccatccagagcagctcatcacaggcaaggaagatgctgccaataactatgcctggggccactacaccattgggaaggagttcatcgacctgctactggaccggattcggaagctggctgaccagtgcacaggacttcagggcttcctggtgttccacagccttggtcggggcactggctctgacgtcacctcattcctgatggagtggctttctgttaactatggcaagaaatccaagctgggattctccatctacccagccccccaggtgtctacagccatggtccagccctacaactctatcctgaccacccacaccaccctggagcactcagactgtgccttcatggtggacaacaaagcaatctatgacatctgccactgcaacctagacatcgagcgcccaacctacaccaacctcaatcgcctcattagccaaattgtctcctccatcacagcttctctgcgctttgacggggccctcaatgtggacctgacagagttccagaccaacctggtgtcctacctcacatccacttccccctggccacctatgcaccagtcatctctgcagaaaaggtataccacgagcagctgttggtggcagagattaccaatgcctgctttgagcctgccaaccagatggtgaagtgtgatccccggcacggcaagtacatggcctgctgcctgctataccatggagatgtggtgcccaaggatgtcaacgctgccattgctgccatcaagaccaagtgcagcattcagtttgtggactggtgccccacaggctttaaggttgatatcaatcaccagcctcccactgtggtgcctgggagtgacctggtaaagtgcaacgtgccatgtgcatgctgagcaacatgacagccatcactatggcctgggcccgcctggaccacaagtttgacctgatgtatgccaagagggcgtttgggcactgatatgtgggtgagggcatggaggagggtgagttctccaaggcccatgaggatatgactgccctggagaaggattacaaggaggtgggcatggatagtgtggagtggggggaagaaaagataggggggatgaatactaggggaatactgtgtgtctgtcctacataaagtgctgtggcctt

SEQ ID NO: 196019 - DNA, 1518 bp, Homo sapiens
  Payload ID: 18677
  Gene Name: tubulin, alpha 8
  Uniprot ID: Q9NY65
  ENST ID: ENST00000316027
  CDS Start-End: 349-1500
tttgtgacctgcccgcccctccccggcactgtgatgccggggggcagctgcgggcccggcgcgcctgtccccggcgtccccccctcccggtgtgtcacaacggcggaggcggctgtatctggagcagtcggggcgggcaggcccagctgagagcgggaatgcatatcagtccacgtgggccaagcgggagttcagattggcaatgcctgctgggagctcttctgcctggaacacggcatccaggcagacggcacttttgatgctcaagctagcaagatcaacgatgatgactccttcaccacctttttcagcgagactggcaatgggaagcatgtgccccgggccgtcatgatagatctggagcctactgtagtggatgaggttcgggcaggaacctaccgccagctcttccatccagagcagctgatcacaggaaaggaggatgcagccaacaactatgcccggggccactacacggtgggcaaggagagcattgacctggtgctggaccgcatacggaagctgacagatgcttgctctggcctgcagggcttcctgattttccacagttttggtgggggcactggctccggcttcacttctctgctgatggaacgcctctccctggattatggcaagaaatccaagctggagtttgccatctacccagccccccaggtctctactgcagtggtggagccctacaactccatcctgaccacccacaccacactggaacattcagattgtgctttcatggtggacaacgaagccatctatgacatctgccgcaggaaccttgacattgagcgccctacctataccaacctcaaccgcctcatcagtcagattgtgtcctcaatcactgcttctctccgctttgacggggccctcaatgtggacctcactgagttccagaccaacctggtgccctacccccgcatccacttcccgctggtcacctacgcgcccatcatctctgccgagaaagcctatcacgaacagctctctgtggccgagataaccagctcctgctttgagcccaacagccagatggtgaagtgcgacccgagacatggcaagtacatggcctgctgcatgctctaccggggcgacgtggtgcccaaggatgtgaatgtcgctattgctgccatcaagaccaagaggaccatccagtttgtagactggtgtcccacaggcttcaaggtgggcatcaactaccagcccccgaccgtggtccccgggggagacctggccaaggtgcagcgggccgtctgcatgctcagcaacaccacggccattgcggaggcctgggcccgcctcgaccacaagttcgacctcatgtacgccaagcgggcctttgtgcattggtatgtgggagaggggatggaagaaggagaattttctgaggccagggaagacttagctgccctggagaaggattatgaagaagtggggactgattcgtttgaagaagaaaatgaaggggaggaattttaaatatataccttccccttg

SEQ ID NO: 196020 - DNA, 2018 bp, Homo sapiens
  Payload ID: 18677
  Gene Name: tubulin, alpha 8
  Uniprot ID: Q9NY65
  ENST ID: ENST00000330423
  CDS Start-End: 74-1423
aggcggctgtatctggagcagtcggggcgggcaggcccagctgagaggtgcgcgggcgaggacagcggcagcgatgcgggaatgcatatcagtccacgtgggccaagcgggagttcagattggcaatgcctgctgggagctcttctgcctggaacacggcatccaggcagacggcacttttgatgctcaagctagcaagatcaacgatgatgactccttcaccacctttttcagcgagactggcaatgggaagcatgtgccccgggccgtcatgatagatctggagcctactgtagtggatgaggttcgggcaggaacctaccgccagctcttccatccagagcagctgatcacaggaaaggaggatgcagccaacaactatgcccggggccactacacggtgggcaaggagagcattgacctggtgctggaccgcatacggaagctgacagatgcttgctctggcctgcagggcttcctgattttccacagttttggtgggggcactggctccggcttcacttctctgctgatggaacgcctctccctggattatggcaagaaatccaagctggagtttgccatctacccagccccccaggtctctactgcagtggtggagccctacaactccatcctgaccacccacaccacactggaacattcagattgtgctttcatggtggacaacgaagccatctatgacatctgccgcaggaaccttgacattgagcgccctacctataccaacctcaaccgcctcatcagtcagattgtgtcctcaatcactgcttctctccgctttgacggggccctcaatgtggacctcactgagttccagaccaacctggtgccctacccccgcatccacttcccgctggtcacctacgcgcccatcatctctgccgagaaagcctatcacgaacagctctctgtggccgagataaccagctcctgctttgagcccaacagccagatggtgaagtgcgacccgagacatggcaagtacatggcctgctgcatgctctaccggggcgacgtggtgcccaaggatgtgaatgtcgctattgctgccatcaagaccaagaggaccatccagtttgtagactggtgtcccacaggcttcaaggtgggcatcaactaccagcccccgaccgtggtccccgggggagacctggccaaggtgcagcgggccgtctgcatgctcagcaacaccacggccattgcggaggcctgggcccgcctcgaccacaagttcgacctcatgtacgccaagcgggcctttgtgcattggtatgtgggagaggggatggaagaaggagaattttctgaggccagggaagacttagctgccctggagaaggattatgaagaagtggggactgattcgtttgaagaagaaaatgaaggggaggaattttaaatatataccttccccttggctgtgtctctttatttatgctgtgccattcaaagcacatgttcaagagaacagaacactctccccgccccagcctgattcctgccttacccaggaggagggtgcctggccccagtacccagggtggcacgactgggctaagtggacactgagcttcatcaggccctccctgggtaggagcagctttgtgtcactaaagaaagtgagggccactgtctccggcgggtgaggctgcagcccagtttcacatgcgaggaggcctaatcaggagtttcaattccagatcgggctgggtccagccccaaaacatggcctgctggctggggagtgggaacactcagagaaaggggagatctgggcctgggaagattccggggcaggggtgagcggacgttcacatgagtgggtctatagcccgctccgggcatcatctagacttagcatgcattcactcccccatcacatattccaatacacaccctgtcctaggcactgagagctggagagttggtgataagcgagacgaacacatttcctgccctcatacacacataaataaagtgaatgagatcatgtc

SEQ ID NO: 196021 - DNA, 582 bp, Homo sapiens
  Payload ID: 18677
  Gene Name: tubulin, alpha 8
  ENST ID: ENST00000426208
  CDS Start-End: 442-582
agcttgccaagcacacacggccctagggcgcccagctgagacggcaccttggcacccgggcccgctgcagcccgctccggtcagctgcaccccagtcaggagcctttccagcgggtcggaggagaacggaagtttggggagacccgcgcgattcgcctggctgcattttacatttctttctccggcagctggggtcacgaaggctgctctcgccggcggtgttggaacgtggacacgtgcgctttgcgggaatgcatatcagtccacgtgggccaagcgggagttcagattggcaatgcctgctgggagctcttctgcctggaacacggcatccaggcagacggcacttttgatgctcaagctagcaagatcaacgatgatgactccttcaccacctttttcagcgagactggcaatgggaagcatgtgccccgggccgtcatgatagatctggagcctactgtagtggatgaggttcgggcaggaacctaccgccagctcttccatccagagcagctgatcacaggaaaggaggatgcagccaacaactatgcccggggccactacacggtgggcaaggag

SEQ ID NO: 196022 - DNA, 1700 bp, Homo sapiens
  Payload ID: 18677
  Gene Name: tubulin, alpha 8
  ENST ID: ENST00000416740
  CDS Start-End: 298-1700
ggcgtaggctgaaggagagtttctgccatgatcgccagttcttccttgggccttcttcaccagtgcaggaatcttgtggtttggaattagccccttgcttcatctttgcaaccaccctccttttttctttcctggtataaaaggtcaaccctgggaagcaacctttagagcaaagcacaaaacagctgtgtcttctttggatctaagtcctggtccagctgctatagagctggggcacctgcagcctcaacgccaactggcaatggggggctggggcctggctggcctgcaaggtgaatgttatggggatgtagggcaaaggcatgctgggggcccagactctctgacctcgttgcttccctctccccacagcgggaatgcatatcagtccacgtgggccaagcgggagttcagattggcaatgcctgctgggagctcttctgcctggaacacggcatccaggcagacggcacttttgatgctcaagctagcaagatcaacgatgatgactccttcaccacctttttcagcgagactggcaatgggaagcatgtgccccgggccgtcatgatagatctggagcctactgtagtggatgaggttcgggcaggaacctaccgccagctcttccatccagagcagctgatcacaggaaaggaggatgcagccaacaactatgcccggggccactacacggtgggcaaggagagcattgacctggtgctggaccgcatacggaagctgacagatgcttgctctggcctgcagggcttcctgattttccacagttttggtgggggcactggctccggcttcacttctctgctgatggaacgcctctccctggattatggcaagaaatccaagctggagtttgccatctacccagccccccaggtctctactgcagtggtggagccctacaactccatcctgaccacccacaccacactggaacattcagattgtgctttcatggtggacaacgaagccatctatgacatctgccgcaggaaccttgacattgagcgccctacctataccaacctcaaccgcctcatcagtcagattgtgtcctcaatcactgcttctctccgctttgacggggccctcaatgtggacctcactgagttccagaccaacctggtgccctacccccgcatccacttcccgctggtcacctacgcgcccatcatctctgccgagaaagcctatcacgaacagctctctgtggccgagataaccagctcctgctttgagcccaacagccagatggtgaagtgcgacccgagacatggcaagtacatggcctgctgcatgctctaccggggcgacgtggtgcccaaggatgtgaatgtcgctattgctgccatcaagaccaagaggaccatccagtttgtagactggtgtcccacaggcttcaaggtgggcatcaactaccagcccccgaccgtggtccccgggggagacctggccaaggtgcagcgggccgtctgcatgctcagcaacaccacggccattgcggaggcctgggcccgcctcgaccacaagttcgacctcatgtacgccaagcgggcctttgtgcattggtatgtgggagaggggatggaagaaggagaattttctgaggccagggaagacttagctgccctggagaaggattatgaagaagtggggactgattcgtttgaagaagaaaa

SEQ ID NO: 196023 - DNA, 1391 bp, Homo sapiens
  Payload ID: 18677
  Gene Name: tubulin, alpha 8
  ENST ID: ENST00000608634
  CDS Start-End: 1-826
ctttgacggggccctcaatgtggacctcactgagttccagaccaacctggtgccctacccccgcatccacttcccgctggtcacctacgcgcccatcatctctgccgagaaagcctatcacgaacagctctctgtggccgagataaccagctcctgctttgagcccaacagccagatggtgaagtgcgacccgagacatggcaagtacatggcctgctgcatgctctaccggggcgacgtggtgcccaaggatgtgaatgtcgctattgctgccatcaagaccaagaggaccatccagtttgtagactggtgtcccacaggcttcaaggtgggcatcaactaccagcccccgaccgtggtccccgggggagacctggccaaggtgcagcgggccgtctgcatgctcagcaacaccacggccattgcggaggcctgggcccgcctcgaccacaagttcgacctcatgtacgccaagcgggcctttgtgcattgccaaaggatccagttggggatctcctgttcatctatgacctctttggtctctgccagtctggagccgttcctcaaagctgtctttgattttcatgaatcgtttgaagatggcagaccagctgatctgcagaatgcccctcgatttgggttggccaggacccgcgtcctggcgaaggggttccggttactgaccttcgatgggaacagcacagaagtgataccgcgctggctccactctgtcctctggtggcacgcaattccagtgttccccgcactgatgactttcttgtaccgaatatttacattaattacattctttatagttataatgtaatattacatatgagaccatggggttcatctgattaggtctgcccaatttagcctgccctgcttgctttgggtcacttgcttttgttattttttttctgtgaagctgaaggccgcgccactgagcgctgtaacttaaccttgccggcttccttacagataacatgtatgtcactactgtcatgatcgttcaaattgtttttcaggaacttggggcagctcctgcctagttcaaaccagttgagaccgtgagctttcaagtaggcttgtgcaaacaaaagaagtggccttttgacatcagaggccccaagcgacaccctcagatcacgctaaggctgtcattttttgaacatgtgccctgtgaagtgccacgaaccctgactatgcttgcagtggtcaccgactgcctcattttcccccactgccaatcacctttgcccataccttacaccaccctgcttctctcaccggtaaatatccctaagacttatctttggggaggaagatttgagagctgttctcctgcctcctcactgggctgccttgcgaataaatcttttctcttttac

SEQ ID NO: 196024 - DNA, 1798 bp, Homo sapiens
  Payload ID: 18678
  Gene Name: tubulin, alpha-like 3
  Uniprot ID: A6NHL2
  ENST ID: ENST00000380419
  CDS Start-End: 39-1379
tcattactacagggcaggaagggcacgttctcatcagcatgagggagtgcctttccatccacatcggtcaagctggcatccagattggggacgcctgctgggaactctattgcctggaacatggaatccagccaaatggcgttgttcttgacactcaacaggatcagctggaaaatgcaaaaatggagcacacaaatgcatctttcgataccttcttctgtgagacaagagctgggaagcatgtgcctagagcactcttcgtggacttggagccaactgttatagatgggatccggacgggccagcaccgttcactcttccaccccgagcagctccttagcggaaaggaggatgctgctaacaattacgcgcgaggccgttactctgtggggtcggaggtcatcgaccttgtgctggagaggacccggaagctggcagaacagtgtggtggacttcagggatttttgattttccgaagctttggaggaggcactggttcagggtttacgtctctcttaatggagaggctcacaggagaatatagcagaaagactaagctggagttctcggtctacccagcccccaggatctccactgctgtggtagagccttataactctgtcctcaccacccactccaccacagagcacacggactgtaccttcatggtggacaacgaggccgtctatgatatatgccatcgtaaactcggtgttgaatgcccctctcatgccagcatcaatagattggtggttcaggtggtatcttccatcactgcctccctccggtttgaagggcccttgaatgtagacctaattgaattccagaccaacctggtaccttatccgagaatacatttccccatgacagccttcgcccccatcgtctctgctgacaaagcctaccatgagcagttctctgtgtcagacatcaccactgcctgctttgagtcctccaaccagctggtcaagtgtgatcctcggcttgggaagtacatggcctgctgcctactctatagaggggatgtggtccccaaggaagtgaatgcagcaatcgcagccacgaagtcgaggcactctgttcagtttgtagattggtgtccaactggtttcaaggtgggcatcaacaatcggccgcccacggtgatgccgggtggggacctggccaaagtccaccggtccatctgcatgctgagcaacaccacggcgattgtggaggcctgggcccgcctggaccacaagtttgacctcatgtacgccaagagagcatttctgcactggtacctcagagaaggcatggaagaagcagagttcttggaggccagggaagatctggcagccctggagagggactatgaggaagtggcgcaaagtttctgaggcatgtatgatgggtgcaaatgaatgtcaagttaaaatggcatgttttcttttcaagccgttatatgcctagtgggtagttcccctgatgagcagaaaaatgaactcaaatcaggcaagactctaggttccacactaaattaagtgggtcagtaccaacaatgaacacattatttcctggtctactggtacaagtcagctctgctacctgggagcctttggaagcttagagtcctttgaactgctgagtcacttctaggtgggatttttttgttttaccaagagacaatgaaatcctgaagtttatgcttttcctttctggtaccggaagtagaaaacagcacatgttgattacgaatgttttttcccccatgtctacattttttacactgattaaatcataaatattttcagtatga

SEQ ID NO: 196025 - DNA, 1505 bp, Homo sapiens
  Payload ID: 18678
  Gene Name: tubulin, alpha-like 3
  Uniprot ID: A6NHL2
  ENST ID: ENST00000479328
  CDS Start-End: 37-1257
attactacagggcaggaagggcacgttctcatcagcatggatcagctggaaaatgcaaaaatggagcacacaaatgcatctttcgataccttcttctgtgagacaagagctgggaagcatgtgcctagagcactcttcgtggacttggagccaactgttatagatgggatccggacgggccagcaccgttcactcttccaccccgagcagctccttagcggaaaggaggatgctgctaacaattacgcgcgaggccgttactctgtggggtcggaggtcatcgaccttgtgctggagaggacccggaagctggcagaacagtgtggtggacttcagggatttttgattttccgaagctttggaggaggcactggttcagggtttacgtctctcttaatggagaggctcacaggagaatatagcagaaagactaagctggagttctcggtctacccagcccccaggatctccactgctgtggtagagccttataactctgtcctcaccacccactccaccacagagcacacggactgtaccttcatggtggacaacgaggccgtctatgatatatgccatcgtaaactcggtgttgaatgcccctctcatgccagcatcaatagattggtggttcaggtggtatcttccatcactgcctccctccggtttgaagggcccttgaatgtagacctaattgaattccagaccaacctggtaccttatccgagaatacatttccccatgacagccttcgcccccatcgtctctgctgacaaagcctaccatgagcagttctctgtgtcagacatcaccactgcctgctttgagtcctccaaccagctggtcaagtgtgatcctcggcttgggaagtacatggcctgctgcctactctatagaggggatgtggtccccaaggaagtgaatgcagcaatcgcagccacgaagtcgaggcactctgttcagtttgtagattggtgtccaactggtttcaaggtgggcatcaacaatcggccgcccacggtgatgccgggtggggacctggccaaagtccaccggtccatctgcatgctgagcaacaccacggcgattgtggaggcctgggcccgcctggaccacaagtttgacctcatgtacgccaagagagcatttctgcactggtacctcagagaaggcatggaagaagcagagttcttggaggccagggaagatctggcagccctggagagggactatgaggaagtggcgcaaagtttctgaggcatgtatgatgggtgcaaatgaatgtcaagttaaaatggcatgttttcttttcaagccgttatatgcctagtgggtagttcccctgatgagcagaaaaatgaactcaaatcaggcaagactctaggttccacactaaattaagtgggtcagtaccaacaatgaacacattatttcctggtctactggtacaagtcagctctgctacctgggagcctttggaagcttagagtcctttgaactgctga

SEQ ID NO: 196026 - DNA, 3496 bp, Homo sapiens
  Payload ID: 18679
  Gene Name: tubulin, beta 1 class VI
  Uniprot ID: Q9H4B7
  ENST ID: ENST00000217133
  CDS Start-End: 270-1625
ggggcagtattctgtgttgagggaggaaaaacactcccttccaaaagcatgacaggcagaaagcagagaagggccaggactggctgagggcggggagctgggcctctggggtggacacacccttggtcacattgtgagggtagcttggttggccagtcccaccactgcagtgaccacagttgtgttgggctcacaccagtgaaccgaagctctggattctgagagtctgaggattccgtgaagatctcagacttgggctcagagcaaggatgcgtgaaattgtccatattcagattggccagtgtggcaaccagatcggagccaagttctgggagatgattggtgaggaacacgggatcgacttggctgggagcgaccgcggggcctcggccttgcagctggagagaatcagcgtgtactacaacgaagcctacggtaggaaatatgtgccccgagcagtcttggtggacctagaacctgggacgatggacagcattcgatctagcaaattaggagctctctttcaacccgacagttttgtccatggtaactctggggctggcaacaactgggccaaaggccactacacggagggagccgagctgatcgagaatgtcctagaggtggtgaggcacgagagtgagagctgtgactgcctgcagggcttccagatcgtccactccctgggcgggggcacaggctccgggatgggcactctgctcatgaacaagattagagaggagtacccggaccggatcatgaattccttcagcgtcatgccttctcccaaggtgtcggacactgtggtggagccctacaacgcggttctgtctatccaccagctgattgagaatgcagatgcctgtttctgcattgacaatgaggccctctatgacatctgcttccgtaccctgaagctgacgacacccacctatggggatctcaaccacctagtgtccttgaccatgagcggcataaccacctccctccggttcccgggtcagctcaacgcagacctgcgcaagctggcggtgaacatggtccccttcccccgcctgcacttctttatgcccggctttgccccactcacggcccagggcagccagcagtaccgagccctctccgtggccgagctcacccagcagatgttcgatgcccgcaataccatggctgcctgtgacctccgccgtggccgctacctcacagtggcctgcattttccggggcaagatgtccaccaaggaagtggaccagcaactgctctccgtgcagaccaggaacagcagctgctttgtggagtggattcccaacaacgtcaaggtggctgtctgcgacatcccgccccgggggctgagcatggccgccaccttcattggcaacaacacggccatccaagagatctttaatagggtctctgagcatttctcagccatgttcaaaaggaaagcttttgtgcactggtacaccagcgaagggatggacataaacgaatttggggaagctgaaaataacatccatgatttggtatccgagtaccaacaatttcaagatgccaaagcagttctagaggaagatgaagaggtcacggaggaggcagaaatggagccagaagataagggacattaactgtgagagaagctgtgccgcggagtcgcttacagaacagtttctcattagatgagtgtttctcctgcagcactccaaaacccactctgcactgcagcacagtgaatgatatgcactcaccattagcttcgacacagggactgagggagacaggtggggagcagctgacaggcattagggtctttgctgacatctactaaccttgaagagtttgatgttcagtgcatacttattaacttaaaaaaatagcaaatttattgtaaagtgctccctttgtttcaaagtgtttgccaggcatccagactacacgtgtggatttgcagggagccactggagttggtgttacatttttatactttagcagcactgataggcaccctggaatcctcacttggtatccgagggctactaagactctttccttaggttctttcctctgagcaaacactgactggcatcctgctttccagtgcctgccagcctccagaagagccaggtgcctgactagtacatggggagctacagagccaaggtcaatgtgagtcaacatccactagaaatatccatgttgtgtagacctgtgcatacaacatgctaactggaaaagaggaaaaaagaaaagccacagtcctctccacaaaaatacctggtccaaacaagaaaaacaaaaagacaagcaaaactaaagaactgcagtcttctgatctttatttctgaagagctagcctttaacatatatgtttatatagtttaaatttcttactactgttagatcccaggaattcattaataatcatccttggctttccttttaaaggctattttgaaatggtcttttcactttcattcagtcatcaccccccaaaatgctctgcagcctctctgctctttgagaaagggcacaccatgcgctcggcaaccattcaaatgcaggaattaagcagcaatggctgcagtgtccttctcagttatggaggacatcgtctcattagggaacttttacagttcaaattaatttgcagaagttgccataaatgtttgcataatgacatagctttaagcactacatgattttaatctgctcacattataacaggaccaaatacacaagagcgtaatcaaatcatctgtaacttcttaattacagtttacctatttctgacatgcagcactgccatctcttccagcaccatcagggttttaatggccctctagaattaccactgagatacactatttgatccatggataaccggtaatgggaaaatgctccgaccctcaatgcagtaaatatttacttgcaggcaactgggttctcatctcttgatttgcttttgtaatcagcaataataaaatagcaggtagatggatgacagttgctcattctgagaaacttcactcttttcacttatgcatcacgaggaaataactaaaatacataccaagagaaaaataccttgccatcggatcatcaacaagtcttctatttacaaacttcaaaaaacacaaaacaacattcatgttttaaatgctttctacttgtggttcaagaagcactagatttagtaagaaactctacctatatacttagtttgaagttagtaacttcctgagatgctaaagacttacagcctgcgattatacaaggatttacacatgcttcctctggtgctttacttcccaaacctaaaaaagcaatgaaatagatgtaaggaaggagggatttaaaccttttaaaaaacttttgctgacttatattactgtaaagatttgtttgctcaatagtaatcattaaactacaaagtaattcaattttaaatggcaaaattgctttatttcagactaaataaattccttttcttgaagcctaa

SEQ ID NO: 196027 - DNA, 1595 bp, Homo sapiens
  Payload ID: 18680
  Gene Name: tubulin, beta 2A class IIa
  Uniprot ID: Q13885
  ENST ID: ENST00000333628
  CDS Start-End: 64-1401
gcccgccggtccacgccgcgcaccgctccgagggccagcgccacccgctccgcagccggcaccatgcgcgagatcgtgcacatccaggcgggccagtgcggcaaccagatcggcgccaagttttgggaggtcatcagcgatgagcatgggatcgaccccacaggcagttaccatggagacagtgacttgcagctggagagaatcaacgtgtactacaatgaggctgctggtaacaaatatgtacctcgggccatcctggtggatctggagcctggcaccatggactctgtcaggtctggacccttcggccagatcttcagaccagacaacttcgtgttcggccagagtggagccgggaataactgggccaagggccactacacagagggagccgagctggtcgactcggtcctggatgtggtgaggaaggagtcagagagctgtgactgtctccagggcttccagctgacccactctctggggggcggcacggggtccgggatgggcaccctgctcatcagcaagatccgggaagagtacccagaccgcatcatgaacaccttcagcgtcatgccctcacccaaggtgtcagacacggtggtggagccctacaacgccaccctctctgtccaccagctggtggaaaacacagatgaaacctactccattgataacgaggccctgtatgacatctgcttccgcaccctgaagctgaccacccccacctacggggacctcaaccacctggtgtcggccaccatgagcggggtcaccacctgcctgcgcttcccgggccagctgaacgcagacctgcgcaagctggcggtgaacatggtgcccttccctcgcctgcacttcttcatgcccggcttcgcgcccctgaccagccggggcagccagcagtaccgggcgctcacggtgcccgagctcacccagcagatgttcgactccaagaacatgatggccgcctgcgacccgcgccacggccgctacctgacggtggctgccatcttccggggccgcatgtccatgaaggaggtggacgagcagatgctcaacgtgcagaacaagaacagcagctacttcgtggagtggatccccaacaacgtgaagacggccgtgtgcgacatcccgccccgcggcctgaagatgtcggccaccttcatcggcaacagcacggccatccaggagctgttcaagcgcatctccgagcagttcacggccatgttccggcgcaaggccttcctgcactggtacacgggcgagggcatggacgagatggagttcaccgaggccgagagcaacatgaacgacctggtgtccgagtaccagcagtaccaggacgccacggccgacgaacaaggggagttcgaggaggaggagggcgaggacgaggcttaaaaacttctcagatcaatcgtgcatccttagtgaacttctgttgtcctcaagcatggtctttctacttgtaaactatggtgctcagttttgcctctgttagaaattcacactgttgatgtaatgatgtggaactcctctaaaaattacagtattgtctgtgaaggtatctatactaataaaaaagcatgtgtaga

SEQ ID NO: 196028 - DNA, 2020 bp, Homo sapiens
  Payload ID: 18681
  Gene Name: tubulin, beta 2B class IIb
  Uniprot ID: Q9BVA1
  ENST ID: ENST00000259818
  CDS Start-End: 193-1530
ggggggctcgggctgggggcgcggcctgtgccggccgccccaccctccttgcataaaagccggagcccgcggggccggcgctctcagcccgtcggttcccgagcgccttcccggtgaccccgcagtgggtgtgtgaggggaggacggacagacccagacgccgccggaccaggaggacgctgacgaggcaccatgcgtgagatcgtgcacatccaggcgggccagtgcggcaaccagatcggcgccaagttttgggaggtcatcagtgatgagcatgggattgaccccactggcagttaccatggagacagtgatttgcagctggagagaatcaatgtttactacaatgaagccactggtaacaaatatgttcctcgggccatcctcgtggatctggagccaggcacgatggattcggttaggtctggaccattcggccagatcttcagaccagacaatttcgtgtttggccagagtggagccgggaataactgggccaagggccactacacagagggagccgagctggtcgactcggtcctggatgtggtgaggaaggagtcagagagctgtgactgtctccagggcttccagctgacccactctctggggggcggcacggggtccgggatgggcaccctgctcatcagcaagatccgggaagagtacccagaccgcatcatgaacaccttcagcgtcatgccctcacccaaggtgtcagacacggtggtggagccctacaacgccaccctctcggtccaccagctggtggaaaacacagatgaaacctactgcattgacaacgaggccctgtatgacatctgcttccgcaccctgaagctgaccacccccacctacggggacctcaaccacctggtgtcggccaccatgagcggggtcaccacctgcctgcgcttcccgggccagctgaacgcagacctgcgcaagctggcggtgaacatggtgcccttccctcgcctgcacttcttcatgcccggcttcgcgcccctgaccagccggggcagccagcagtaccgggcgctcacggtgcccgagctcacccagcagatgttcgactccaagaacatgatggccgcctgcgacccgcgccacggccgctacctgacggtggctgccatcttccggggccgcatgtccatgaaggaggtggacgagcagatgctcaacgtgcagaacaagaacagcagctacttcgtggagtggatccccaacaacgtgaagacggccgtgtgcgacatcccgccccgcggcctgaagatgtcggccaccttcatcggcaacagcacggccatccaggagctgttcaagcgcatctccgagcagttcacggccatgttccggcgcaaggccttcctgcactggtacacgggcgagggcatggacgagatggagttcaccgaggccgagagcaacatgaacgacctggtgtccgagtaccagcagtaccaggacgccacggccgacgaacaaggggagttcgaggaggaggagggcgaggacgaggcgtagatgcccccgcgagacgggttagggaaagcggaggaggaaagcgagggggtggggggcttcccgggacgataacctggcagtggaaggaaagaagcatggtctactttaggtgtgcgctgggtctctggtgctcttcactgttgcctgtcactttttttttccttttttgtaatattgatgacatcaatgtaacatttgagatatttctgaattactgttgtaatggctaaaatcacataaacgtttgtgtcggaatggtgtcctctctttctcttcctttttctctttattaacgatttaaatgtaactttctgaacacattgcattgaattcttcctttaacaaaaagcaaaggcgtaggtaaaagctcaaatgaatttattctttcggtatggtaaaattgaaccaatcacagttaagatgagagatcaacctgagttttaaaatacctttaataaatattagttgaaaaaatgtctacttgaaagca

SEQ ID NO: 196029 - DNA, 1769 bp, Homo sapiens
  Payload ID: 18682
  Gene Name: tubulin, beta 3 class III
  Uniprot ID: Q13509
  ENST ID: ENST00000315491
  CDS Start-End: 124-1476
gacatcagccgatgcgaagggcggggccgcggctataagagcgcgcggccgcggtccccgaccctcagcagccagcccggcccgcccgcgcccgtccgcagccgcccgccagacgcgcccagtatgagggagatcgtgcacatccaggccggccagtgcggcaaccagatcggggccaagttctgggaagtcatcagtgatgagcatggcatcgaccccagcggcaactacgtgggcgactcggacttgcagctggagcggatcagcgtctactacaacgaggcctcttctcacaagtacgtgcctcgagccattctggtggacctggaacccggaaccatggacagtgtccgctcaggggcctttggacatctcttcaggcctgacaatttcatctttggtcagagtggggccggcaacaactgggccaagggtcactacacggagggggcggagctggtggattcggtcctggatgtggtgcggaaggagtgtgaaaactgcgactgcctgcagggcttccagctgacccactcgctggggggcggcacgggctccggcatgggcacgttgctcatcagcaaggtgcgtgaggagtatcccgaccgcatcatgaacaccttcagcgtcgtgccctcacccaaggtgtcagacacggtggtggagccctacaacgccacgctgtccatccaccagctggtggagaacacggatgagacctactgcatcgacaacgaggcgctctacgacatctgcttccgcaccctcaagctggccacgcccacctacggggacctcaaccacctggtatcggccaccatgagcggagtcaccacctccttgcgcttcccgggccagctcaacgctgacctgcgcaagctggccgtcaacatggtgcccttcccgcgcctgcacttcttcatgcccggcttcgcccccctcacagcccggggcagccagcagtaccgggccctgaccgtgcccgagctcacccagcagatgttcgatgccaagaacatgatggccgcctgcgacccgcgccacggccgctacctgacggtggccaccgtgttccggggccgcatgtccatgaaggaggtggacgagcagatgctggccatccagagcaagaacagcagctacttcgtggagtggatccccaacaacgtgaaggtggccgtgtgtgacatcccgccccgcggcctcaagatgtcctccaccttcatcgggaacagcacggccatccaggagctgttcaagcgcatctccgagcagttcacggccatgttccggcgcaaggccttcctgcactggtacacgggcgagggcatggacgagatggagttcaccgaggccgagagcaacatgaacgacctggtgtccgagtaccagcagtaccaggacgccacggccgaggaagagggcgagatgtacgaagacgacgaggaggagtcggaggcccagggccccaagtgaagctgctcgcagctggagtgagaggcaggtggcggccggggccgaagccagcagtgtctaaacccccggagccatcttgctgccgacaccctgctttcccctcgccctagggctcccttgccgccctcctgcagtatttatggcctcgtcctccccacctaggccacgtgtgagctgctcctgtctctgtcttattgcagctccaggcctgacgttttacggttttgttttttactggtttgtgtttatattttcggggatacttaataaatctattgctgtcagataccctt

SEQ ID NO: 196030 - DNA, 767 bp, Homo sapiens
  Payload ID: 18682
  Gene Name: tubulin, beta 3 class III
  ENST ID: ENST00000555810
  CDS Start-End: 200-767
cctgtccactctgagatgcctggaagggggctcagtgcagttctgggaagtcatcagtgatgagcatggcatcgaccccagcggcaactacgtgggcgactcggacttgcagctggagcggatcagcgtctactacaacgaggcctcttctcacaagtacgtgcctcgagccattctggtggacctggaacccggaaccatggacagtgtccgctcaggggcctttggacatctcttcaggcctgacaatttcatctttggtcagagtggggccggcaacaactgggccaagggtcactacacggagggggcggagctggtggattcggtcctggatgtggtgcggaaggagtgtgaaaactgcgactgcctgcagggcttccagctgacccactcgctggggggcggcacgggctccggcatgggcacgttgctcatcagcaaggtgcgtgaggagtatcccgaccgcatcatgaacaccttcagcgtcgtgccctcacccaaggtgtcagacacggtggtggagccctacaacgccacgctgtccatccaccagctggtggagaacacggatgagacctactgcatcgacaacgaggcgctctacgacatctgcttccgcaccctcaagctggccacgcccacctacggggacctcaaccacctggtatcggccaccatgagcggagtcaccacctccttgcgcttcccgggccagctcaacgctgacctgcgcaagctggccgtcaacatggtgcccttcccgc

SEQ ID NO: 196031 - DNA, 736 bp, Homo sapiens
  Payload ID: 18682
  Gene Name: tubulin, beta 3 class III
  ENST ID: ENST00000553967
  CDS Start-End: 37-531
gcgcccgtccgcagccgcccgccagacgcgcccagtatgagggagatcgtgcacatccaggccggccagtgcggcaaccagatcggggccaagttctgggaagtcatcagtgatgagcatggcatcgaccccagcggcaactacgtgggcgactcggacttgcagctggagcggatcagcgtctactacaacgaggcctcttctcacaagtacgtgcctcgagccattctggtggacctggaacccggaaccatggacagtgtccgctcaggggcctttggacatctcttcaggcctgacaatttcatctttggtaagttccccctgctccaagctctgatggcagaccccatcacaggcaagcccaggtcggtggacggggacggctgtgagaaacaaggaatggtcagctcctcacatgatcctgaatggtgggaactcatctctccattttacagctgggcattggaggcccagagaaagggttctgtggggagaacagaaaccactcatgcatttcaagtggaatgaagtgtaaagcagacagaagcttacagaattgctagagagctggtgagacagaacggggcctccagaggactccggggtccaggagcacgaggccttgctgcggtcaagagatcaggacgttcccatgcctgtgtcctggggttgggccgtggatgccacgttcccatgtctgtgtcctggggcggggccgtggatgccacgttcc

SEQ ID NO: 196032 - DNA, 903 bp, Homo sapiens
  Payload ID: 18682
  Gene Name: tubulin, beta 3 class III
  ENST ID: ENST00000554336
  CDS Start-End: 49-405
cccggcccgcccgcgcccgtccgcagccgcccgccagacgcgcccagtatgagggagatcgtgcacatccaggccggccagtgcggcaaccagatcggggccaagttctgggaagtcatcagtgatgagcatggcatcgaccccagcggcaactacgtgggcgactcggacttgcagctggagcggatcagcgtctactacaacgaggcctcttctcacaagtacgtgcctcgagccattctggtggacctggaacccggaaccatggacagtgtccgctcaggggcctttggacatctcttcaggcctgacaatttcatctttgctgggcattggaggcccagagaaagggttctgtggggagaacagaaaccactcatgcatttcaagtggaatgaagtgtaaagcagacagaagcttacagaattgctagagagctggtgagacagaacggggcctccagaggactccggggtccaggagcacgaggccttgctgcggtcaagagatcaggacgttcccatgcctgtgtcctggggttgggccgtggatgccacgttcccatgtctgtgtcctggggcggggccgtggatgccacgttcccacgtctgtgtcctggggcggggccgtggatgccacgttcccacgtctgtgtcctggggcggggccgtggatgccacgttcccacgcctgtgtcctggggcggggccgtggatgccacgttcccacgcctgtgtcctggggcggggccgtggatgccacgttcccatgcctgtgtcctggggcggggccgtggatgccacgttcccatgcctgtgtcctggggcggggccgtggatgccacgttcccatgtctgtgtcctggggcggggccgtggacgcgccacagaaacaggagggcct

SEQ ID NO: 196033 - DNA, 1855 bp, Homo sapiens
  Payload ID: 18682
  Gene Name: tubulin, beta 3 class III
  ENST ID: ENST00000555609
  CDS Start-End: 44-211
cccgcccgcgcccgtccgcagccgcccgccagacgcgcccagtatgagggagatcgtgcacatccaggccggccagtgcggcaaccagatcggggccaagttctgggaagtcatcagtgatgagcatggcatcgaccccagcggcaactacgtgggcgactcggacttgcagctggagcggatcagcgtctactacaacgaggcctcttagacagtctcgatatgttgcccaggctggtctcgaactcctggactcaagcgatccacctgccttggcctcccaaagtgttgggagtgcagacacgagcccctgcatctggtggacgtctgactgaatcctgcctgtcctgctccgtcctgtcctgctccgtccttaaacacagtgaggcttaagggtgaagaaagttgctgaagcttgcctttggtccaggactctgacttcagagtacaggctcttaggatctcacaagtacgtgcctcgagccattctggtggacctggaacccggaaccatggacagtgtccgctcaggggcctttggacatctcttcaggcctgacaatttcatctttggtcagagtggggccggcaacaactgggccaagggtcactacacggagggggcggagctggtggattcggtcctggatgtggtgcggaaggagtgtgaaaactgcgactgcctgcagggcttccagctgacccactcgctggggggcggcacgggctccggcatgggcacgttgctcatcagcaaggtgcgtgaggagtatcccgaccgcatcatgaacaccttcagcgtcgtgccctcacccaaggtgtcagacacggtggtggagccctacaacgccacgctgtccatccaccagctggtggagaacacggatgagacctactgcatcgacaacgaggcgctctacgacatctgcttccgcaccctcaagctggccacgcccacctacggggacctcaaccacctggtatcggccaccatgagcggagtcaccacctccttgcgcttcccgggccagctcaacgctgacctgcgcaagctggccgtcaacatggtgcccttcccgcgcctgcacttcttcatgcccggcttcgcccccctcacagcccggggcagccagcagtaccgggccctgaccgtgcccgagctcacccagcagatgttcgatgccaagaacatgatggccgcctgcgacccgcgccacggccgctacctgacggtggccaccgtgttccggggccgcatgtccatgaaggaggtggacgagcagatgctggccatccagagcaagaacagcagctacttcgtggagtggatccccaacaacgtgaaggtggccgtgtgtgacatcccgccccgcggcctcaagatgtcctccaccttcatcgggaacagcacggccatccaggagctgttcaagcgcatctccgagcagttcacggccatgttccggcgcaaggccttcctgcactggtacacgggcgagggcatggacgagatggagttcaccgaggccgagagcaacatgaacgacctggtgtccgagtaccagcagtaccaggacgccacggccgaggaagagggcgagatgtacgaagacgacgaggaggagtcggaggcccagggccccaagtgaagctgctcgcagctggagtgagaggcaggtggcggccggggccgaagccagcagtgtctaaacccccggagccatcttgctgccgacaccctgctttcccctcgccctagggctcccttgccgccctcctgcagtatttatggcctcgtcctccccacctaggccacgtgtgagctgctcctgtctctgtcttattgcagctccag

SEQ ID NO: 196034 - DNA, 925 bp, Homo sapiens
  Payload ID: 18682
  Gene Name: tubulin, beta 3 class III
  ENST ID: ENST00000556536
  CDS Start-End: 61-507
ctcagcagccagcccggcccgcccgcgcccgtccgcagccgcccgccagacgcgcccagtatgagggagatcgtgcacatccaggccggccagtgcggcaaccagatcggggccaagttctgggaagtcatcagtgatgagcatggcatcgaccccagcggcaactacgtgggcgactcggacttgcagctggagcggatcagcgtctactacaacgaggcctcttctcacaagtacgtgcctcgagccattctggtggacctggaacccggaaccatggacagtgtccgctcaggggcctttggacatctcttcaggcctgacaatttcatctttgcacatccagctggtagatgccaactcgcatccagcccccagctgccagggattctggggtggctgtttgggctcctggcactgccagtcggaaggaaggtatgctggagcaggagggctgatccattcacccaggatcccctcaggaggcagagcctcgctctgctgtgaccccaagttctcaagactctgtccagagccctcgtcctgagcactcagcagcatcggctcagggaagccacggcgggtcagagtggggccggcaacaactgggccaagggtcactacacggagggggcggagctggtggattcggtcctggatgtggtgcggaaggagtgtgaaaactgcgactgcctgcagggcttccagctgacccactcgctggggggcggcacgggctccggcatgggcacgttgctcatcagcaaggtgcgtgaggagtatcccgaccgcatcatgaacaccttcagcgtcgtgccctcacccaaggtgtcagacacggtggtggagccctacaacgccacgctgtccatccaccagctggtggagaacacggatgagacctactgcatcgacaacgaggcgc

SEQ ID NO: 196035 - DNA, 806 bp, Homo sapiens
  Payload ID: 18682
  Gene Name: tubulin, beta 3 class III
  ENST ID: ENST00000557490
  CDS Start-End: 58-321
agcagccagcccggcccgcccgcgcccgtccgcagccgcccgccagacgcgcccagtatgagggagatcgtgcacatccaggccggccagtgcggcaaccagatcggggccaagttctgggaagtcatcagtgatgagcatggcatcgaccccagcggcaactacgtgggcgactcggacttgcagctggagcggatcagcgtctactacaacgaggcctcttgctggtctcgaactcctggactcaagcgatccacctgccttggcctcccaaagtgttgggagtgcagacacgagcccctgcatctggtggacgtctgactgaatcctgcctgtcctgctccgtcctgtcctgctccgtccttaaacacagtgaggcttaagggtgaagaaagttgctgaagcttgcctttggtccaggactctgacttcagagtacaggctcttaggatctcacaagtacgtgcctcgagccattctggtggacctggaacccggaaccatggacagtgtccgctcaggggcctttggacatctcttcaggcctgacaatttcatctttggtcagagtggggccggcaacaactgggccaagggtcactacacggagggggcggagctggtggattcggtcctggatgtggtgcggaaggagtgtgaaaactgcgactgcctgcagggcttccagctgacccactcgctggggggcggcacgggctccggcatgggcacgttgctcatcagcaaggtgcgtgaggagtatcccgaccgcatcatgaacaccttcagcgtcgtgccctcaccca

SEQ ID NO: 196036 - DNA, 1978 bp, Homo sapiens
  Payload ID: 18682
  Gene Name: tubulin, beta 3 class III
  Uniprot ID: Q13509
  ENST ID: ENST00000554444
  CDS Start-End: 555-1691
agaactgggagctgcttcctggcagggcccgcctctgctgggagaccggacggtgagtcagccttaagcccggcaccagacccctctgaggatggagcaggagctggctgccctgaggctgcaaaacttcttccctcgtggagacagggaggcacctcagacactcaccccggactcccttgaacagggacagggaggaaccccaggcagctagaccccagcagcagccacacgagcacactgtggggcagggaggggcatctcttgagaacaaaagatccatttctcgactttccaaactggagagcttcttgagagaaaagagagagacaggtacaggtccacgccacccacacacagccctgtgcacacagaccggacacaggcgtccacagttctgggaagtcatcagtgatgagcatggcatcgaccccagcggcaactacgtgggcgactcggacttgcagctggagcggatcagcgtctactacaacgaggcctcttctcacaagtacgtgcctcgagccattctggtggacctggaacccggaaccatggacagtgtccgctcaggggcctttggacatctcttcaggcctgacaatttcatctttggtcagagtggggccggcaacaactgggccaagggtcactacacggagggggcggagctggtggattcggtcctggatgtggtgcggaaggagtgtgaaaactgcgactgcctgcagggcttccagctgacccactcgctggggggcggcacgggctccggcatgggcacgttgctcatcagcaaggtgcgtgaggagtatcccgaccgcatcatgaacaccttcagcgtcgtgccctcacccaaggtgtcagacacggtggtggagccctacaacgccacgctgtccatccaccagctggtggagaacacggatgagacctactgcatcgacaacgaggcgctctacgacatctgcttccgcaccctcaagctggccacgcccacctacggggacctcaaccacctggtatcggccaccatgagcggagtcaccacctccttgcgcttcccgggccagctcaacgctgacctgcgcaagctggccgtcaacatggtgcccttcccgcgcctgcacttcttcatgcccggcttcgcccccctcacagcccggggcagccagcagtaccgggccctgaccgtgcccgagctcacccagcagatgttcgatgccaagaacatgatggccgcctgcgacccgcgccacggccgctacctgacggtggccaccgtgttccggggccgcatgtccatgaaggaggtggacgagcagatgctggccatccagagcaagaacagcagctacttcgtggagtggatccccaacaacgtgaaggtggccgtgtgtgacatcccgccccgcggcctcaagatgtcctccaccttcatcgggaacagcacggccatccaggagctgttcaagcgcatctccgagcagttcacggccatgttccggcgcaaggccttcctgcactggtacacgggcgagggcatggacgagatggagttcaccgaggccgagagcaacatgaacgacctggtgtccgagtaccagcagtaccaggacgccacggccgaggaagagggcgagatgtacgaagacgacgaggaggagtcggaggcccagggccccaagtgaagctgctcgcagctggagtgagaggcaggtggcggccggggccgaagccagcagtgtctaaacccccggagccatcttgctgccgacaccctgctttcccctcgccctagggctcccttgccgccctcctgcagtatttatggcctcgtcctccccacctaggccacgtgtgagctgctcctgtctctgtcttattgcagctccaggcctgacgttttacggttttgttttttactggtttgtgtttatattttcggggatacttaataaatctattgctgtcagat

SEQ ID NO: 196037 - DNA, 888 bp, Homo sapiens
  Payload ID: 18682
  Gene Name: tubulin, beta 3 class III
  ENST ID: ENST00000557262
  CDS Start-End: 58-213
agcagccagcccggcccgcccgcgcccgtccgcagccgcccgccagacgcgcccagtatgagggagatcgtgcacatccaggccggccagtgcggcaaccagatcggggccaagctgtcatgggagcagagtccgagaagcactgcaggcacctgctctagggggagagaggtggaggtggcaggtagagagaggacgacccctgggagctgagacgatgccagcctcacacggacaggctgggtgacctcagttctgggaagtcatcagtgatgagcatggcatcgaccccagcggcaactacgtgggcgactcggacttgcagctggagcggatcagcgtctactacaacgaggcctcttctcacaagtacgtgcctcgagccattctggtggacctggaacccggaaccatggacagtgtccgctcaggggcctttggacatctcttcaggcctgacaatttcatctttgctgggcattggaggcccagagaaagggttctgtggggagaacagaaaccactcatgcatttcaagtggaatgaagtgtaaagcagacagaagcttacagaattgctagagagctggtgagacagaacggggcctccagaggactccggggtccaggagcacgaggccttgctgcggtcaagagatcaggacgttcccatgcctgtgtcctggggttgggccgtggatgccacgttcccatgtctgtgtcctggggcggggccgtggatgccacgttcccacgtctgtgtcctggggcggggccgtggatgccacgttcccacgtctgtgtcctggggcggggccgtggatgccacgttcccacgcctgtgtcctggggcggggccgtggatgccacgttcccacgcctgtgtcct

SEQ ID NO: 196038 - DNA, 550 bp, Homo sapiens
  Payload ID: 18682
  Gene Name: tubulin, beta 3 class III
  ENST ID: ENST00000553656
  CDS Start-End: 65-220
gaccctcagcagccagcccggcccgcccgcgcccgtccgcagccgcccgccagacgcgcccagtatgagggagatcgtgcacatccaggccggccagtgcggcaaccagatcggggccaagctgtcatgggagcagagtccgagaagcactgcaggcacctgctctagggggagagaggtggaggtggcaggtagagagaggacgacccctgggagctgagacgatgccagcctcacacggacaggctgggtgacctcagttctgggaagtcatcagtgatgagcatggcatcgaccccagcggcaactacgtgggcgactcggacttgcagctggagcggatcagcgtctactacaacgaggcctcttctcacaagtacgtgcctcgagccattctggtggacctggaacccggaaccatggacagtgtccgctcaggggcctttggacatctcttcaggcctgacaatttcatctttggtcagagtggggccggcaacaactgggccaagggtcactacacggagggggcggagctggtggattcggt

SEQ ID NO: 196039 - DNA, 566 bp, Homo sapiens
  Payload ID: 18682
  Gene Name: tubulin, beta 3 class III
  ENST ID: ENST00000556565
  CDS Start-End: 428-566
aagcccggcaccagacccctctgaggatggagcaggagctggctgccctgaggctgcaaaacttcttccctcgtggagacagggaggcacctcagacactcaccccggactcccttgaacagggacagggaggaaccccaggcagctagaccccagcagcagccacacgagcacactgtggggcagggaggggcatctcttgagaacaaaagatccatttctcgactttccaaactggagagcttcttgagagaaaagagagagacagttctgggaagtcatcagtgatgagcatggcatcgaccccagcggcaactacgtgggcgactcggacttgcagctggagcggatcagcgtctactacaacgaggcctcttctcacaagtacgtgcctcgagccattctggtggacctggaacccggaaccatggacagtgtccgctcaggggcctttggacatctcttcaggcctgacaatttcatctttggtcagagtggggccggcaacaactgggccaagggtcactacacggagggggcggagctggtggattcggtcctggatg

SEQ ID NO: 196040 - DNA, 572 bp, Homo sapiens
  Payload ID: 18682
  Gene Name: tubulin, beta 3 class III
  ENST ID: ENST00000555576
  CDS Start-End: 58-351
agcagccagcccggcccgcccgcgcccgtccgcagccgcccgccagacgcgcccagtatgagggagatcgtgcacatccaggccggccagtgcggcaaccagatcggggccaagttctgggaagtcatcagtgatgagcatggcatcgaccccagcggcaactacgtgggcgactcggacttgcagctggagcggatcagcgtctactacaacgaggcctcttctcacaagtacgtgcctcgagccattctggtggacctggaacccggaaccatggacagtgtccgctcaggggcctttggacatctcttcaggcctgacaatttcatctttggtccacatctgctttgacagcaaatctggccagctgcaccttcagaacacgcccacagcccagcacccctcatgtctgctgctgcctcgggtcttcctcgtcccgtccgtgcgattgtctcctcactgggctcccacagctgcctggccgctcctcacatgcaatttggcatctgctcccgtgccacgctgtccttcatatcctcttgttatatatgccccgtccacaccacgtccct

SEQ ID NO: 196041 - DNA, 570 bp, Homo sapiens
  Payload ID: 18682
  Gene Name: tubulin, beta 3 class III
  ENST ID: ENST00000625617
  CDS Start-End: 124-570
gacatcagccgatgcgaagggcggggccgcggctataagagcgcgcggccgcggtccccgaccctcagcagccagcccggcccgcccgcgcccgtccgcagccgcccgccagacgcgcccagtatgagggagatcgtgcacatccaggccggccagtgcggcaaccagatcggggccaagttctgggaagtcatcagtgatgagcatggcatcgaccccagcggcaactacgtgggcgactcggacttgcagctggagcggatcagcgtctactacaacgaggcctcttctcacaagtacgtgcctcgagccattctggtggacctggaacccggaaccatggacagtgtccgctcaggggcctttggacatctcttcaggcctgacaatttcatctttgcacatccagctggtagatgccaactcgcatccagcccccagctgccagggattctggggtggctgtttgggctcctggcactgccagtcggaaggaaggtatgctggagcaggagggctgatccattcacccaggatcccctcaggaggcagagcctcgctctgctgtga

SEQ ID NO: 196042 - DNA, 2552 bp, Homo sapiens
  Payload ID: 18683
  Gene Name: tubulin, beta 4A class IVa
  Uniprot ID: P04350
  ENST ID: ENST00000264071
  CDS Start-End: 373-1707
atttctgcgggtggccaagcctggctgggggctgggacgggggagactgcactggtggctccctaaggggcctcacccccaaggcaggggtcggagcacgtggcgtcccggacttctctgggaggccccctggggagggaggtccctgcaccacctccccccaccccagccccctccatcatcccggggcgggaccaaggggcggagcgggagggtgaccggccgtgacgcgtgccccgcccgctcatatagcggctcccgggggcgcagggaccgtgctccgccgtctccgccgcatcttccaccctcgccgccgccgcagctccccgcgctcgtgccaccgccgccgcgtccaccctcagcgccaccgccatgcgggagatcgtgcacctgcaggccggccagtgcggcaaccagatcggggccaagttttgggaggttatcagtgacgaacatggcatcgaccccacaggcacataccatggggacagtgacctgcaactggagaggatcaacgtgtactacaacgaggccacaggaggaaattatgtccccagagcggtgctggtggacctggaacccggcaccatggactctgtccgttctggccccttcggtcagatctttcggccggacaacttcgtgtttggccaatccggagccggcaacaactgggcaaaggggcactacacggagggcgcagagctggtggacgctgtcctggacgtagtccggaaggaggccgagagctgcgactgccttcagggcttccagctgacccactcgctggggggtggcacggggtccggaatgggcacgctgctcatcagtaagatccgcgaggagttcccagaccgcatcatgaacaccttcagcgtggtgccctcgcccaaagtgtcagacacggtggtggagccctacaacgccacgctgtctgtgcaccagctggtggagaatacggatgagacctactgcatcgacaacgaggcactctacgacatctgtttccgcaccctcaagctgaccacccccacctacggggacctcaaccacctggtgtcggccaccatgagcggggtcaccacctgcctgcgcttcccgggccagctgaacgccgacctgcgcaagctggccgtcaacatggttccctttcctcgcctgcacttcttcatgcccggcttcgcacccctgaccagccggggcagccagcagtaccgggccctgacggtgcccgagctcacccagcagatgttcgatgccaagaacatgatggcggcgtgcgacccgcgccacggccgctacctgaccgtggccgccgtgttccggggccgcatgtccatgaaggaggtggacgagcagatgctgagcgtgcagagcaagaacagcagctacttcgtggagtggatccccaacaacgtgaagacggccgtgtgcgacatcccgccccgcggcctgaagatggccgcgaccttcatcggcaacagcacggccatccaggagctgttcaagcgcatctccgagcagttcacggccatgttccggcgcaaggccttcttgcactggtacacgggcgagggcatggacgagatggagttcaccgaggccgagagcaacatgaatgacctggtatctgagtaccagcagtaccaggacgccacggccgaggagggcgagttcgaggaggaggcggaggaggaggtggcctaggctgctcccatcgcttcccacctgtcccctcgaggcttctgacctttgatccgctaggccccccatctctgaaccctagagccccgctttccctccaaggctgactccccgctgaccctaacaatacctttggagctcgctttacctctggctacttcatctccgaccctggctcccctttgagccctaatttatctttaacccccttgagctcttccaaccttgacattcccaggaggagccccgcttcaccccttctgactctggaaaccgcacctttaactttgcagaccttccttcacccctgacttctgcttcacctttgacctctgccccccatgaatcccattttacctctagacctataagttctggtttatgtttgacccctccctctgagctgcacttcaccgctgaccttgcctcacctttaaccccccacctgagccccagctcctacctctgaccccaacttctctttgatctctgaatcccctctgactccaacttctctttcaccctctatgagtcccattttacttctacacctgcaagtcctggtttatattggacccctccctccgagctgcagttcacctttgaccttgcctcacctttcaccccccaccccccacagcgtcagctcctacctctgaccccagcttctctctgattcccacaggccccatgcatcctccctgcctcactcccctcagcccctgccgaccttagcttatctgggagagaaacaaggcctggtgcctgtgaggaagagaggtcacccctaccctccctccccgcttccctgcctcaccctcaataaataaattaattgttgtcatgga

SEQ ID NO: 196043 - DNA, 2224 bp, Homo sapiens
  Payload ID: 18683
  Gene Name: tubulin, beta 4A class IVa
  Uniprot ID: P04350
  ENST ID: ENST00000540257
  CDS Start-End: 82-1416
gccgcatcttccaccctcgccgccgccgcagctccccgcgctcgtgccaccgccgccgcgtccaccctcagcgccaccgccatgcgggagatcgtgcacctgcaggccggccagtgcggcaaccagatcggggccaagttttgggaggttatcagtgacgaacatggcatcgaccccacaggcacataccatggggacagtgacctgcaactggagaggatcaacgtgtactacaacgaggccacaggaggaaattatgtccccagagcggtgctggtggacctggaacccggcaccatggactctgtccgttctggccccttcggtcagatctttcggccggacaacttcgtgtttggccaatccggagccggcaacaactgggcaaaggggcactacacggagggcgcagagctggtggacgctgtcctggacgtagtccggaaggaggccgagagctgcgactgccttcagggcttccagctgacccactcgctggggggtggcacggggtccggaatgggcacgctgctcatcagtaagatccgcgaggagttcccagaccgcatcatgaacaccttcagcgtggtgccctcgcccaaagtgtcagacacggtggtggagccctacaacgccacgctgtctgtgcaccagctggtggagaatacggatgagacctactgcatcgacaacgaggcactctacgacatctgtttccgcaccctcaagctgaccacccccacctacggggacctcaaccacctggtgtcggccaccatgagcggggtcaccacctgcctgcgcttcccgggccagctgaacgccgacctgcgcaagctggccgtcaacatggttccctttcctcgcctgcacttcttcatgcccggcttcgcacccctgaccagccggggcagccagcagtaccgggccctgacggtgcccgagctcacccagcagatgttcgatgccaagaacatgatggcggcgtgcgacccgcgccacggccgctacctgaccgtggccgccgtgttccggggccgcatgtccatgaaggaggtggacgagcagatgctgagcgtgcagagcaagaacagcagctacttcgtggagtggatccccaacaacgtgaagacggccgtgtgcgacatcccgccccgcggcctgaagatggccgcgaccttcatcggcaacagcacggccatccaggagctgttcaagcgcatctccgagcagttcacggccatgttccggcgcaaggccttcttgcactggtacacgggcgagggcatggacgagatggagttcaccgaggccgagagcaacatgaatgacctggtatctgagtaccagcagtaccaggacgccacggccgaggagggcgagttcgaggaggaggcggaggaggaggtggcctaggctgctcccatcgcttcccacctgtcccctcgaggcttctgacctttgatccgctaggccccccatctctgaaccctagagccccgctttccctccaaggctgactccccgctgaccctaacaatacctttggagctcgctttacctctggctacttcatctccgaccctggctcccctttgagccctaatttatctttaacccccttgagctcttccaaccttgacattcccaggaggagccccgcttcaccccttctgactctggaaaccgcacctttaactttgcagaccttccttcacccctgacttctgcttcacctttgacctctgccccccatgaatcccattttacctctagacctataagttctggtttatgtttgacccctccctctgagctgcacttcaccgctgaccttgcctcacctttaaccccccacctgagccccagctcctacctctgactccaacttctctttcaccctctatgagtcccattttacttctacacctgcaagtcctggtttatattggacccctccctccgagctgcagttcacctttgaccttgcctcacctttcaccccccaccccccacagcgtcagctcctacctctgaccccagcttctctctgattcccacaggccccatgcatcctccctgcctcactcccctcagcccctgccgaccttagcttatctgggagagaaacaaggcctggtgcctgtgaggaagagaggtcacccctaccctccctccccgcttccctgcctcaccctcaataaataaattaattgttgtcatg

SEQ ID NO: 196044 - DNA, 548 bp, Homo sapiens
  Payload ID: 18683
  Gene Name: tubulin, beta 4A class IVa
  ENST ID: ENST00000596926
  CDS Start-End: 98-430
gtgctccgccgtctccgccgcatcttccaccctcgccgccgccgcagctccccgcgctcgtgccaccgccgccgcgtccaccctcagcgccaccgccatgcgggagatcgtgcacctgcaggccggccagtgcggcaaccagatcggggccaagttttgggaggttatcagtgacgaacatggcatcgaccccacaggcacataccatggggacagtgacctgcaactggagaggatcaacgtgtactacaacgaggccacaggaggaaattatgtccccagagcggtgctggtggacctggaacccggcaccatggactctgtccgttctggccccttcggtcagatctttcggccggacaacttcgtgtttgtagagacggggtttcaccgtgttagccaggatggtctcgatctcctgacctcgtgatccgcccacctcggcctcccaaagtgctgggattacaggccaatccggagccggcaacaactgggcaaaggggcactacacggagggcgcagagctggtggacgctgtcctggacgta

SEQ ID NO: 196045 - DNA, 1050 bp, Homo sapiens
  Payload ID: 18683
  Gene Name: tubulin, beta 4A class IVa
  ENST ID: ENST00000595324
  CDS Start-End: 98-427
gtgctccgccgtctccgccgcatcttccaccctcgccgccgccgcagctccccgcgctcgtgccaccgccgccgcgtccaccctcagcgccaccgccatgcgggagatcgtgcacctgcaggccggccagtgcggcaaccagatcggggccaagttttgggaggttatcagtgacgaacatggcatcgaccccacaggcacataccatggggacagtgacctgcaactggagaggatcaacgtgtactacaacgaggccacaggaggaaattatgtccccagagcggtgctggtggacctggaacccggcaccatggactctgtccgttctggccccttcggtcagatctttcggccggacaacttcgtgtttggtgagtcccccagcagggagccagaggctggaaaacctccttattcctgctaacaccacagagtcaacagccaccaccggggcccacagaccagagatggggtggacagggcaccaggcaccagccctgcatccagggctgtgatgaggggatgctcaggccactgtgagagccctgaggagggcggatacagagaaggattcagggaagtcttcctggaggaggtggcattttaattcaacggtctgaaccggaaccagactgcctgggtgcacatcccaattctgccacttcatgcattcaacaaacagtgagcactcactgcataccaggccctgttctagaagctggagatccaggccaatccggagccggcaacaactgggcaaaggggcactacacggagggcgcagagctggtggacgctgtcctggacgtagtccggaaggaggccgagagctgcgactgccttcagggcttccagctgacccactcgctggggggtggcacggggtccggaatgggcacgctgctcatcagtaagatccgcgaggagttcccagaccgcatcatgaacaccttcagcgtggtgccctcgcccaaagtgtcagacacggtggtggagccctacaacgccacgctgtctgtgcaccagctggtggagaatacggatgag

SEQ ID NO: 196046 - DNA, 543 bp, Homo sapiens
  Payload ID: 18683
  Gene Name: tubulin, beta 4A class IVa
  ENST ID: ENST00000601640
  CDS Start-End: 221-543
actatgcagcttcaggacaagccctccaggaacctaccgccccccacccgcaaaccagatcgccgctccggagcccccagcccactgggagggctcgcggttactgcaaggattctggcgaatgaggtctaaatagaatgagaaggggggctgcggaccgagaaactgagctccccgcgctcgtgccaccgccgccgcgtccaccctcagcgccaccgccatgcgggagatcgtgcacctgcaggccggccagtgcggcaaccagatcggggccaagttttgggaggttatcagtgacgaacatggcatcgaccccacaggcacataccatggggacagtgacctgcaactggagaggatcaacgtgtactacaacgaggccacaggaggaaattatgtccccagagcggtgctggtggacctggaacccggcaccatggactctgtccgttctggccccttcggtcagatctttcggccggacaacttcgtgtttggccaatccggagccggcaacaactgggcaaaggggcactacacgga

SEQ ID NO: 196047 - DNA, 579 bp, Homo sapiens
  Payload ID: 18683
  Gene Name: tubulin, beta 4A class IVa
  ENST ID: ENST00000594075
  CDS Start-End: 98-579
gtgctccgccgtctccgccgcatcttccaccctcgccgccgccgcagctccccgcgctcgtgccaccgccgccgcgtccaccctcagcgccaccgccatgcgggagatcgtgcacctgcaggccggccagtgcggcaaccagatcggggccaagttttgggaggttatcagtgacgaacatggcatcgaccccacaggcacataccatggggacagtgacctgcaactggagaggatcaacgtgtactacaacgaggccgagagctgcgactgccttcagggcttccagctgacccactcgctggggggtggcacggggtccggaatgggcacgctgctcatcagtaagatccgcgaggagttcccagaccgcatcatgaacaccttcagcgtggtgccctcgcccaaagtgtcagacacggtggtggagccctacaacgccacgctgtctgtgcaccagctggtggagaatacggatgagacctactgcatcgacaacgaggcactctacgacatctgtttccgcaccctcaagctgaccacccccacctacggggacctcaaccacctggtgtcggc

SEQ ID NO: 196048 - DNA, 565 bp, Homo sapiens
  Payload ID: 18683
  Gene Name: tubulin, beta 4A class IVa
  ENST ID: ENST00000598635
  CDS Start-End: 93-565
acccgcaaaccagatcgccgctccggagcccccagcccactgggagggctcgcggttactgcaaggattctggcgaatgaggtctaaatagaatgagaaggggggctgcggaccgagaaactgagcggctcccgggggcgcagggaccgtgctccgccgtctccgccgcatcttccaccctcgccgccgccgcagctccccgcgctcgtgccaccgccgccgcgtccaccctcagcgccaccgccatgcgggagatcgtgcacctgcaggccggccagtgcggcaaccagatcggggccaagttttgggaggttatcagtgacgaacatggcatcgaccccacaggcacataccatggggacagtgacctgcaactggagaggatcaacgtgtactacaacgaggccacaggaggaaattatgtccccagagcggtgctggtggacctggaacccggcaccatggactctgtccgttctggccccttcggtcagatctttcggccggacaacttcgtgtttggccaatccggagccggcaacaactgggcaaaggggcactacac

SEQ ID NO: 196049 - DNA, 530 bp, Homo sapiens
  Payload ID: 18683
  Gene Name: tubulin, beta 4A class IVa
  ENST ID: ENST00000600216
  CDS Start-End: 98-530
gtgctccgccgtctccgccgcatcttccaccctcgccgccgccgcagctccccgcgctcgtgccaccgccgccgcgtccaccctcagcgccaccgccatgcgggagatcgtgcacctgcaggccggccagtgcggcaaccagatcggggccaagttttgggagggcgcagagctggtggacgctgtcctggacgtagtccggaaggaggccgagagctgcgactgccttcagggcttccagctgacccactcgctggggggtggcacggggtccggaatgggcacgctgctcatcagtaagatccgcgaggagttcccagaccgcatcatgaacaccttcagcgtggtgccctcgcccaaagtgtcagacacggtggtggagccctacaacgccacgctgtctgtgcaccagctggtggagaatacggatgagacctactgcatcgacaacgaggcactctacgacatctgtttccgcaccctcaagctgaccacccccacctacggggacctcaaccacctggtgtcgg

SEQ ID NO: 196050 - DNA, 590 bp, Homo sapiens
  Payload ID: 18683
  Gene Name: tubulin, beta 4A class IVa
  ENST ID: ENST00000601152
  CDS Start-End: 127-408
atatagcggctcccgggggcgcagggaccgtgctccgccgtctccgccgcatcttccaccctcgccgccgccgcagctccccgcgctcgtgccaccgccgccgcgtccaccctcagcgccaccgccatgcgggagatcgtgcacctgcaggcacataccatggggacagtgacctgcaactggagaggatcaacgtgtactacaacgaggccacaggaggaaattatgtccccagagcggtgctggtggacctggaacccggcaccatggactctgtccgttctggccccttcggtcagatctttcggccggacaacttcgtgtttggccaatccggagccggcaacaactgggcaaaggggcactacacggagggcgcagagctggtggacgctgtcctggacgtagtccggaaggaggccgagagctgcgactgccttcagggcttccagctgacccactcgctggggggtggcacggggtccggaatgggcacgctgctcatcagtaagatccgcgaggagttcccagaccgcatcatgaacaccttcagcgtggtgccctcgcccaaagtgtcagacacggtggtg

SEQ ID NO: 196051 - DNA, 553 bp, Homo sapiens
  Payload ID: 18683
  Gene Name: tubulin, beta 4A class IVa
  ENST ID: ENST00000594290
  CDS Start-End: 98-409
gtgctccgccgtctccgccgcatcttccaccctcgccgccgccgcagctccccgcgctcgtgccaccgccgccgcgtccaccctcagcgccaccgccatgcgggagatcgtgcacctgcaggccggccagtgcggcaaccagatcggggccaagttttgggaggttatcagtgacgaacatggcatcgaccccacaggcacataccatggggacagtgacctgcaactggagaggatcaacgtgtactacaacgaggccacaggaggaaattatgtccccagagcggtgctggtggacctggaacccggcaccatggactctgtccgttctggccccttcggtcagatctttcggccggacaacttcgtgtttgacagggtctgtctgtcctgctgtcacccaggctagagtgcagtggcatgatcacggctcactgtcacctccacctctgggcacacgtgatcctcttgcctcagtctcccaagtagctggacctacaggccaatccggagccggcaacaactgggcaaaggggcactacacggagggcgc

SEQ ID NO: 196052 - DNA, 545 bp, Homo sapiens
  Payload ID: 18683
  Gene Name: tubulin, beta 4A class IVa
  ENST ID: ENST00000596291
  CDS Start-End: 324-545
cttcttgctgcctcatcctcgccccgacaccatgcctctaggtcccccgttcaccttgctgggggagaggtggcagctagggagctagttgggggctgggggcagtcctcggcttggccaccggcttcccctctctcaactcttccgaccacctctctctctagttttgggaggttatcagtgacgaacatggcatcgaccccacaggcacataccatggggacagtgacctgcaactggagaggatcaacgtgtactacaacgaggccacaggaggaaattatgtccccagagcggtgctggtggacctggaacccggcaccatggactctgtccgttctggccccttcggtcagatctttcggccggacaacttcgtgtttggccaatccggagccggcaacaactgggcaaaggggcactacacggagggcgcagagctggtggacgctgtcctggacgtagtccggaaggaggccgagagctgcgactgccttcagggcttccagctgacccactcgctggggggtggcacggggtccgga

SEQ ID NO: 196053 - DNA, 636 bp, Homo sapiens
  Payload ID: 18683
  Gene Name: tubulin, beta 4A class IVa
  ENST ID: ENST00000597686
  CDS Start-End: 134-636
tgcagcttcaggacaagccctccaggaacctaccgccccccacccgcaaaccagatcgccgctccggagcccccagcccactgggagggctcgcggttactgcaaggattctggcgaatgaggtctaaatagaatgagaaggggggctgcggaccgagaaactgagggaccgtgctccgccgtctccgccgcatcttccaccctcgccgccgccgcagctccccgcgctcgtgccaccgccgccgcgtccaccctcagcgccaccgccatgcgggagatcgtgcacctgcaggccggccagtgcggcaaccagatcggggccaagttttgggaggttatcagtgacgaacatggcatcgaccccacaggcacataccatggggacagtgacctgcaactggagaggatcaacgtgtactacaacgaggccacaggaggaaattatgtccccagagcggtgctggtggacctggaacccggcaccatggactctgtccgttctggccccttcggtcagatctttcggccggacaacttcgtgtttggccaatccggagccggcaacaactgggcaaaggggcactacacggagggcgcagagctggtggacgctgtcctggacgtagtccggaagga

SEQ ID NO: 196054 - DNA, 562 bp, Homo sapiens
  Payload ID: 18683
  Gene Name: tubulin, beta 4A class IVa
  ENST ID: ENST00000594276
  CDS Start-End: 98-562
gtgctccgccgtctccgccgcatcttccaccctcgccgccgccgcagctccccgcgctcgtgccaccgccgccgcgtccaccctcagcgccaccgccatgcgggagatcgtgcacctgcaggccggccagtgcggcaaccagatcggggccaagttttgggaggttatcagtgacgaacatggcatcgaccccacaggcacataccatggggacagtgacctgcaactggagaggatcaacgtgtactacaacgaggagttcccagaccgcatcatgaacaccttcagcgtggtgccctcgcccaaagtgtcagacacggtggtggagccctacaacgccacgctgtctgtgcaccagctggtggagaatacggatgagacctactgcatcgacaacgaggcactctacgacatctgtttccgcaccctcaagctgaccacccccacctacggggacctcaaccacctggtgtcggccaccatgagcggggtcaccacctgcctgcgcttcccgggccagctgaacgccgacctgcgcaagctggccgtcaacatggttccc

SEQ ID NO: 196055 - DNA, 565 bp, Homo sapiens
  Payload ID: 18683
  Gene Name: tubulin, beta 4A class IVa
  ENST ID: ENST00000598006
  CDS Start-End: 126-440
tatagcggctcccgggggcgcagggaccgtgctccgccgtctccgccgcatcttccaccctcgccgccgccgcagctccccgcgctcgtgccaccgccgccgcgtccaccctcagcgccaccgccatgcgggagatcgtgcacctgcaggccggccagtgcggcaaccagatcggggccaaggcacataccatggggacagtgacctgcaactggagaggatcaacgtgtactacaacgaggccacaggaggaaattatgtccccagagcggtgctggtggacctggaacccggcaccatggactctgtccgttctggccccttcggtcagatctttcggccggacaacttcgtgtttggccaatccggagccggcaacaactgggcaaaggggcactacacggagggcgcagagctggtggacgctgtcctggacgtagtccggaaggaggccgagagctgcgactgccttcagggcttccagctgacccactcgctggggggtggcacggggtccggaatgggcacgctgctcatcagtaagatccgcgaggagttcccagac

SEQ ID NO: 196056 - DNA, 1637 bp, Homo sapiens
  Payload ID: 18684
  Gene Name: tubulin, beta 4B class IVb
  Uniprot ID: P68371
  ENST ID: ENST00000340384
  CDS Start-End: 149-1486
gttctggcagcccattccgagactagcggaggcgggcagggagggtatataagcgttggcggagcgtcggttgtagcactctgcgcgcccgctcttctgctgctgtttgtctacttcctcctgcttccccgccgccgccgccgccatcatgagggaaatcgtgcacttgcaggccgggcagtgcggcaaccaaatcggcgccaagttttgggaggtgatcagcgatgagcacggcatcgaccccacgggcacctaccacggggacagcgacctgcagctggaacgcatcaacgtgtactacaatgaggccaccggcggcaagtacgtgccccgcgccgtgctcgtggatctggagcccggcaccatggactccgtgcgctcggggcccttcgggcagatcttccggccggacaacttcgttttcggtcagagtggtgctgggaacaactgggccaaggggcactacacagaaggcgcggagctggtggactcggtgctggatgttgtgagaaaggaggctgagagctgtgactgcctgcagggtttccagctgacccactccctgggtggggggactgggtctgggatgggtaccctcctcatcagcaagatccgggaggagtacccagacaggatcatgaacacgtttagtgtggtgccttcgcccaaagtgtcagacacagtggtggagccctacaacgccaccctctcagtccaccagctcgtagaaaacacagacgagacctactgcattgataacgaagctctctacgacatttgcttcagaaccctaaagctgaccacgcccacctatggtgacctgaaccacctggtgtctgctaccatgagtggggtcaccacctgcctgcgcttcccaggccagctcaatgctgacctgcggaagctggctgtgaacatggtcccgtttccccggctgcacttcttcatgcccggctttgccccactgaccagccggggcagccagcagtaccgggcgctgaccgtgcccgagctcacccagcagatgtttgatgccaagaacatgatggctgcctgcgacccccgccatggccgctacctgacggttgccgccgtgttcaggggccgcatgtccatgaaggaggtggatgagcaaatgcttaatgtccaaaacaaaaacagcagctattttgttgagtggatccccaacaatgtgaaaacggctgtctgtgacatcccacctcgggggctaaaaatgtccgccaccttcattggcaacagcacggccatccaggagctgttcaagcgcatctccgagcagttcacggccatgttccggcgcaaggccttcctgcactggtacacgggcgagggcatggacgagatggagttcaccgaggccgagagcaacatgaatgacctggtgtccgagtaccagcagtaccaggatgccacagccgaggaggagggcgagttcgaggaggaggctgaggaggaggtggcctagagccttcagtcactggggaaagcagggaagcagtgtgaactctttattcactcccagcctgtcctgtggcctgtcccactgtgtgcacttgctgttttccctgtccacatccatgctgtacagacaccaccattaaagcattttcatagtg

SEQ ID NO: 196057 - DNA, 2064 bp, Homo sapiens
  Payload ID: 18685
  Gene Name: tubulin, beta 6 class V
  Uniprot ID: Q9BUF5
  ENST ID: ENST00000317702
  CDS Start-End: 235-1575
ttttccgcccggctcccggcaagggtcccccgactggcgcccgcgcgtcctccctcggctgctgcaggccgggccgcggcgtcgagcgggggcggcggggcggggcccgcagccattggcgagcggcggggcgggggcgggggcgcggagggtcggccccgggacgcgcgcagccggcccgcagttgccgctgtcgtccgcagagccagttcctagcgcagagccgcgcccgccatgagggagatcgtgcacatccaggcgggccagtgcgggaaccagatcggcaccaagttttgggaagtgatcagcgatgagcacggcatcgacccggccggaggctacgtgggagactcggcgctgcagctggagagaatcaacgtctactacaatgagtcatcgtctcagaaatatgtgcccagggccgccctggtggacttagagccaggcaccatggacagcgtgcggtctgggccttttgggcagcttttccggcctgacaacttcatctttggccagacgggtgcagggaacaactgggcgaaagggcactacacggagggcgcggagctggtggacgcagtgctggacgtggtgcggaaggagtgcgagcactgcgactgcctgcagggcttccagctcacgcactcgctgggcggcggcacgggctcaggcatgggcacgctgctcatcagcaagatccgtgaggagttcccggaccgcatcatgaacaccttcagcgtcatgccctcgcccaaggtgtcggacacggtggtggagccctacaatgccacactgtcggtgcaccagctggtggagaatacagacgagacctactgcatcgacaacgaggcgctctatgacatctgcttccgcactctgaagctgacaacgcccacctacggggacctcaaccacctggtgtccgccaccatgagtggggtcaccacctcgctgcgcttcccgggccagctcaatgctgacctgcgcaagctggcggtgaacatggtgcccttcccgcgcctgcacttcttcatgcctggcttcgcgccgctcaccagccgcggcagccagcagtaccgggccctgaccgtgcccgagctcacccagcagatgttcgacgccaggaacatgatggccgcctgcgatccgcgccatggccgctacctgaccgtggccaccgtgttccgcgggcccatgtccatgaaggaggtggacgagcagatgctggccatccagagtaagaacagcagctacttcgtggagtggattcccaacaacgtgaaggtggccgtgtgcgacatcccgccccgcggcctgaagatggcctccaccttcatcggcaacagcacggccatccaggagctgttcaagcgcatctccgagcagttctcagccatgttccggcgcaaggccttcctgcactggttcacgggtgagggcatggatgaaatggagttcaccgaggcggagagcaacatgaacgacctggtatccgagtaccagcagtaccaggatgccaccgccaatgacggggaggaagcttttgaggatgaggaagaggagatcgatggatagtcggaatagagccgccccaactcagatcctacaacacgcaagttccttcttgaaccctggtgcctcctaccctatggccctgaatggtgcactggtttaattgtgttggtgtcggcccctcacaaatgcagccaagtcatgtaattagtcatctggaacaaagactaaaaacagcagagaattgcgggttctacccagtcagaagatcacaccatggagactttctactagaggacttgaaagagaactgaggggccacaaaataaacttcaccttccattaagtgttcaagcatgtctgcaaattaggagggagttagaaacagtctttttcatcctttgtgatgaagcctgaaattgtgccgtgttgccttatatgaatatgcagtatgggactttgaaataatgattcataataaaatactaaacgtgtgtcttcatctctctagccatgtgcataaatgacgtaagttactttgtatggttacaa

SEQ ID NO: 196058 - DNA, 1017 bp, Homo sapiens
  Payload ID: 18685
  Gene Name: tubulin, beta 6 class V
  ENST ID: ENST00000591909
  CDS Start-End: 60-374
ggcccgcagttgccgctgtcgtccgcagagccagttcctagcgcagagccgcgcccgccatgagggagatcgtgcacatccaggcgggccagtgcgggaaccagatcggcaccaagttttgggaagtgatcagcgatgagcacggcatcgacccggccggaggctacgtgggagactcggcgctgcagctggagagaatcaacgtctactacaatgagtcatcgtctcagaaatatgtgcccagggccgccctggtggacttagagccaggcaccatggacagcgtgcggtctgggccttttgggcagcttttccggcctgacaacttcatctttgcccatctgcacaggggaactgaggagaaacaggaatgaagagtgggcgacaaagagaaagcatcccttcccacacgccaagagtccagtgcaacgatccctgccacacggtcagccgaccccacttggtgccacagggtccagcctcggccactctgggctcaacctttccagcacgtctgggagcccaatgaggctatgggacagtgtgcatttccctcaaggcctccggaaagtcacctgccacccactgtgacctctgaggctgaaaggactaaggactcctttccccatcatttcagctgggccagtggctggctaaaatcagcgcagcattcccattcttctgaaagccacagctgaaataatgcaccagctgaaaccacagtggacagactgagatggcctccctctgggcctctagttggcaactttctcacccgggggctcctctttctccttttcccgctccttgttccagtccttaaggccttctggaagtgaggtgtcctcatccaagctgccagtgccttccacaaattcttcataggtagatttttccgcaaatggtctggggcccaaaagttcaaccatatcattcttatctaatacttctttttctaacaacagaagagcaacctgaaatatgaacaattttcattaaatacagttactcagcaaa

SEQ ID NO: 196059 - DNA, 430 bp, Homo sapiens
  Payload ID: 18685
  Gene Name: tubulin, beta 6 class V
  ENST ID: ENST00000590967
  CDS Start-End: 41-388
cgtccgcagagccagttcctagcgcagagccgcgcccgccatgagggagatcgtgcacatccaggcgggccagtgcgggaaccagatcggcaccaagttttgggaagtgatcagcgatgagcacggcatcgacccggccggaggctacgtgggagactcggcgctgcagctggagagaatcaacgtctactacaatgagtcatcgtctcagaaatatgtgcccagggccgccctggtggacttagagccaggcaccatggacagcgtgcggtctgggccttttgggcagcttttccggcctgacaacttcatctttgtcacattcctaagagccacaggagccgggacagtgtcaacttctgctcaccacattgcaacccccgcttgaagacagagcagacaacgaaacatcagaacgaacggacccatg

SEQ ID NO: 196060 - DNA, 359 bp, Homo sapiens
  Payload ID: 18685
  Gene Name: tubulin, beta 6 class V
  ENST ID: ENST00000586691
  CDS Start-End: 1-95
ccctggtggacttagagccaggcaccatggacagcgtgcggtctgggccttttgggcagcttttccggcctgacaacttcatctttggagtgtagcttgcttcttgagtgactgcagcgagcatctgctcacccatgcactggctgcctagtgcagctaccctgcttcacctttaaaagcgggtctgcgtgctccagataccagccggcaaccgcatggcctgcttcgtggtatgccacagtcttcttctcctcaggctgcagaacctgcgttttcttctctaagcctaacaaaataacaacaaaaaaacccaagccattgttacagtgacactgacattaaaagacagttatacagtg

SEQ ID NO: 196061 - DNA, 524 bp, Homo sapiens
  Payload ID: 18685
  Gene Name: tubulin, beta 6 class V
  ENST ID: ENST00000590693
  CDS Start-End: 133-524
actttagctaaacccggttccaaaggggtgggagtcgtcggagaggaatggcctctgtatctccggagacggaaacaccaggacgaagaggccctaagaacagccagttcctagcgcagagccgcgcccgccatgagggagatcgtgcacatccaggcgggccagtgcgggaaccagatcggcaccaagttttgggaagtgatcagcgatgagcacggcatcgacccggccggaggctacgtgggagactcggcgctgcagctggagagaatcaacgtctactacaatgagtcatcgtctcagaaatatgtgcccagggccgccctggtggacttagagccaggcaccatggacagcgtgcggtctgggccttttgggcagcttttccggcctgacaacttcatctttggccagacgggtgcagggaacaactgggcgaaagggcactacacggagggcgcggagctggtggacgcagtgctggacgtggtgcggaaggagtgcgagcactgcgactgcctgca

SEQ ID NO: 196062 - DNA, 1492 bp, Homo sapiens
  Payload ID: 18685
  Gene Name: tubulin, beta 6 class V
  ENST ID: ENST00000591208
  CDS Start-End: 32-442
agccagttcctagcgcagagccgcgcccgccatgagggagatcgtgcacatccaggcgggccagtgcgggaaccagatcggcaccaagttttgggaagtgatcagcgatgagcacggcatcgacccggccggaggctacgtgggagactcggcgctgcagctggagagaatcaacgtctactacaatgagtcatcgtctcagaaatatgtgcccagggccgccctggtggacttagagccaggcaccatggacagcgtgcggtctgggccttttgggcagcttttccggcctgacaacttcatctttggccagacgggtgcagggaacaactgggcgaaaggggcttccagctcacgcactcgctgggcggcggcacgggctcaggcatgggcacgctgctcatcagcaagatccgtgaggagttcccggaccgcatcatgaacaccttcagcgtcatgccctcgcccaaggtgtcggacacggtggtggagccctacaatgccacactgtcggtgcaccagctggtggagaatacagacgagacctactgcatcgacaacgaggcgctctatgacatctgcttccgcactctgaagctgacaacgcccacctacggggacctcaaccacctggtgtccgccaccatgagtggggtcaccacctcgctgcgcttcccgggccagctcaatgctgacctgcgcaagctggcggtgaacatggtgcccttcccgcgcctgcacttcttcatgcctggcttcgcgccgctcaccagccgcggcagccagcagtaccgggccctgaccgtgcccgagctcacccagcagatgttcgacgccaggaacatgatggccgcctgcgatccgcgccatggccgctacctgaccgtggccaccgtgttccgcgggcccatgtccatgaaggaggtggacgagcagatgctggccatccagagtaagaacagcagctacttcgtggagtggattcccaacaacgtgaaggtggccgtgtgcgacatcccgccccgcggcctgaagatggcctccaccttcatcggcaacagcacggccatccaggagctgttcaagcgcatctccgagcagttctcagccatgttccggcgcaaggccttcctgcactggttcacgggtgagggcatggatgaaatggagttcaccgaggcggagagcaacatgaacgacctggtatccgagtaccagcagtaccaggatgccaccgccaatgacggggaggaagcttttgaggatgaggaagaggagatcgatggatagtcggaatagagccgccccaactcagatcctacaacacgcaagttccttcttgaaccctggtgcctcctaccctatggccctgaatggtgcactggtttaattgtgttggtgtcggcccctcacaaatgcagccaagtcatgtaattagtcatctggaacaaagactaaaaacagcagagaattgcgggttctacccagtcag

SEQ ID NO: 196063 - DNA, 1493 bp, Homo sapiens
  Payload ID: 18685
  Gene Name: tubulin, beta 6 class V
  ENST ID: ENST00000586810
  CDS Start-End: 53-478
agttgccgctgtcgtccgcagagccagttcctagcgcagagccgcgcccgccatgagggagatcgtgcacatccaggcgggccagtgcgggaaccagatcggcaccaagttttgggaagtgatcagcgatgagcacggcatcgacccggccggaggctacgtgggagactcggcgctgcagctggagagaatcaacgtctactacaatgagtcatcgtctcagaaatatgtgcccagggccgccctggtggacttagagccaggcaccatggacagcgtgcggtctgggccttttgggcagcttttccggcctgacaacttcatctttggtatgttcaggcagacgcatatatttacacacatacaatggagccagctgtatacactgtttagtaccctagtgttcctccctggctccccagcaacgtattttgaagatctttccatttcacaagtatggctgcctcattcctgttgatggctgatagtatcctctgcagagataccgccgtggatttaaccagtcttcagttgatagaattacctctttaacatggaacaaccaggtcaaaatgtatatacatctttaaaattgaccagtagctactttgacttgcctaaaaacgtaccagtgcatctgctcagctgcaccgttggtgggtgcctgtttccccggcccctccctttggctaacagcacatcatggaatcacttcacaccctccttgtcggtgaccaagcatggtgatggcgcagccctttcctgtttaaacggcacgggactctctttgttgcaggccagacgggtgcagggaacaactgggcgaaagggcactacacggagggcgcggagctggtggacgcagtgctggacgtggtgcggaaggagtgcgagcactgcgactgcctgcagggcttccagctcacgcactcgctgggcggcggcacgggctcaggcatgggcacgctgctcatcagcaagatccgtgaggagttcccggaccgcatcatgaacaccttcagcgtcatgccctcgcccaaggtgtcggacacggtggtggagccctacaatgccacactgtcggtgcaccagctggtggagaatacagacgagacctactgcatcgacaacgaggcgctctatgacatctgcttccgcactctgaagctgacaacgcccacctacggggacctcaaccacctggtgtccgccaccatgagtggggtcaccacctcgctgcgcttcccgggccagctcaatgctgacctgcgcaagctggcggtgaacatggtgcccttcccgcgcctgcacttcttcatgcctggcttcgcgccgctcaccagccgcggcagccagcagtaccgggccctgaccgtgcccgagctcacccagcagatgttcgacgccaggaacatgatggccgcctgcgatccgcgccatggccgctacctgaccgtggccaccgtgttccgcgggcccatgtccatgaagga

SEQ ID NO: 196064 - DNA, 481 bp, Homo sapiens
  Payload ID: 18685
  Gene Name: tubulin, beta 6 class V
  ENST ID: ENST00000592683
  CDS Start-End: 47-361
cgctgtcgtccgcagagccagttcctagcgcagagccgcgcccgccatgagggagatcgtgcacatccaggcgggccagtgcgggaaccagatcggcaccaagttttgggaagtgatcagcgatgagcacggcatcgacccggccggaggctacgtgggagactcggcgctgcagctggagagaatcaacgtctactacaatgagtcatcgtctcagaaatatgtgcccagggccgccctggtggacttagagccaggcaccatggacagcgtgcggtctgggccttttgggcagcttttccggcctgacaacttcatctttgcacatcatggaatcacttcacaccctccttgtcggtgaccaagcatggtgatggcgcagccctttcctgtttaaacggcacgggactctctttgttgcaggccagacgggtgcagggaacaactgggcgaaagggcactacacggagggcgcggagct

SEQ ID NO: 196065 - DNA, 576 bp, Homo sapiens
  Payload ID: 18685
  Gene Name: tubulin, beta 6 class V
  ENST ID: ENST00000590388
  CDS Start-End: 53-385
agttgccgctgtcgtccgcagagccagttcctagcgcagagccgcgcccgccatgagggagatcgtgcacatccaggcgggccagtgcgggaaccagatcggcaccaagttttgggaagtgatcagcgatgagcacggcatcgacccggccggaggctacgtgggagactcggcgctgcagctggagagaatcaacgtctactacaatgagtcatcgtctcagaaatatgtgcccagggccgccctggtggacttagagccaggcaccatggacagcgtgcggtctgggccttttgggcagcttttccggcctgacaacttcatctttgcaacgtattttgaagatctttccatttcacaagtatggctgcctcattcctgttgatggctgatagtatcctctgcagagataccgccgtggatttaaccagtcttcagttgataggccagacgggtgcagggaacaactgggcgaaagggcactacacggagggcgcggagctggtggacgcagtgctggacgtggtgcggaaggagtgcgagcactgcgactgcctgcagggcttccagctcacg

SEQ ID NO: 196066 - DNA, 485 bp, Homo sapiens
  Payload ID: 18685
  Gene Name: tubulin, beta 6 class V
  ENST ID: ENST00000591463
  CDS Start-End: 138-485
gccagttcctagcgcagagccgcgcccgccatgagggagatcgtgcacatccaggcgggccagtgcgggaaccagatcggcaccaagctcagaaatatgtgcccagggccgccctggtggacttagagccaggcaccatggacagcgtgcggtctgggccttttgggcagcttttccggcctgacaacttcatctttggccagacgggtgcagggaacaactgggcgaaagggcactacacggagggcgcggagctggtggacgcagtgctggacgtggtgcggaaggagtgcgagcactgcgactgcctgcagggcttccagctcacgcactcgctgggcggcggcacgggctcaggcatgggcacgctgctcatcagcaagatccgtgaggagttcccggaccgcatcatgaacaccttcagcgtcatgccctcgcccaaggtgtcggacacggtggtggagccctacaatgccacactgtcg

SEQ ID NO: 196067 - DNA, 1075 bp, Homo sapiens
  Payload ID: 18685
  Gene Name: tubulin, beta 6 class V
  ENST ID: ENST00000590103
  CDS Start-End: 62-1075
ccggcccgcagttgccgctgtcgtccgcagagccagttcctagcgcagagccgcgcccgccatgagggagatcgtgcacatccaggcgggccagtgcgggaaccagatcggcaccaagttttgggaagtgatcagcgatgagcacggcatcgacccggccggaggctacgtgggagactcggcgctgcagctggagagaatcaacgtctactacaatgagtcatcgtgccagacgggtgcagggaacaactgggcgaaagggcactacacggagggcgcggagctggtggacgcagtgctggacgtggtgcggaaggagtgcgagcactgcgactgcctgcagggcttccagctcacgcactcgctgggcggcggcacgggctcaggcatgggcacgctgctcatcagcaagatccgtgaggagttcccggaccgcatcatgaacaccttcagcgtcatgccctcgcccaaggtgtcggacacggtggtggagccctacaatgccacactgtcggtgcaccagctggtggagaatacagacgagacctactgcatcgacaacgaggcgctctatgacatctgcttccgcactctgaagctgacaacgcccacctacggggacctcaaccacctggtgtccgccaccatgagtggggtcaccacctcgctgcgcttcccgggccagctcaatgctgacctgcgcaagctggcggtgaacatggtgcccttcccgcgcctgcacttcttcatgcctggcttcgcgccgctcaccagccgcggcagccagcagtaccgggccctgaccgtgcccgagctcacccagcagatgttcgacgccaggaacatgatggccgcctgcgatccgcgccatggccgctacctgaccgtggccaccgtgttccgcgggcccatgtccatgaaggaggtggacgagcagatgctggccatccagagtaagaacagcagctacttcgtggagtggattcccaacaacgtgaaggtggccgtgtgcgacatcccgccccgcggcctgaagatggcctccaccttcatcggcaacagcacggccatccag

SEQ ID NO: 196068 - DNA, 788 bp, Homo sapiens
  Payload ID: 18685
  Gene Name: tubulin, beta 6 class V
  ENST ID: ENST00000586653
  CDS Start-End: 53-343
agttgccgctgtcgtccgcagagccagttcctagcgcagagccgcgcccgccatgagggagatcgtgcacatccaggcgggccagtgcgggaaccagatcggcaccaagttttgggaagtgatcagcgatgagcacggcatcgacccggccggaggctacgtgggagactcggcgctgcagctggagagaatcaacgtctactacaatgagtcatcgtctcagaaatatgtgcccagggccgccctggtggacttagagccaggcaccatggacagcgtgcggtctgggccttttgggcagcttttccggcctgacaacttcatctttgaattacctctttaacatggaacaaccaggtcaaaatgtatatacatctttaaaattgaccagtagctactttgacttgcctaaaaacgtaccagtgcatctgctcagctgcaccgttggtgggtgcctgtttccccggcccctccctttggctaacagcacatcatggaatcacttcacaccctccttgtcggtgaccaagcatggtgatggcgcagccctttcctgtttaaacggcacgggactctctttgttgcaggccagacgggtgcagggaacaactgggcgaaagggcactacacggagggcgcggagctggtggacgcagtgctggacgtggtgcggaaggagtgcgagcactgcgactgcctgcagggcttccagctcacgcactcgctgggcggcggcacgggctcaggcatgggcacgctgctcatcagcaagatccgtgaggagttcc

SEQ ID NO: 196069 - DNA, 1413 bp, Homo sapiens
  Payload ID: 18686
  Gene Name: tubulin, beta 8 class VIII
  ENST ID: ENST00000561967
  CDS Start-End: 56-415
gcgcgtctgctcctccttctcacgtttctcctgccgtcctaatcccgccttggccatgagggagatcgtgctcacgcagatcgggcagtgcgggaatcagatcggcgccaagttctgggaggtgatctctgatgaacatgccatcgactccgctggcacctaccacggggacagccacctgcagctggagcgcatcaacgtgtactacaacgaggccagcggtggcaggtacgtgccccgcgctgtgctcgtggatctggagccgggcaccatggactctgtgcgctcggggcccttcgggcaggtcttcaggccagacaacttcatcttcgtgaccggctgtgctgtcttacaggtcagtgtggggccggaaacaactgggccaagggacactacaccgaaggcgcggagctgatggagtcagtgatggacgttgtcagaaaggaggctgagagctgtgactgcctgcagggtttccagctgacccactccctgggtggggggactgggtctgggatgggtacccttctgctcagtaagatccgggaggagtacccagacaggatcataaacacattcagcatcctgccctcgcccaaggtgtcggacaccgtggtggagccctacaacgccaccctctcagtccaccagctcatagaaaacgcagatgagaccttttgcatagataacgaagctctgtatgacatatgttccaagaccctaaaactgcccacacccacctatggtgacctgaaccacctggtgtctgctaccatgagtggggtcaccacgtgcctgcgcttcccgggccagctgaatgctgacctgcggaagctggccgtgaacatggtcccgtttccccggctgcatttcttcatgcccggctttgccccactgaccagccggggcagccagcagtaccgggccttgactgtggctgagcttacccagcagatgtttgatgctaagaacatgatggctgcctgtgacccccgtcacggccgctacctaacggcggctgccattttcaggggtcgcatgcccatgagggaggtggatgaacaaatgttcaacattcaagataagaacagcagttactttgctgactggctccccaacaacgtaaaaacagccgtctgtgacatcccaccccgggggctaaaaatgtcagccaccttcattgggaataatacggccatccaggaactcttcaagcgtgtctcagagcagtttacagcaatgttcaggcgcaaggccttcctccactggtacacgggcgagggcatggatgagatggaattcaccgaggccgagagcaacatgaacgacctggtgtctgaatatcagcaatatcaggatgccacggccgaggaggaggaggatgaggagtatgccgaggaggaggtggcctag

SEQ ID NO: 196070 - DNA, 1061 bp, Homo sapiens
  Payload ID: 18686
  Gene Name: tubulin, beta 8 class VIII
  ENST ID: ENST00000567466
  CDS Start-End: 134-403
cttactaaagacgcgggaggaagttctccagcgagcagctttccccaacgtggaaaggaccacgcaaggacacctgagctttccaacagatgttcagcgccaggggatccacagttctgggaggtgatctctgatgaacatgccatcgactccgctggcacctaccacggggacagccacctgcagctggagcgcatcaacgtgtactacaacgaggccagcggtggcaggtacgtgccccgcgctgtgctcgtggatctggagccgggcaccatggactctgtgcgctcggggcccttcgggcaggtcttcaggccagacaacttcatcttcggtgagctgcgggcgaggactggggtgcggctccttagccagggcagctcaaaatccaggagtgtgctaaggtcatcctctgggaactgtggagctagggcccctgaacaccctcctatcctccgagtcgagtcgctcaatctgcctctcctaaatgggcttcgggaggaaggccctggtgtctcctcaaggtcagtgtggggccggaaacaactgggccaagggacactacaccgaaggcgcggagctgatggagtcagtgatggacgttgtcagaaaggaggctgagagctgtgactgcctgcagggtttccagctgacccactccctgggtggggggactgggtctgggatgggtacccttctgctcagtaagatccgggaggagtacccagacaggatcataaacacattcagcatcctgccctcgcccaaggtgtcggacaccgtggtggagccctacaacgccaccctctcagtccaccagctcatagaaaacgcagatgagaccttttgcatagataacgaagctctgtatgacatatgttccaagaccctaaaactgcccacacccacctatggtgacctgaaccacctggtgtctgctaccatgagtggggtcaccacgtgcctgcgcttcccgggccagctgaatgctgacctgcggaagctggccgtgaacatggtcccgtttccccggctgcatttcttcatgcccggctttgccc

SEQ ID NO: 196071 - DNA, 1790 bp, Homo sapiens
  Payload ID: 18686
  Gene Name: tubulin, beta 8 class VIII
  Uniprot ID: Q3ZCM7
  ENST ID: ENST00000568584
  CDS Start-End: 352-1686
atggaaacaagagtcttcccctcccacatgggaggaaaattcagtttcagctcagctagggatttagtcttactaaagacgcgggaggaagttctccagcgagcagctttccccaacgtggaaaggaccacgcaaggacacctgagctttccaacagatgttcagcgccaggggatccacaggtgggtgcacctgtgtggaagtaaagctgttgcttattctgggagccgaatccgaggcggagggaggtgggcgcggggctatttaaacgttggcggagggcgggctgggtcgctgcgcgtctgctcctccttctcacgtttctcctgccgtcctaatcccgccttggccatgagggagatcgtgctcacgcagatcgggcagtgcgggaatcagatcggcgccaagttctgggaggtgatctctgatgaacatgccatcgactccgctggcacctaccacggggacagccacctgcagctggagcgcatcaacgtgtactacaacgaggccagcggtggcaggtacgtgccccgcgctgtgctcgtggatctggagccgggcaccatggactctgtgcgctcggggcccttcgggcaggtcttcaggccagacaacttcatcttcggtcagtgtggggccggaaacaactgggccaagggacactacaccgaaggcgcggagctgatggagtcagtgatggacgttgtcagaaaggaggctgagagctgtgactgcctgcagggtttccagctgacccactccctgggtggggggactgggtctgggatgggtacccttctgctcagtaagatccgggaggagtacccagacaggatcataaacacattcagcatcctgccctcgcccaaggtgtcggacaccgtggtggagccctacaacgccaccctctcagtccaccagctcatagaaaacgcagatgagaccttttgcatagataacgaagctctgtatgacatatgttccaagaccctaaaactgcccacacccacctatggtgacctgaaccacctggtgtctgctaccatgagtggggtcaccacgtgcctgcgcttcccgggccagctgaatgctgacctgcggaagctggccgtgaacatggtcccgtttccccggctgcatttcttcatgcccggctttgccccactgaccagccggggcagccagcagtaccgggccttgactgtggctgagcttacccagcagatgtttgatgctaagaacatgatggctgcctgtgacccccgtcacggccgctacctaacggcggctgccattttcaggggtcgcatgcccatgagggaggtggatgaacaaatgttcaacattcaagataagaacagcagttactttgctgactggctccccaacaacgtaaaaacagccgtctgtgacatcccaccccgggggctaaaaatgtcagccaccttcattgggaataatacggccatccaggaactcttcaagcgtgtctcagagcagtttacagcaatgttcaggcgcaaggccttcctccactggtacacgggcgagggcatggatgagatggaattcaccgaggccgagagcaacatgaacgacctggtgtctgaatatcagcaatatcaggatgccacggccgaggaggaggaggatgaggagtatgccgaggaggaggtggcctagaactctccttttctaggtaaaggggggaagcagtgtggattctttactgtgttctgacagccatgtgtcactatacgcttgttaatttgtgtcttcacatctcc

SEQ ID NO: 196072 - DNA, 820 bp, Homo sapiens
  Payload ID: 18686
  Gene Name: tubulin, beta 8 class VIII
  ENST ID: ENST00000562809
  CDS Start-End: 32-259
tttctcctgccgtcctaatcccgccttggccatgagggagatcgtgctcacgcagatcgggcagtgcgggaatcagatcggcgccaaggtggcaggtacgtgccccgcgctgtgctcgtggatctggagccgggcaccatggactctgtgcgctcggggcccttcgggcaggtcttcaggccagacaacttcatcttcggtcagtgtggggccggaaacaactgggccaagggacactacaccgaaggcgcggagctgatggagtcagtgatggacgttgtcagaaaggaggctgagagctgtgactgcctgcagggtttccagctgacccactccctgggtggggggactgggtctgggatgggtacccttctgctcagtaagatccgggaggagtacccagacaggatcataaacacattcagcatcctgccctcgcccaaggtgtcggacaccgtggtggagccctacaacgccaccctctcagtccaccagctcatagaaaacgcagatgagaccttttgcatagataacgaagctctgtatgacatatgttccaagaccctaaaactgcccacacccacctatggtgacctgaaccacctggtgtctgctaccatgagtggggtcaccacgtgcctgcgcttcccgggccagctgaatgctgacctgcggaagctggccgtgaacatggtcccgtttccccggctgcatttcttcatgcccggctttgccccactgaccagccggggcagccagcagtaccgggccttgactgtggctgagcttacccagcagatgtttgatgctaagaacatga

SEQ ID NO: 196073 - DNA, 1367 bp, Homo sapiens
  Payload ID: 18686
  Gene Name: tubulin, beta 8 class VIII
  ENST ID: ENST00000568866
  CDS Start-End: 40-1263
ttctcacgtttctcctgccgtcctaatcccgccttggccatgagggagatcgtgctcacgcagatcgggcagtgcgggaatcagatcggcgccaagttctgggaggtgatctctgatgaacatgccatcgactccgctggcacctaccacggggacagccacctgcagctggagcgcatcaacgtgtactacaacgaggccagcggtcagtgtggggccggaaacaactgggccaagggacactacaccgaaggcgcggagctgatggagtcagtgatggacgttgtcagaaaggaggctgagagctgtgactgcctgcagggtttccagctgacccactccctgggtggggggactgggtctgggatgggtacccttctgctcagtaagatccgggaggagtacccagacaggatcataaacacattcagcatcctgccctcgcccaaggtgtcggacaccgtggtggagccctacaacgccaccctctcagtccaccagctcatagaaaacgcagatgagaccttttgcatagataacgaagctctgtatgacatatgttccaagaccctaaaactgcccacacccacctatggtgacctgaaccacctggtgtctgctaccatgagtggggtcaccacgtgcctgcgcttcccgggccagctgaatgctgacctgcggaagctggccgtgaacatggtcccgtttccccggctgcatttcttcatgcccggctttgccccactgaccagccggggcagccagcagtaccgggccttgactgtggctgagcttacccagcagatgtttgatgctaagaacatgatggctgcctgtgacccccgtcacggccgctacctaacggcggctgccattttcaggggtcgcatgcccatgagggaggtggatgaacaaatgttcaacattcaagataagaacagcagttactttgctgactggctccccaacaacgtaaaaacagccgtctgtgacatcccaccccgggggctaaaaatgtcagccaccttcattgggaataatacggccatccaggaactcttcaagcgtgtctcagagcagtttacagcaatgttcaggcgcaaggccttcctccactggtacacgggcgagggcatggatgagatggaattcaccgaggccgagagcaacatgaacgacctggtgtctgaatatcagcaatatcaggatgccacggccgaggaggaggaggatgaggagtatgccgaggaggaggtggcctagaactctccttttctaggtaaaggggggaagcagtgtggattctttactgtgttctgacagccatgtgtcactatacgcttgttaatttgtgtcttcacatctcc

SEQ ID NO: 196074 - DNA, 2438 bp, Homo sapiens
  Payload ID: 18686
  Gene Name: tubulin, beta 8 class VIII
  ENST ID: ENST00000564130
  CDS Start-End: 1041-2273
gaaccgcacggcggcgtcctggggggtccactgtgaggacggggggtccactgtgaggacggggggtccaccgtgaggacggagcttcctctcctcagcacccacccaggaggggccggggcttgggacacctggggccgcgtccgctgtgaggacagggagacgctgctgcagctccgggacaccgaggcaaaagggtaaatcttttcaagacactaaaacaggtgactcagccctgtgagctttgtgcctgacatgactcaaatggccagcaattttctccttctccagttaaacctgtccaaaattgaggaacctatccaggtgagaactggccactctaatttacccggaagcctttctgcaggagattcaaatatttgctaatgcttactgacaccttcactggttagatcgaggcattccccaccccatctgaaaaatgtttaccagaagaaataactcctcagtttgggtaatccaaaagcctgcaaagtgacaatggcccatctttcacagcaggcgtatcccaaaacctgtcctcagctttaagaatccaatatgaccttcactctgctggagaccacagtcctctggaaaggtgaaagggctaaccctactctaaagaagactccagctaaatcagaggcctgactgtctctaacacccatagcttattgtgggttagaactgctccaaagtaaaacgtataattgagtcctgttgagttcacatgtggaaggcctttcctaaccacagatctcctaatagatgaaaagactcatcaattacaaaaatatgtcatcaatctaggacaggtgcaaaggcactccgtgcatatggaaacaagagtcttcccctcccacatgggaggaaaattcagtttcagctcagctagggatttagtcttactaaagacgcgggaggaagttctccagcgagcagctttccccaacgtggaaaggaccacgcaaggacacctgagctttccaacagatgttcagcgccaggggatccacagttctgggaggtgatctctgatgaacatgccatcgactccgctggcacctaccacggggacagccacctgcagctggagcgcatcaacgtgtactacaacgaggccagcggtgagacccccgtccttcccccaccgccctcctgggaacgcggccctcccctcgctcatgccctcccgccccacgcaggtggcaggtcagtgtggggccggaaacaactgggccaagggacactacaccgaaggcgcggagctgatggagtcagtgatggacgttgtcagaaaggaggctgagagctgtgactgcctgcagggtttccagctgacccactccctgggtggggggactgggtctgggatgggtacccttctgctcagtaagatccgggaggagtacccagacaggatcataaacacattcagcatcctgccctcgcccaaggtgtcggacaccgtggtggagccctacaacgccaccctctcagtccaccagctcatagaaaacgcagatgagaccttttgcatagataacgaagctctgtatgacatatgttccaagaccctaaaactgcccacacccacctatggtgacctgaaccacctggtgtctgctaccatgagtggggtcaccacgtgcctgcgcttcccgggccagctgaatgctgacctgcggaagctggccgtgaacatggtcccgtttccccggctgcatttcttcatgcccggctttgccccactgaccagccggggcagccagcagtaccgggccttgactgtggctgagcttacccagcagatgtttgatgctaagaacatgatggctgcctgtgacccccgtcacggccgctacctaacggcggctgccattttcaggggtcgcatgcccatgagggaggtggatgaacaaatgttcaacattcaagataagaacagcagttactttgctgactggctccccaacaacgtaaaaacagccgtctgtgacatcccaccccgggggctaaaaatgtcagccaccttcattgggaataatacggccatccaggaactcttcaagcgtgtctcagagcagtttacagcaatgttcaggcgcaaggccttcctccactggtacacgggcgagggcatggatgagatggaattcaccgaggccgagagcaacatgaacgacctggtgtctgaatatcagcaatatcaggatgccacggccgaggaggaggaggatgaggagtatgccgaggaggaggtggcctagaactctccttttctaggtaaaggggggaagcagtgtggattctttactgtgttctgacagccatgtgtcactatacgcttgttaatttgtgtcttcacatctcctgctgcgttttaaagcatttttatagtatgcggttttgactaataaagtattctcacagca

SEQ ID NO: 196075 - DNA, 2670 bp, Homo sapiens
  Payload ID: 18687
  Gene Name: tubulin, beta class I
  Uniprot ID: P07437
  ENST ID: ENST00000327892
  CDS Start-End: 307-1641
gtacatgaccggcatcgactaatcagggccaggctcgatgaggctttgtctccctaccgcgcgcggggccgattctcccgcctcccagccccggcgcacgcgcgccccgcccagcctgctttccctccgcgccctcccctctcctttctccctctcagaaccttcctgccgtcgcgtttgcacctcgctgctccagcctctggggcgcattccaaccttccagcctgcgacctgcggagaaaaaaaattacttattttcttgccccatacataccttgaggcgagcaaaaaaattaaattttaaccatgagggaaatcgtgcacatccaggctggtcagtgtggcaaccagatcggtgccaagttctgggaggtgatcagtgatgaacatggcatcgaccccaccggcacctaccacggggacagcgacctgcagctggaccgcatctctgtgtactacaatgaagccacaggtggcaaatatgttcctcgtgccatcctggtggatctagaacctgggaccatggactctgttcgctcaggtccttttggccagatctttagaccagacaactttgtatttggtcagtctggggcaggtaacaactgggccaaaggccactacacagagggcgccgagctggttgattctgtcctggatgtggtacggaaggaggcagagagctgtgactgcctgcagggcttccagctgacccactcactgggcgggggcacaggctctggaatgggcactctccttatcagcaagatccgagaagaataccctgatcgcatcatgaataccttcagtgtggtgccttcacccaaagtgtctgacaccgtggtcgagccctacaatgccaccctctccgtccatcagttggtagagaatactgatgagacctattgcattgacaacgaggccctctatgatatctgcttccgcactctgaagctgaccacaccaacctacggggatctgaaccaccttgtctcagccaccatgagtggtgtcaccacctgcctccgtttccctggccagctcaatgctgacctccgcaagttggcagtcaacatggtccccttcccacgtctccatttctttatgcctggctttgcccctctcaccagccgtggaagccagcagtatcgagctctcacagtgccggaactcacccagcaggtcttcgatgccaagaacatgatggctgcctgtgacccccgccacggccgatacctcaccgtggctgctgtcttccgtggtcggatgtccatgaaggaggtcgatgagcagatgcttaacgtgcagaacaagaacagcagctactttgtggaatggatccccaacaatgtcaagacagccgtctgtgacatcccacctcgtggcctcaagatggcagtcaccttcattggcaatagcacagccatccaggagctcttcaagcgcatctcggagcagttcactgccatgttccgccggaaggccttcctccactggtacacaggcgagggcatggacgagatggagttcaccgaggctgagagcaacatgaacgacctcgtctctgagtatcagcagtaccaggatgccaccgcagaagaggaggaggatttcggtgaggaggccgaagaggaggcctaaggcagagcccccatcacctcaggcttctcagttcccttagccgtcttactcaactgcccctttcctctccctcagaatttgtgtttgctgcctctatcttgttttttgttttttcttctggggggggtctagaacagtgcctggcacatagtaggcgctcaataaatacttgtttgttgaatgtctcctctctctttccactctgggaaacctaggtttctgccattctgggtgaccctgtatttctttctggtgcccattccatttgtccagttaatacttcctcttaaaaatctccaagaagctgggtctccagatcccatttagaaccaaccaggtgctgaaaacacatgtagataatggccatcatcctaagcccaaagtagaaaatggtagaaggtagtgggtagaagtcactatataaggaaggggatgggattttccattctaaaagttttggagagggaaatccaggctattaaagtcactaaatttctaagtatgtccatttcccatctcagcttcaagggaggtgtcagcagtattatctccactttcaatctccctccaagctctactctggaggagtctgtcccactctgtcaagtggaatccttccctttccaactctacctccctcactcagctcctttcccctgatcagagaaagggatcaagggggttgggaggggggaaagagaccagccttggtccctaagcctccagaaacgtcttcttaatccccaccttttcttactcccaaaaaagaatgaacacccctgactctggagtggtgtatactgccacatcagtgtttgagtcagtccccagaggagaggggaaccctcctccatcttttttgcaacatctcatttcttccttttgctgttgcttcccccctcacacacttggttttgttctatcctacatttgagatttctattttatgttgaacttgctgctttttttcatattgaaaagatgacatcgccccaagagccaaaaataaatgggaattgaaaaaagctg

SEQ ID NO: 196076 - DNA, 2632 bp, Homo sapiens
  Payload ID: 18687
  Gene Name: tubulin, beta class I
  ENST ID: ENST00000330914
  CDS Start-End: 485-1603
cgcgtgcgccgcagtcacgtggagggcggggggggtggtcgactgcggcggcagctctttcctcagacccccagccttttgtgcgccgcgcggtggggcggtgcccagcttgggggaaggagagcggcgcttatcgaagtgtggtcgacctccatccgcccaccgagcacttgggacccgctgcacatatccagagcagggaaagctgtggctttctcgggggagcgagtgtctaggggaagggtgtggcaggcccacgggatgccatgccctagaacaacggcctgagcgcttgtggaattaaaatgggagatgtggggccgagttctgggaggtgatcagtgatgaacatggcatcgaccccaccggcacctaccacggggacagcgacctgcagctggaccgcatctctgtgtactacaatgaagccacaggtggcaaatatgttcctcgtgccatcctggtggatctagaacctgggaccatggactctgttcgctcaggtccttttggccagatctttagaccagacaactttgtatttggtcagtctggggcaggtaacaactgggccaaaggccactacacagagggcgccgagctggttgattctgtcctggatgtggtacggaaggaggcagagagctgtgactgcctgcagggcttccagctgacccactcactgggcgggggcacaggctctggaatgggcactctccttatcagcaagatccgagaagaataccctgatcgcatcatgaataccttcagtgtggtgccttcacccaaagtgtctgacaccgtggtcgagccctacaatgccaccctctccgtccatcagttggtagagaatactgatgagacctattgcattgacaacgaggccctctatgatatctgcttccgcactctgaagctgaccacaccaacctacggggatctgaaccaccttgtctcagccaccatgagtggtgtcaccacctgcctccgtttccctggccagctcaatgctgacctccgcaagttggcagtcaacatggtccccttcccacgtctccatttctttatgcctggctttgcccctctcaccagccgtggaagccagcagtatcgagctctcacagtgccggaactcacccagcaggtcttcgatgccaagaacatgatggctgcctgtgacccccgccacggccgatacctcaccgtggctgctgtcttccgtggtcggatgtccatgaaggaggtcgatgagcagatgcttaacgtgcagaacaagaacagcagctactttgtggaatggatccccaacaatgtcaagacagccgtctgtgacatcccacctcgtggcctcaagatggcagtcaccttcattggcaatagcacagccatccaggagctcttcaagcgcatctcggagcagttcactgccatgttccgccggaaggccttcctccactggtacacaggcgagggcatggacgagatggagttcaccgaggctgagagcaacatgaacgacctcgtctctgagtatcagcagtaccaggatgccaccgcagaagaggaggaggatttcggtgaggaggccgaagaggaggcctaaggcagagcccccatcacctcaggcttctcagttcccttagccgtcttactcaactgcccctttcctctccctcagaatttgtgtttgctgcctctatcttgttttttgttttttcttctggggggggtctagaacagtgcctggcacatagtaggcgctcaataaatacttgtttgttgaatgtctcctctctctttccactctgggaaacctaggtttctgccattctgggtgaccctgtatttctttctggtgcccattccatttgtccagttaatacttcctcttaaaaatctccaagaagctgggtctccagatcccatttagaaccaaccaggtgctgaaaacacatgtagataatggccatcatcctaagcccaaagtagaaaatggtagaaggtagtgggtagaagtcactatataaggaaggggatgggattttccattctaaaagttttggagagggaaatccaggctattaaagtcactaaatttctaagtatgtccatttcccatctcagcttcaagggaggtgtcagcagtattatctccactttcaatctccctccaagctctactctggaggagtctgtcccactctgtcaagtggaatccttccctttccaactctacctccctcactcagctcctttcccctgatcagagaaagggatcaagggggttgggaggggggaaagagaccagccttggtccctaagcctccagaaacgtcttcttaatccccaccttttcttactcccaaaaaagaatgaacacccctgactctggagtggtgtatactgccacatcagtgtttgagtcagtccccagaggagaggggaaccctcctccatcttttttgcaacatctcatttcttccttttgctgttgcttcccccctcacacacttggttttgttctatcctacatttgagatttctattttatgttgaacttgctgctttttttcatattgaaaagatgacatcgccccaagagccaaaaataaatgggaattgaaaaaagctg

SEQ ID NO: 196077 - DNA, 2671 bp, Homo sapiens
  Payload ID: 18687
  Gene Name: tubulin, beta class I
  Uniprot ID: P07437
  ENST ID: ENST00000383564
  CDS Start-End: 307-1641
gtacatgaccggcatcgactaatcagggccaggctcgatgaggctttgtctccctaccgcgcgcggggccgattctcccgcctcccagccccggcgcacgcgcgccccgcccagcctgctttccctccgcgccctcccctctcctttctccctctcagaaccttcctgccgtcgcgtttgcacctcgctgctccagcctctggggcgcattccaaccttccagcctgcgacctgcggagaaaaaaaattacttattttcttgccccatacataccttgaggcgagcaaaaaaattaaattttaaccatgagggaaatcgtgcacatccaggctggtcagtgtggcaaccagatcggtgccaagttctgggaggtgatcagtgatgaacatggcatcgaccccaccggcacctaccacggggacagcgacctgcagctggaccgcatctctgtgtactacaatgaagccacaggtggcaaatatgttcctcgtgccatcctggtggatctagaacctgggaccatggactctgttcgctcaggtccttttggccagatctttagaccagacaactttgtatttggtcagtctggggcaggtaacaactgggccaaaggccactacacagagggcgccgagctggttgattctgtcctggatgtggtacggaaggaggcagagagctgtgactgcctgcagggcttccagctgacccactcactgggcgggggcacaggctctggaatgggcactctccttatcagcaagatccgagaagaataccctgatcgcatcatgaataccttcagtgtggtgccttcacccaaagtgtctgacaccgtggtcgagccctacaatgccaccctctccgtccatcagttggtagagaatactgatgagacctattgcattgacaacgaggccctctatgatatctgcttccgcactctgaagctgaccacaccaacctacggggatctgaaccaccttgtctcagccaccatgagtggtgtcaccacctgcctccgtttccctggccagctcaatgctgacctccgcaagttggcagtcaacatggtccccttcccacgtctccatttctttatgcctggctttgcccctctcaccagccgtggaagccagcagtatcgagctctcacagtgccggaactcacccagcaggtcttcgatgccaagaacatgatggctgcctgtgacccccgccacggccgatacctcaccgtggctgctgtcttccgtggtcggatgtccatgaaggaggtcgatgagcagatgcttaacgtgcagaacaagaacagcagctactttgtggaatggatccccaacaatgtcaagacagccgtctgtgacatcccacctcgtggcctcaagatggcagtcaccttcattggcaatagcacagccatccaggagctcttcaagcgcatctcggagcagttcactgccatgttccgccggaaggccttcctccactggtacacaggcgagggcatggacgagatggagttcaccgaggctgagagcaacatgaacgacctcgtctctgagtatcagcagtaccaggatgccaccgcagaagaggaggaggatttcggtgaggaggccgaagaggaggcctaaggcagagcccccatcacctcaggcttctcagttcccttagccgtcttactcaactgcccctttcctctccctcagaatttgtgtttgctgcctctatcttgttttttgttttttcttctgggggggggtctagaacagtgcctggcacatagtaggcgctcaataaatacttgtttgttgaatgtctcctctctctttccactctgggaaacctaggtttctgccattctgggtgaccctgtatttctttctggtgcccattccatttgtccagttaatacttcctcttaaaaatctccaagaagctgggtctccagatcccatttagaaccaaccaggtgctgaaaacacatgtagataatggccatcatcctaagcccaaagtagaaaatggtagaaggtagtgggtagaagtcactatataaggaaggggatgggattttccattctaaaagttttggagagggaaatccaggctattaaagtcactaaatttctaagtatgtccatttcccatctcagcttcaagggaggtgtcagcagtattatctccactttcaatctccctccaagctctactctggaggagtctgtcccactctgtcaagtggaatccttccctttccaactctacctccctcactcagctcctttcccctgatcagagaaagggatcaagggggttgggaggggggaaagagaccagccttggtccctaagcctccagaaacgtcttcttaatccccaccttttcttactcccaaaaaagaatgaacacccctgactctggagtggtgtatactgccacatcagtgtttgagtcagtccccagaggagaggggaaccctcctccatcttttttgcaacatctcatttcttccttttgctgttgcttcccccctcacacacttggttttgttctatcctacatttgagatttctattttatgttgaacttgctgctttttttcatattgaaaagatgacatcgccccaagagccaaaaataaatgggaattgaaaaaagctg

SEQ ID NO: 196078 - DNA, 2823 bp, Homo sapiens
  Payload ID: 18687
  Gene Name: tubulin, beta class I
  ENST ID: ENST00000396384
  CDS Start-End: 676-1794
ggcgcttatcgaagtgtggtcgacctccatccgcccaccgagcacttgggacccgctgcacatatccagagcagggaaagctgtggctttctcgggggagcgagtgtctaggggaagggtgtggcaggcccacgggatgccatgccctagaacaacggcctgagcgcttgtggaattaaaatgggagatgtggggccgaggtgggcgaattgggatccctccaggtcaggggttcgagaccatcctgggcaacaaagcgagaccctcccccatgccacgtttctacaaaaaataaaagtaaaaaattagctgggcgtggtggcgcgcgtctgtggtcccagctactcgagaggctgagatgggaggatcggttgagcctgggagttccacgctgtagtcatccgtgattgcaccactgcactgcaggctgggcaacaggaagaccctgtcttaaaaattagaagaagctgggcgcggtggctcacccttgtaatcccagcactttgggaggccaagttctgggaggtgatcagtgatgaacatggcatcgaccccaccggcacctaccacggggacagcgacctgcagctggaccgcatctctgtgtactacaatgaagccacaggtggcaaatatgttcctcgtgccatcctggtggatctagaacctgggaccatggactctgttcgctcaggtccttttggccagatctttagaccagacaactttgtatttggtcagtctggggcaggtaacaactgggccaaaggccactacacagagggcgccgagctggttgattctgtcctggatgtggtacggaaggaggcagagagctgtgactgcctgcagggcttccagctgacccactcactgggcgggggcacaggctctggaatgggcactctccttatcagcaagatccgagaagaataccctgatcgcatcatgaataccttcagtgtggtgccttcacccaaagtgtctgacaccgtggtcgagccctacaatgccaccctctccgtccatcagttggtagagaatactgatgagacctattgcattgacaacgaggccctctatgatatctgcttccgcactctgaagctgaccacaccaacctacggggatctgaaccaccttgtctcagccaccatgagtggtgtcaccacctgcctccgtttccctggccagctcaatgctgacctccgcaagttggcagtcaacatggtccccttcccacgtctccatttctttatgcctggctttgcccctctcaccagccgtggaagccagcagtatcgagctctcacagtgccggaactcacccagcaggtcttcgatgccaagaacatgatggctgcctgtgacccccgccacggccgatacctcaccgtggctgctgtcttccgtggtcggatgtccatgaaggaggtcgatgagcagatgcttaacgtgcagaacaagaacagcagctactttgtggaatggatccccaacaatgtcaagacagccgtctgtgacatcccacctcgtggcctcaagatggcagtcaccttcattggcaatagcacagccatccaggagctcttcaagcgcatctcggagcagttcactgccatgttccgccggaaggccttcctccactggtacacaggcgagggcatggacgagatggagttcaccgaggctgagagcaacatgaacgacctcgtctctgagtatcagcagtaccaggatgccaccgcagaagaggaggaggatttcggtgaggaggccgaagaggaggcctaaggcagagcccccatcacctcaggcttctcagttcccttagccgtcttactcaactgcccctttcctctccctcagaatttgtgtttgctgcctctatcttgttttttgttttttcttctggggggggtctagaacagtgcctggcacatagtaggcgctcaataaatacttgtttgttgaatgtctcctctctctttccactctgggaaacctaggtttctgccattctgggtgaccctgtatttctttctggtgcccattccatttgtccagttaatacttcctcttaaaaatctccaagaagctgggtctccagatcccatttagaaccaaccaggtgctgaaaacacatgtagataatggccatcatcctaagcccaaagtagaaaatggtagaaggtagtgggtagaagtcactatataaggaaggggatgggattttccattctaaaagttttggagagggaaatccaggctattaaagtcactaaatttctaagtatgtccatttcccatctcagcttcaagggaggtgtcagcagtattatctccactttcaatctccctccaagctctactctggaggagtctgtcccactctgtcaagtggaatccttccctttccaactctacctccctcactcagctcctttcccctgatcagagaaagggatcaagggggttgggaggggggaaagagaccagccttggtccctaagcctccagaaacgtcttcttaatccccaccttttcttactcccaaaaaagaatgaacacccctgactctggagtggtgtatactgccacatcagtgtttgagtcagtccccagaggagaggggaaccctcctccatcttttttgcaacatctcatttcttccttttgctgttgcttcccccctcacacacttggttttgttctatcctacatttgagatttctattttatgttgaacttgctgctttttttcatattgaaaagatgacatcgccccaagagccaaaaataaatgggaattgaaaaaagctg

SEQ ID NO: 196079 - DNA, 2903 bp, Homo sapiens
  Payload ID: 18687
  Gene Name: tubulin, beta class I
  ENST ID: ENST00000396389
  CDS Start-End: 594-1874
tggggcggtgcccagcttgggggaaggagagcggcgcttatcgaagtgtggtcgacctccatccgcccaccgagcacttgggacccgctgcacatatccagagcagggaaagctgtggctttctcgggggagcgagtgtctaggggaagggtgtggcaggcccacgggatgccatgccctagaacaacggcctgagcgcttgtggaattaaaatgggagatgtggggccgaggtgggcgaattgggatccctccaggtcaggggttcgagaccatcctgggcaacaaagcgagaccctcccccatgccacgtttctacaaaaaataaaagtaaaaaattagctgggcgtggtggcgcgcgtctgtggtcccagctactcgagaggctgagatgggaggatcggttgagcctgggagttccacgctgtagtcatccgtgattgcaccactgcactgcaggctgggcaacaggaagaccctgtcttaaaaattagaagaagctgggcgcggtggctcacccttgtaatcccagcactttgggaggccaaggtgggcggatcacgaggtcaagagatctagaccatcctggccaacatgttctgggaggtgatcagtgatgaacatggcatcgaccccaccggcacctaccacggggacagcgacctgcagctggaccgcatctctgtgtactacaatgaagccacaggtggcaaatatgttcctcgtgccatcctggtggatctagaacctgggaccatggactctgttcgctcaggtccttttggccagatctttagaccagacaactttgtatttggtcagtctggggcaggtaacaactgggccaaaggccactacacagagggcgccgagctggttgattctgtcctggatgtggtacggaaggaggcagagagctgtgactgcctgcagggcttccagctgacccactcactgggcgggggcacaggctctggaatgggcactctccttatcagcaagatccgagaagaataccctgatcgcatcatgaataccttcagtgtggtgccttcacccaaagtgtctgacaccgtggtcgagccctacaatgccaccctctccgtccatcagttggtagagaatactgatgagacctattgcattgacaacgaggccctctatgatatctgcttccgcactctgaagctgaccacaccaacctacggggatctgaaccaccttgtctcagccaccatgagtggtgtcaccacctgcctccgtttccctggccagctcaatgctgacctccgcaagttggcagtcaacatggtccccttcccacgtctccatttctttatgcctggctttgcccctctcaccagccgtggaagccagcagtatcgagctctcacagtgccggaactcacccagcaggtcttcgatgccaagaacatgatggctgcctgtgacccccgccacggccgatacctcaccgtggctgctgtcttccgtggtcggatgtccatgaaggaggtcgatgagcagatgcttaacgtgcagaacaagaacagcagctactttgtggaatggatccccaacaatgtcaagacagccgtctgtgacatcccacctcgtggcctcaagatggcagtcaccttcattggcaatagcacagccatccaggagctcttcaagcgcatctcggagcagttcactgccatgttccgccggaaggccttcctccactggtacacaggcgagggcatggacgagatggagttcaccgaggctgagagcaacatgaacgacctcgtctctgagtatcagcagtaccaggatgccaccgcagaagaggaggaggatttcggtgaggaggccgaagaggaggcctaaggcagagcccccatcacctcaggcttctcagttcccttagccgtcttactcaactgcccctttcctctccctcagaatttgtgtttgctgcctctatcttgttttttgttttttcttctggggggggtctagaacagtgcctggcacatagtaggcgctcaataaatacttgtttgttgaatgtctcctctctctttccactctgggaaacctaggtttctgccattctgggtgaccctgtatttctttctggtgcccattccatttgtccagttaatacttcctcttaaaaatctccaagaagctgggtctccagatcccatttagaaccaaccaggtgctgaaaacacatgtagataatggccatcatcctaagcccaaagtagaaaatggtagaaggtagtgggtagaagtcactatataaggaaggggatgggattttccattctaaaagttttggagagggaaatccaggctattaaagtcactaaatttctaagtatgtccatttcccatctcagcttcaagggaggtgtcagcagtattatctccactttcaatctccctccaagctctactctggaggagtctgtcccactctgtcaagtggaatccttccctttccaactctacctccctcactcagctcctttcccctgatcagagaaagggatcaagggggttgggaggggggaaagagaccagccttggtccctaagcctccagaaacgtcttcttaatccccaccttttcttactcccaaaaaagaatgaacacccctgactctggagtggtgtatactgccacatcagtgtttgagtcagtccccagaggagaggggaaccctcctccatcttttttgcaacatctcatttcttccttttgctgttgcttcccccctcacacacttggttttgttctatcctacatttgagatttctattttatgttgaacttgctgctttttttcatattgaaaagatgacatcgccccaagagccaaaaataaatgggaattgaaaaaagctg

SEQ ID NO: 196080 - DNA, 2824 bp, Homo sapiens
  Payload ID: 18687
  Gene Name: tubulin, beta class I
  ENST ID: ENST00000400530
  CDS Start-End: 676-1794
ggcgcttatcgaagtgtggtcgacctccatccgcccaccgagcacttgggacccgctgcacatatccagagcagggaaagctgtggctttctcgggggagcgagtgtctaggggaagggtgtggcaggcccacgggatgccatgccctagaacaacggcctgagcgcttgtggaattaaaatgggagatgtggggccgaggtgggcgaattgggatccctccaggtcaggggttcgagaccatcctgggcaacaaagcgagaccctcccccatgccacgtttctacaaaaaataaaagtaaaaaattagctgggcgtggtggcgcgcgtctgtggtcccagctactcgagaggctgagatgggaggatcggttgagcctgggagttccacgctgtagtcatccgtgattgcaccactgcactgcaggctgggcaacaggaagaccctgtcttaaaaattagaagaagctgggcgcggtggctcacccttgtaatcccagcactttgggaggccaagttctgggaggtgatcagtgatgaacatggcatcgaccccaccggcacctaccacggggacagcgacctgcagctggaccgcatctctgtgtactacaatgaagccacaggtggcaaatatgttcctcgtgccatcctggtggatctagaacctgggaccatggactctgttcgctcaggtccttttggccagatctttagaccagacaactttgtatttggtcagtctggggcaggtaacaactgggccaaaggccactacacagagggcgccgagctggttgattctgtcctggatgtggtacggaaggaggcagagagctgtgactgcctgcagggcttccagctgacccactcactgggcgggggcacaggctctggaatgggcactctccttatcagcaagatccgagaagaataccctgatcgcatcatgaataccttcagtgtggtgccttcacccaaagtgtctgacaccgtggtcgagccctacaatgccaccctctccgtccatcagttggtagagaatactgatgagacctattgcattgacaacgaggccctctatgatatctgcttccgcactctgaagctgaccacaccaacctacggggatctgaaccaccttgtctcagccaccatgagtggtgtcaccacctgcctccgtttccctggccagctcaatgctgacctccgcaagttggcagtcaacatggtccccttcccacgtctccatttctttatgcctggctttgcccctctcaccagccgtggaagccagcagtatcgagctctcacagtgccggaactcacccagcaggtcttcgatgccaagaacatgatggctgcctgtgacccccgccacggccgatacctcaccgtggctgctgtcttccgtggtcggatgtccatgaaggaggtcgatgagcagatgcttaacgtgcagaacaagaacagcagctactttgtggaatggatccccaacaatgtcaagacagccgtctgtgacatcccacctcgtggcctcaagatggcagtcaccttcattggcaatagcacagccatccaggagctcttcaagcgcatctcggagcagttcactgccatgttccgccggaaggccttcctccactggtacacaggcgagggcatggacgagatggagttcaccgaggctgagagcaacatgaacgacctcgtctctgagtatcagcagtaccaggatgccaccgcagaagaggaggaggatttcggtgaggaggccgaagaggaggcctaaggcagagcccccatcacctcaggcttctcagttcccttagccgtcttactcaactgcccctttcctctccctcagaatttgtgtttgctgcctctatcttgttttttgttttttcttctgggggggggtctagaacagtgcctggcacatagtaggcgctcaataaatacttgtttgttgaatgtctcctctctctttccactctgggaaacctaggtttctgccattctgggtgaccctgtatttctttctggtgcccattccatttgtccagttaatacttcctcttaaaaatctccaagaagctgggtctccagatcccatttagaaccaaccaggtgctgaaaacacatgtagataatggccatcatcctaagcccaaagtagaaaatggtagaaggtagtgggtagaagtcactatataaggaaggggatgggattttccattctaaaagttttggagagggaaatccaggctattaaagtcactaaatttctaagtatgtccatttcccatctcagcttcaagggaggtgtcagcagtattatctccactttcaatctccctccaagctctactctggaggagtctgtcccactctgtcaagtggaatccttccctttccaactctacctccctcactcagctcctttcccctgatcagagaaagggatcaagggggttgggaggggggaaagagaccagccttggtccctaagcctccagaaacgtcttcttaatccccaccttttcttactcccaaaaaagaatgaacacccctgactctggagtggtgtatactgccacatcagtgtttgagtcagtccccagaggagaggggaaccctcctccatcttttttgcaacatctcatttcttccttttgctgttgcttcccccctcacacacttggttttgttctatcctacatttgagatttctattttatgttgaacttgctgctttttttcatattgaaaagatgacatcgccccaagagccaaaaataaatgggaattgaaaaaagctg

SEQ ID NO: 196081 - DNA, 2633 bp, Homo sapiens
  Payload ID: 18687
  Gene Name: tubulin, beta class I
  ENST ID: ENST00000400531
  CDS Start-End: 485-1603
cgcgtgcgccgcagtcacgtggagggcggggggggtggtcgactgcggcggcagctctttcctcagacccccagccttttgtgcgccgcgcggtggggcggtgcccagcttgggggaaggagagcggcgcttatcgaagtgtggtcgacctccatccgcccaccgagcacttgggacccgctgcacatatccagagcagggaaagctgtggctttctcgggggagcgagtgtctaggggaagggtgtggcaggcccacgggatgccatgccctagaacaacggcctgagcgcttgtggaattaaaatgggagatgtggggccgagttctgggaggtgatcagtgatgaacatggcatcgaccccaccggcacctaccacggggacagcgacctgcagctggaccgcatctctgtgtactacaatgaagccacaggtggcaaatatgttcctcgtgccatcctggtggatctagaacctgggaccatggactctgttcgctcaggtccttttggccagatctttagaccagacaactttgtatttggtcagtctggggcaggtaacaactgggccaaaggccactacacagagggcgccgagctggttgattctgtcctggatgtggtacggaaggaggcagagagctgtgactgcctgcagggcttccagctgacccactcactgggcgggggcacaggctctggaatgggcactctccttatcagcaagatccgagaagaataccctgatcgcatcatgaataccttcagtgtggtgccttcacccaaagtgtctgacaccgtggtcgagccctacaatgccaccctctccgtccatcagttggtagagaatactgatgagacctattgcattgacaacgaggccctctatgatatctgcttccgcactctgaagctgaccacaccaacctacggggatctgaaccaccttgtctcagccaccatgagtggtgtcaccacctgcctccgtttccctggccagctcaatgctgacctccgcaagttggcagtcaacatggtccccttcccacgtctccatttctttatgcctggctttgcccctctcaccagccgtggaagccagcagtatcgagctctcacagtgccggaactcacccagcaggtcttcgatgccaagaacatgatggctgcctgtgacccccgccacggccgatacctcaccgtggctgctgtcttccgtggtcggatgtccatgaaggaggtcgatgagcagatgcttaacgtgcagaacaagaacagcagctactttgtggaatggatccccaacaatgtcaagacagccgtctgtgacatcccacctcgtggcctcaagatggcagtcaccttcattggcaatagcacagccatccaggagctcttcaagcgcatctcggagcagttcactgccatgttccgccggaaggccttcctccactggtacacaggcgagggcatggacgagatggagttcaccgaggctgagagcaacatgaacgacctcgtctctgagtatcagcagtaccaggatgccaccgcagaagaggaggaggatttcggtgaggaggccgaagaggaggcctaaggcagagcccccatcacctcaggcttctcagttcccttagccgtcttactcaactgcccctttcctctccctcagaatttgtgtttgctgcctctatcttgttttttgttttttcttctgggggggggtctagaacagtgcctggcacatagtaggcgctcaataaatacttgtttgttgaatgtctcctctctctttccactctgggaaacctaggtttctgccattctgggtgaccctgtatttctttctggtgcccattccatttgtccagttaatacttcctcttaaaaatctccaagaagctgggtctccagatcccatttagaaccaaccaggtgctgaaaacacatgtagataatggccatcatcctaagcccaaagtagaaaatggtagaaggtagtgggtagaagtcactatataaggaaggggatgggattttccattctaaaagttttggagagggaaatccaggctattaaagtcactaaatttctaagtatgtccatttcccatctcagcttcaagggaggtgtcagcagtattatctccactttcaatctccctccaagctctactctggaggagtctgtcccactctgtcaagtggaatccttccctttccaactctacctccctcactcagctcctttcccctgatcagagaaagggatcaagggggttgggaggggggaaagagaccagccttggtccctaagcctccagaaacgtcttcttaatccccaccttttcttactcccaaaaaagaatgaacacccctgactctggagtggtgtatactgccacatcagtgtttgagtcagtccccagaggagaggggaaccctcctccatcttttttgcaacatctcatttcttccttttgctgttgcttcccccctcacacacttggttttgttctatcctacatttgagatttctattttatgttgaacttgctgctttttttcatattgaaaagatgacatcgccccaagagccaaaaataaatgggaattgaaaaaagctg

SEQ ID NO: 196082 - DNA, 2904 bp, Homo sapiens
  Payload ID: 18687
  Gene Name: tubulin, beta class I
  ENST ID: ENST00000400534
  CDS Start-End: 594-1874
tggggcggtgcccagcttgggggaaggagagcggcgcttatcgaagtgtggtcgacctccatccgcccaccgagcacttgggacccgctgcacatatccagagcagggaaagctgtggctttctcgggggagcgagtgtctaggggaagggtgtggcaggcccacgggatgccatgccctagaacaacggcctgagcgcttgtggaattaaaatgggagatgtggggccgaggtgggcgaattgggatccctccaggtcaggggttcgagaccatcctgggcaacaaagcgagaccctcccccatgccacgtttctacaaaaaataaaagtaaaaaattagctgggcgtggtggcgcgcgtctgtggtcccagctactcgagaggctgagatgggaggatcggttgagcctgggagttccacgctgtagtcatccgtgattgcaccactgcactgcaggctgggcaacaggaagaccctgtcttaaaaattagaagaagctgggcgcggtggctcacccttgtaatcccagcactttgggaggccaaggtgggcggatcacgaggtcaagagatctagaccatcctggccaacatgttctgggaggtgatcagtgatgaacatggcatcgaccccaccggcacctaccacggggacagcgacctgcagctggaccgcatctctgtgtactacaatgaagccacaggtggcaaatatgttcctcgtgccatcctggtggatctagaacctgggaccatggactctgttcgctcaggtccttttggccagatctttagaccagacaactttgtatttggtcagtctggggcaggtaacaactgggccaaaggccactacacagagggcgccgagctggttgattctgtcctggatgtggtacggaaggaggcagagagctgtgactgcctgcagggcttccagctgacccactcactgggcgggggcacaggctctggaatgggcactctccttatcagcaagatccgagaagaataccctgatcgcatcatgaataccttcagtgtggtgccttcacccaaagtgtctgacaccgtggtcgagccctacaatgccaccctctccgtccatcagttggtagagaatactgatgagacctattgcattgacaacgaggccctctatgatatctgcttccgcactctgaagctgaccacaccaacctacggggatctgaaccaccttgtctcagccaccatgagtggtgtcaccacctgcctccgtttccctggccagctcaatgctgacctccgcaagttggcagtcaacatggtccccttcccacgtctccatttctttatgcctggctttgcccctctcaccagccgtggaagccagcagtatcgagctctcacagtgccggaactcacccagcaggtcttcgatgccaagaacatgatggctgcctgtgacccccgccacggccgatacctcaccgtggctgctgtcttccgtggtcggatgtccatgaaggaggtcgatgagcagatgcttaacgtgcagaacaagaacagcagctactttgtggaatggatccccaacaatgtcaagacagccgtctgtgacatcccacctcgtggcctcaagatggcagtcaccttcattggcaatagcacagccatccaggagctcttcaagcgcatctcggagcagttcactgccatgttccgccggaaggccttcctccactggtacacaggcgagggcatggacgagatggagttcaccgaggctgagagcaacatgaacgacctcgtctctgagtatcagcagtaccaggatgccaccgcagaagaggaggaggatttcggtgaggaggccgaagaggaggcctaaggcagagcccccatcacctcaggcttctcagttcccttagccgtcttactcaactgcccctttcctctccctcagaatttgtgtttgctgcctctatcttgttttttgttttttcttctgggggggggtctagaacagtgcctggcacatagtaggcgctcaataaatacttgtttgttgaatgtctcctctctctttccactctgggaaacctaggtttctgccattctgggtgaccctgtatttctttctggtgcccattccatttgtccagttaatacttcctcttaaaaatctccaagaagctgggtctccagatcccatttagaaccaaccaggtgctgaaaacacatgtagataatggccatcatcctaagcccaaagtagaaaatggtagaaggtagtgggtagaagtcactatataaggaaggggatgggattttccattctaaaagttttggagagggaaatccaggctattaaagtcactaaatttctaagtatgtccatttcccatctcagcttcaagggaggtgtcagcagtattatctccactttcaatctccctccaagctctactctggaggagtctgtcccactctgtcaagtggaatccttccctttccaactctacctccctcactcagctcctttcccctgatcagagaaagggatcaagggggttgggaggggggaaagagaccagccttggtccctaagcctccagaaacgtcttcttaatccccaccttttcttactcccaaaaaagaatgaacacccctgactctggagtggtgtatactgccacatcagtgtttgagtcagtccccagaggagaggggaaccctcctccatcttttttgcaacatctcatttcttccttttgctgttgcttcccccctcacacacttggttttgttctatcctacatttgagatttctattttatgttgaacttgctgctttttttcatattgaaaagatgacatcgccccaagagccaaaaataaatgggaattgaaaaaagctg

SEQ ID NO: 196083 - DNA, 2632 bp, Homo sapiens; identical to SEQ ID NO: 196076
  Payload ID: 18687
  Gene Name: tubulin, beta class I
  ENST ID: ENST00000437490
  CDS Start-End: 485-1603

SEQ ID NO: 196084 - DNA, 2823 bp, Homo sapiens; identical to SEQ ID NO: 196078
  Payload ID: 18687
  Gene Name: tubulin, beta class I
  ENST ID: ENST00000420618
  CDS Start-End: 676-1794

SEQ ID NO: 196085 - DNA, 2823 bp, Homo sapiens; identical to SEQ ID NO: 196078
  Payload ID: 18687
  Gene Name: tubulin, beta class I
  ENST ID: ENST00000444441
  CDS Start-End: 676-1794

SEQ ID NO: 196086 - DNA, 2823 bp, Homo sapiens; identical to SEQ ID NO: 196078
  Payload ID: 18687
  Gene Name: tubulin, beta class I
  ENST ID: ENST00000454620
  CDS Start-End: 676-1794

SEQ ID NO: 196087 - DNA, 2823 bp, Homo sapiens; identical to SEQ ID NO: 196078
  Payload ID: 18687
  Gene Name: tubulin, beta class I
  ENST ID: ENST00000425102
  CDS Start-End: 676-1794

SEQ ID NO: 196088 - DNA, 2823 bp, Homo sapiens; identical to SEQ ID NO: 196078
  Payload ID: 18687
  Gene Name: tubulin, beta class I
  ENST ID: ENST00000446385
  CDS Start-End: 676-1794

SEQ ID NO: 196089 - DNA, 2632 bp, Homo sapiens
  Payload ID: 18687
  Gene Name: tubulin, beta class I
  ENST ID: ENST00000435546
  CDS Start-End: 485-1603
cgcgtgcgccgcagtcacgtggagggcggggggggtggtcgactgcggcggcagctctttcctcagacccccagccttttgtgcgccgcgcggtggggcggtgcccagcttgggggaaggagagcggcgcttatcgaagtgtggtcgacctccatccgcccaccgagcacttgggacccgctgcacatatccagagcagggaaagctgtggctttctcgggggagcgagtgtctaggggaagggtgtggcaggcccacgggatgccatgccctagaacaacggcctgagcgcttgtggaattaaaatgggagatgtggggccgagttctgggaggtgatcagtgatgaacatggcatcgaccccaccggcacctaccacggggacagcgacctgcagctggaccgcatctctgtgtactacaatgaagccacaggtggcaaatatgttcctcgtgccatcctggtggatctagaacctgggaccatggactctgttcgctcaggtccttttggccagatctttagaccagacaactttgtatttggtcagtctggggcaggtaacaactgggccaaaggccactacacagagggcgccgagctggttgattctgtcctggatgtggtacggaaggaggcagagagctgtgactgcctgcagggcttccagctgacccactcactgggcgggggcacaggctctggaatgggcactctccttatcagcaagatccgagaagaataccctgatcgcatcatgaataccttcagtgtggtgccttcacccaaagtgtctgacaccgtggtcgagccctacaatgccaccctctccgtccatcagttggtagagaatactgatgagacctattgcattgacaacgaggccctctatgatatctgcttccgcactctgaagctgaccacaccaacctacggggatctgaaccaccttgtctcagccaccatgagtggtgtcaccacctgcctccgtttccctggccagctcaatgctgacctccgcaagttggcagtcaacatggtccccttcccacgtctccatttctttatgcctggctttgcccctctcaccagccgtggaagccagcagtatcgagctctcacagtgccggaactcacccagcaggtcttcgatgccaagaacatgatggctgcctgtgacccccgccacggccgatacctcaccgtggctgctgtcttccgtggtcggatgtccatgaaggaggtcgatgagcagatgcttaacgtgcagaacaagaacagcagctactttgtggaatggatccccaacaatgtcaagacagccgtctgtgacatcccacctcgtggcctcaagatggcagtcaccttcattggcaatagcacagccatccaggagctcttcaagcgcatctcggagcagttcactgccatgttccgccggaaggccttcctccactggtacacaggcgagggcatggacgagatggagttcaccgaggctgagagcaacatgaacgacctcgtctctgagtatcagcagtaccaggatgccaccgcagaagaggaggaggatttcggtgaggaggccgaagaggaggcctaaggcagagcccccatcacctcaggcttctcagttcccttagccgtcttactcaactgcccctttcctctccctcagaatttgtgtttgctgcctctatcttgttttttgttttttcttctggggggggtctagaacagtgcctggcacatagtaggcgctcaataaatacttgtttgttgaatgtctcctctctctttccactctgggaaacctaggtttctgccattctgggtgaccctgtatttctttctggtgcccattccatttgtccagttaatacttcctcttaaaaatctccaagaagctgggtctccagatcccatttagaaccaaccaggtgctgaaaacacatgtagataatggccatcatcctaagcccaaagtagaaaatggtagaaggtagtgggtagaagtcactatataaggaaggggatgggattttccattctaaaagttttggagagggaaatccaggctattaaagtcactaaatttctaagtatgtccatttcccatctcagcttcaagggaggtgtcagcagtattatctccactttcaatctccctccaagctctactctggaggagtctgtcccactctgtcaagtggaatccttccctttccaactctacctccctcactcagctcctttcccctgatcagagaaagggatcaagggggttgggaggggggaaagagaccagccttggtccctaagcctccagaaacgtcttcttaatccccaccttttcttactcccaaaaaagaatgaacacccctgactctggaatggtgtatactgccacatcagtgtttgagtcagtccccagaggagaggggaaccctcctccatcttttttgcaacatctcatttcttccttttgctgttgcttcccccctcacacacttggttttgttctatcctacatttgagatttctattttgtgttgaacttgctgctttttttcatattgaaaagatgacatcgccccaagagccaaaaataaatgggaattgaaaaaagctg

SEQ ID NO: 196090 - DNA, 2670 bp, Homo sapiens; identical to SEQ ID NO: 196075
  Payload ID: 18687
  Gene Name: tubulin, beta class I
  Uniprot ID: P07437
  ENST ID: ENST00000421473
  CDS Start-End: 307-1641

SEQ ID NO: 196091 - DNA, 2903 bp, Homo sapiens; identical to SEQ ID NO: 196079
  Payload ID: 18687
  Gene Name: tubulin, beta class I
  ENST ID: ENST00000426754
  CDS Start-End: 594-1874

SEQ ID NO: 196092 - DNA, 2903 bp, Homo sapiens; identical to SEQ ID NO: 196079
  Payload ID: 18687
  Gene Name: tubulin, beta class I
  ENST ID: ENST00000412136
  CDS Start-End: 594-1874

SEQ ID NO: 196093 - DNA, 2670 bp, Homo sapiens; identical to SEQ ID NO: 196075
  Payload ID: 18687
  Gene Name: tubulin, beta class I
  Uniprot ID: P07437
  ENST ID: ENST00000422650
  CDS Start-End: 307-1641

SEQ ID NO: 196094 - DNA, 2670 bp, Homo sapiens; identical to SEQ ID NO: 196075
  Payload ID: 18687
  Gene Name: tubulin, beta class I
  Uniprot ID: P07437
  ENST ID: ENST00000419792
  CDS Start-End: 307-1641

SEQ ID NO: 196095 - DNA, 2903 bp, Homo sapiens; identical to SEQ ID NO: 196079
  Payload ID: 18687
  Gene Name: tubulin, beta class I
  ENST ID: ENST00000419551
  CDS Start-End: 594-1874

SEQ ID NO: 196096 - DNA, 2632 bp, Homo sapiens; identical to SEQ ID NO: 196076
  Payload ID: 18687
  Gene Name: tubulin, beta class I
  ENST ID: ENST00000454454
  CDS Start-End: 485-1603

SEQ ID NO: 196097 - DNA, 2903 bp, Homo sapiens; identical to SEQ ID NO: 196079
  Payload ID: 18687
  Gene Name: tubulin, beta class I
  ENST ID: ENST00000425136
  CDS Start-End: 594-1874

SEQ ID NO: 196098 - DNA, 2670 bp, Homo sapiens
  Payload ID: 18687
  Gene Name: tubulin, beta class I
  Uniprot ID: P07437
  ENST ID: ENST00000422674
  CDS Start-End: 307-1641
gtacatgaccggcatcgactaatcagggccaggctcgatgaggctttgtctccctaccgcgcgcggggccgattctcccgcctcccagccccggcgcacgcgcgccccgcccagcctgctttccctccgcgccctcccctctcctttctccctctcagaaccttcctgccgtcgcgtttgcacctcgctgctccagcctctggggcgcattccaaccttccagcctgcgacctgcggagaaaaaaaattacttattttcttgccccatacataccttgaggcgagcaaaaaaattaaattttaaccatgagggaaatcgtgcacatccaggctggtcagtgtggcaaccagatcggtgccaagttctgggaggtgatcagtgatgaacatggcatcgaccccaccggcacctaccacggggacagcgacctgcagctggaccgcatctctgtgtactacaatgaagccacaggtggcaaatatgttcctcgtgccatcctggtggatctagaacctgggaccatggactctgttcgctcaggtccttttggccagatctttagaccagacaactttgtatttggtcagtctggggcaggtaacaactgggccaaaggccactacacagagggcgccgagctggttgattctgtcctggatgtggtacggaaggaggcagagagctgtgactgcctgcagggcttccagctgacccactcactgggcgggggcacaggctctggaatgggcactctccttatcagcaagatccgagaagaataccctgatcgcatcatgaataccttcagtgtggtgccttcacccaaagtgtctgacaccgtggtcgagccctacaatgccaccctctccgtccatcagttggtagagaatactgatgagacctattgcattgacaacgaggccctctatgatatctgcttccgcactctgaagctgaccacaccaacctacggggatctgaaccaccttgtctcagccaccatgagtggtgtcaccacctgcctccgtttccctggccagctcaatgctgacctccgcaagttggcagtcaacatggtccccttcccacgtctccatttctttatgcctggctttgcccctctcaccagccgtggaagccagcagtatcgagctctcacagtgccggaactcacccagcaggtcttcgatgccaagaacatgatggctgcctgtgacccccgccacggccgatacctcaccgtggctgctgtcttccgtggtcggatgtccatgaaggaggtcgatgagcagatgcttaacgtgcagaacaagaacagcagctactttgtggaatggatccccaacaatgtcaagacagccgtctgtgacatcccacctcgtggcctcaagatggcagtcaccttcattggcaatagcacagccatccaggagctcttcaagcgcatctcggagcagttcactgccatgttccgccggaaggccttcctccactggtacacaggcgagggcatggacgagatggagttcaccgaggctgagagcaacatgaacgacctcgtctctgagtatcagcagtaccaggatgccaccgcagaagaggaggaggatttcggtgaggaggccgaagaggaggcctaaggcagagcccccatcacctcaggcttctcagttcccttagccgtcttactcaactgcccctttcctctccctcagaatttgtgtttgctgcctctatcttgttttttgttttttcttctggggggggtctagaacagtgcctggcacatagtaggcgctcaataaatacttgtttgttgaatgtctcctctctctttccactctgggaaacctaggtttctgccattctgggtgaccctgtatttctttctggtgcccattccatttgtccagttaatacttcctcttaaaaatctccaagaagctgggtctccagatcccatttagaaccaaccaggtgctgaaaacacatgtagataatggccatcatcctaagcccaaagtagaaaatggtagaaggtagtgggtagaagtcactatataaggaaggggatgggattttccattctaaaagttttggagagggaaatccaggctattaaagtcactaaatttctaagtatgtccatttcccatctcagcttcaagggaggtgtcagcagtattatctccactttcaatctccctccaagctctactctggaggagtctgtcccactctgtcaagtggaatccttccctttccaactctacctccctcactcagctcctttcccctgatcagagaaagggatcaagggggttgggaggggggaaagagaccagccttggtccctaagcctccagaaacgtcttcttaatccccaccttttcttactcccaaaaaagaatgaacacccctgactctggaatggtgtatactgccacatcagtgtttgagtcagtccccagaggagaggggaaccctcctccatcttttttgcaacatctcatttcttccttttgctgttgcttcccccctcacacacttggttttgttctatcctacatttgagatttctattttgtgttgaacttgctgctttttttcatattgaaaagatgacatcgccccaagagccaaaaataaatgggaattgaaaaaagctg

SEQ ID NO: 196099 - DNA, 2823 bp, Homo sapiens
  Payload ID: 18687
  Gene Name: tubulin, beta class I
  ENST ID: ENST00000453350
  CDS Start-End: 676-1794
ggcgcttatcgaagtgtggtcgacctccatccgcccaccgagcacttgggacccgctgcacatatccagagcagggaaagctgtggctttctcgggggagcgagtgtctaggggaagggtgtggcaggcccacgggatgccatgccctagaacaacggcctgagcgcttgtggaattaaaatgggagatgtggggccgaggtgggcgaattgggatccctccaggtcaggggttcgagaccatcctgggcaacaaagcgagaccctcccccatgccacgtttctacaaaaaataaaagtaaaaaattagctgggcgtggtggcgcgcgtctgtggtcccagctactcgagaggctgagatgggaggatcggttgagcctgggagttccacgctgtagtcatccgtgattgcaccactgcactgcaggctgggcaacaggaagaccctgtcttaaaaattagaagaagctgggcgcggtggctcacccttgtaatcccagcactttgggaggccaagttctgggaggtgatcagtgatgaacatggcatcgaccccaccggcacctaccacggggacagcgacctgcagctggaccgcatctctgtgtactacaatgaagccacaggtggcaaatatgttcctcgtgccatcctggtggatctagaacctgggaccatggactctgttcgctcaggtccttttggccagatctttagaccagacaactttgtatttggtcagtctggggcaggtaacaactgggccaaaggccactacacagagggcgccgagctggttgattctgtcctggatgtggtacggaaggaggcagagagctgtgactgcctgcagggcttccagctgacccactcactgggcgggggcacaggctctggaatgggcactctccttatcagcaagatccgagaagaataccctgatcgcatcatgaataccttcagtgtggtgccttcacccaaagtgtctgacaccgtggtcgagccctacaatgccaccctctccgtccatcagttggtagagaatactgatgagacctattgcattgacaacgaggccctctatgatatctgcttccgcactctgaagctgaccacaccaacctacggggatctgaaccaccttgtctcagccaccatgagtggtgtcaccacctgcctccgtttccctggccagctcaatgctgacctccgcaagttggcagtcaacatggtccccttcccacgtctccatttctttatgcctggctttgcccctctcaccagccgtggaagccagcagtatcgagctctcacagtgccggaactcacccagcaggtcttcgatgccaagaacatgatggctgcctgtgacccccgccacggccgatacctcaccgtggctgctgtcttccgtggtcggatgtccatgaaggaggtcgatgagcagatgcttaacgtgcagaacaagaacagcagctactttgtggaatggatccccaacaatgtcaagacagccgtctgtgacatcccacctcgtggcctcaagatggcagtcaccttcattggcaatagcacagccatccaggagctcttcaagcgcatctcggagcagttcactgccatgttccgccggaaggccttcctccactggtacacaggcgagggcatggacgagatggagttcaccgaggctgagagcaacatgaacgacctcgtctctgagtatcagcagtaccaggatgccaccgcagaagaggaggaggatttcggtgaggaggccgaagaggaggcctaaggcagagcccccatcacctcaggcttctcagttcccttagccgtcttactcaactgcccctttcctctccctcagaatttgtgtttgctgcctctatcttgttttttgttttttcttctggggggggtctagaacagtgcctggcacatagtaggcgctcaataaatacttgtttgttgaatgtctcctctctctttccactctgggaaacctaggtttctgccattctgggtgaccctgtatttctttctggtgcccattccatttgtccagttaatacttcctcttaaaaatctccaagaagctgggtctccagatcccatttagaaccaaccaggtgctgaaaacacatgtagataatggccatcatcctaagcccaaagtagaaaatggtagaaggtagtgggtagaagtcactatataaggaaggggatgggattttccattctaaaagttttggagagggaaatccaggctattaaagtcactaaatttctaagtatgtccatttcccatctcagcttcaagggaggtgtcagcagtattatctccactttcaatctccctccaagctctactctggaggagtctgtcccactctgtcaagtggaatccttccctttccaactctacctccctcactcagctcctttcccctgatcagagaaagggatcaagggggttgggaggggggaaagagaccagccttggtccctaagcctccagaaacgtcttcttaatccccaccttttcttactcccaaaaaagaatgaacacccctgactctggaatggtgtatactgccacatcagtgtttgagtcagtccccagaggagaggggaaccctcctccatcttttttgcaacatctcatttcttccttttgctgttgcttcccccctcacacacttggttttgttctatcctacatttgagatttctattttgtgttgaacttgctgctttttttcatattgaaaagatgacatcgccccaagagccaaaaataaatgggaattgaaaaaagctg

SEQ ID NO: 196100 - DNA, 2632 bp, Homo sapiens; identical to SEQ ID NO: 196076
  Payload ID: 18687
  Gene Name: tubulin, beta class I
  ENST ID: ENST00000427480
  CDS Start-End: 485-1603

SEQ ID NO: 196101 - DNA, 2903 bp, Homo sapiens
  Payload ID: 18687
  Gene Name: tubulin, beta class I
  ENST ID: ENST00000420400
  CDS Start-End: 594-1874
tggggcggtgcccagcttgggggaaggagagcggcgcttatcgaagtgtggtcgacctccatccgcccaccgagcacttgggacccgctgcacatatccagagcagggaaagctgtggctttctcgggggagcgagtgtctaggggaagggtgtggcaggcccacgggatgccatgccctagaacaacggcctgagcgcttgtggaattaaaatgggagatgtggggccgaggtgggcgaattgggatccctccaggtcaggggttcgagaccatcctgggcaacaaagcgagaccctcccccatgccacgtttctacaaaaaataaaagtaaaaaattagctgggcgtggtggcgcgcgtctgtggtcccagctactcgagaggctgagatgggaggatcggttgagcctgggagttccacgctgtagtcatccgtgattgcaccactgcactgcaggctgggcaacaggaagaccctgtcttaaaaattagaagaagctgggcgcggtggctcacccttgtaatcccagcactttgggaggccaaggtgggcggatcacgaggtcaagagatctagaccatcctggccaacatgttctgggaggtgatcagtgatgaacatggcatcgaccccaccggcacctaccacggggacagcgacctgcagctggaccgcatctctgtgtactacaatgaagccacaggtggcaaatatgttcctcgtgccatcctggtggatctagaacctgggaccatggactctgttcgctcaggtccttttggccagatctttagaccagacaactttgtatttggtcagtctggggcaggtaacaactgggccaaaggccactacacagagggcgccgagctggttgattctgtcctggatgtggtacggaaggaggcagagagctgtgactgcctgcagggcttccagctgacccactcactgggcgggggcacaggctctggaatgggcactctccttatcagcaagatccgagaagaataccctgatcgcatcatgaataccttcagtgtggtgccttcacccaaagtgtctgacaccgtggtcgagccctacaatgccaccctctccgtccatcagttggtagagaatactgatgagacctattgcattgacaacgaggccctctatgatatctgcttccgcactctgaagctgaccacaccaacctacggggatctgaaccaccttgtctcagccaccatgagtggtgtcaccacctgcctccgtttccctggccagctcaatgctgacctccgcaagttggcagtcaacatggtccccttcccacgtctccatttctttatgcctggctttgcccctctcaccagccgtggaagccagcagtatcgagctctcacagtgccggaactcacccagcaggtcttcgatgccaagaacatgatggctgcctgtgacccccgccacggccgatacctcaccgtggctgctgtcttccgtggtcggatgtccatgaaggaggtcgatgagcagatgcttaacgtgcagaacaagaacagcagctactttgtggaatggatccccaacaatgtcaagacagccgtctgtgacatcccacctcgtggcctcaagatggcagtcaccttcattggcaatagcacagccatccaggagctcttcaagcgcatctcggagcagttcactgccatgttccgccggaaggccttcctccactggtacacaggcgagggcatggacgagatggagttcaccgaggctgagagcaacatgaacgacctcgtctctgagtatcagcagtaccaggatgccaccgcagaagaggaggaggatttcggtgaggaggccgaagaggaggcctaaggcagagcccccatcacctcaggcttctcagttcccttagccgtcttactcaactgcccctttcctctccctcagaatttgtgtttgctgcctctatcttgttttttgttttttcttctggggggggtctagaacagtgcctggcacatagtaggcgctcaataaatacttgtttgttgaatgtctcctctctctttccactctgggaaacctaggtttctgccattctgggtgaccctgtatttctttctggtgcccattccatttgtccagttaatacttcctcttaaaaatctccaagaagctgggtctccagatcccatttagaaccaaccaggtgctgaaaacacatgtagataatggccatcatcctaagcccaaagtagaaaatggtagaaggtagtgggtagaagtcactatataaggaaggggatgggattttccattctaaaagttttggagagggaaatccaggctattaaagtcactaaatttctaagtatgtccatttcccatctcagcttcaagggaggtgtcagcagtattatctccactttcaatctccctccaagctctactctggaggagtctgtcccactctgtcaagtggaatccttccctttccaactctacctccctcactcagctcctttcccctgatcagagaaagggatcaagggggttgggaggggggaaagagaccagccttggtccctaagcctccagaaacgtcttcttaatccccaccttttcttactcccaaaaaagaatgaacacccctgactctggaatggtgtatactgccacatcagtgtttgagtcagtccccagaggagaggggaaccctcctccatcttttttgcaacatctcatttcttccttttgctgttgcttcccccctcacacacttggttttgttctatcctacatttgagatttctattttgtgttgaacttgctgctttttttcatattgaaaagatgacatcgccccaagagccaaaaataaatgggaattgaaaaaagctg

SEQ ID NO: 196102 - DNA, 2670 bp, Homo sapiens; identical to SEQ ID NO: 196075
  Payload ID: 18687
  Gene Name: tubulin, beta class I
  Uniprot ID: P07437
  ENST ID: ENST00000436628
  CDS Start-End: 307-1641

SEQ ID NO: 196103 - DNA, 2670 bp, Homo sapiens; identical to SEQ ID NO: 196075
  Payload ID: 18687
  Gene Name: tubulin, beta class I
  Uniprot ID: P07437
  ENST ID: ENST00000432462
  CDS Start-End: 307-1641

SEQ ID NO: 196104 - DNA, 2903 bp, Homo sapiens; identical to SEQ ID NO: 196079
  Payload ID: 18687
  Gene Name: tubulin, beta class I
  ENST ID: ENST00000424734
  CDS Start-End: 594-1874

SEQ ID NO: 196105 - DNA, 2632 bp, Homo sapiens; identical to SEQ ID NO: 196076
  Payload ID: 18687
  Gene Name: tubulin, beta class I
  ENST ID: ENST00000413547
  CDS Start-End: 485-1603

SEQ ID NO: 196106 - DNA, 2632 bp, Homo sapiens; identical to SEQ ID NO: 196076
  Payload ID: 18687
  Gene Name: tubulin, beta class I
  ENST ID: ENST00000436335
  CDS Start-End: 485-1603

SEQ ID NO: 196107 - DNA, 2490 bp, Homo sapiens
  Payload ID: 18688
  Gene Name: tubulin, delta 1
  Uniprot ID: Q9UJT1
  ENST ID: ENST00000325752
  CDS Start-End: 289-1650
gcgcattgtcagctggagcgttcggtggacagtgagcatgcgtaccatatctgaagttcgtaaattgaaattgaacatgcgtaattaatctttctgaataggaaaaaatatatacacaacaaaactctccgtttatggaacatgcgcatttgttctcagtaagtttttcgttttgaaagtgagcatgcgcatggtgagtaggttggtccgaagtttgaaccggacagaagcgctggtcggcgtctggcggttgtttttagaggtaatacacctagtttgtggctcagcatgtcaattgtaacagtgcaacttggtcagtgtggcaatcagattggttttgaagtttttgatgctttgcttagtgactcacacagttcccagggactctgctctatgagagagaatgaggcatatcaagcatcttgcaaagaaagattcttcagtgaggaggagaatggagttccaattgcccgggctgttcttgttgacatggaacccaaagttatcaatcaaatgctgtcaaaggctgcccagtctggccaatggaaatatggtcaacatgcatgcttctgtcaaaaacaaggttctggaaacaactgggcatatggttactctgttcatggacccaggcatgaagaatctataatgaacataatccggaaggaagtggagaaatgtgactctttcagtggttttttcatcataatgagtatggctgggggcacaggatcaggattaggagctttcgttacacagaatttagaagatcagtactcaaactcattgaaaatgaatcagattatttggccttatggaactggtgaggttattgttcaaaactacaactccattttgacactttctcacttgtaccgatcttcagacgccctccttcttcatgagaatgatgccatccataagatctgtgcaaaactgatgaatatcaagcagatctcctttagtgatatcaatcaagtcctcgcacatcagctgggaagtgtgttccagcctacttattctgcagaaagctcatttcactacagacgaaatccactaggagacttaatggagcatttagttccccatcctgaattcaagatgctgagtgttcgtaacattcctcacatgtctgagaattcattggcatacaccacatttacttgggctggcctcctcaagcatttgagacagatgctcatttctaatgcaaagatggaagaaggtattgataggcatgtatggcctcctttatcaggacttcctcctcttagtaaaatgtctctcaacaaggacctgcattttaacacttccattgctaacttggtcattcttcgtgggaaagatgtgcaaagtgcagatgtggagggatttaaagatccagctctgtatacttcctggttgaagcctgttaatgctttcaacgtgtggaaaacccagcgggcctttagcaaatatgagaagtctgcagtgttggtcagcaacagccagttcttagtaaaaccacttgatatgattgttgggaaggcatggaatatgtttgcttcaaaagcctacattcatcagtacacaaaatttggaatcgaagaagaggactttttagacagtttcacgtcattagagcaggttgttgccagttactgtaatctctgatcttgaacaatgggaaaagtataccttaaggcatttctggactaaaatattttcaatactattttctctgtaaagttttcaaagttctccatcctggctaacacggtgaaacaccgtctctaccagaaaatacaaaaaattagccaggcgcggtggcgggtgcctgtagtcccagctactcgggaggctgaggcaggagaatgacgtgaacccaggaggcggagcttgcagtgagccgagatcgcgccactgcactccagcctgggcgacagagcgagactccgtctcaaaaaaaaaaaaaaaaaaaaatgttttcaaagttccattctgttaaagtaaccacgtagaatgctgagtctattctgcatactatgcccacagaaaaggaagaaaactttttaaaatggagaatcgcatgttttcaatgaaaacattcacttggtatttcatttgtaagaaaaaaaaatggtgcttttataaagaactttggggaaacactttgctgaaatgttgggactctggaactagccaagaaaagagaatattctctttgtctacatgttcctaaatctttactccaaaacaactccaaaaacaactcacaaagcatgaaccaaactttcacagcataatttcaagctaaggaattgtaattctgtacttaatatattcatgtttgaaatgaatgctttgaaccacaggagggagatgttgtcaaatgctacagtgtgaacatgtattttgaatattctgtaacagggcaagtttccactctaagcagctatttaaaaataaatatgaggattttggtaataaatgcttatgcttaagtacaaaagt

SEQ ID NO: 196108 - DNA, 1769 bp, Homo sapiens
  Payload ID: 18688
  Gene Name: tubulin, delta 1
  Uniprot ID: Q9UJT1
  ENST ID: ENST00000340993
  CDS Start-End: 264-1460
tggacagtgagcatgcgtaccatatctgaagttcgtaaattgaaattgaacatgcgtaattaatctttctgaataggaaaaaatatatacacaacaaaactctccgtttatggaacatgcgcatttgttctcagtaagtttttcgttttgaaagtgagcatgcgcatggtgagtaggttggtccgaagtttgaaccggacagaagcgctggtcggcgtctggcggttgtttttagaggtaatacacctagtttgtggctcagcatgtcaattgtaacagtgcaacttggtcagtgtggcaatcagattggttttgaagtttttgatgctttgcttagtgactcacacagttcccagggactctgctctatgagagagaatgaggcatatcaagcatcttgcaaagaaagattcttcagtgaggaggagaatggagttccaattgcccgggctgttcttgttgacatggaacccaaagttatcaatcaaatgctgtcaaaggctgcccagtctggccaatggaaatatggtcaacatgcatgcttctgtcaaaaacaaggttctggaaacaactgggcatatggttactctgttcatggacccaggcatgaagaatctataatgaacataatccggaaggaagtggagaaatgtgactctttcagtggttttttcatcataatgagtatggctgggggcacaggatcaggattaggagctttcgttacacagaatttagaagatcagtactcaaactcattgaaaatgaatcagattatttggccttatggaactggtgaggttattgttcaaaactacaactccattttgacactttctcacttgtaccgatcttcagacgccctccttcttcatgagaatgatgccatccataagatctgtgcaaaactgatgaatatcaagcagatctcctttagtgatatcaatcaagtcctcgcacatcagctgggaagtgtgttccagcctacttattctgcagaaagctcatttcactacagacgaaatccactaggtattgataggcatgtatggcctcctttatcaggacttcctcctcttagtaaaatgtctctcaacaaggacctgcattttaacacttccattgctaacttggtcattcttcgtgggaaagatgtgcaaagtgcagatgtggagggatttaaagatccagctctgtatacttcctggttgaagcctgttaatgctttcaacgtgtggaaaacccagcgggcctttagcaaatatgagaagtctgcagtgttggtcagcaacagccagttcttagtaaaaccacttgatatgattgttgggaaggcatggaatatgtttgcttcaaaagcctacattcatcagtacacaaaatttggaatcgaagaagaggactttttagacagtttcacgtcattagagcaggttgttgccagttactgtaatctctgatcttgaacaatgggaaaagtataccttaaggcatttctggactaaaatattttcaatactattttctctgtaaagttttcaaagttctccatcctggctaacacggtgaaacaccgtctctaccagaaaatacaaaaaattagccaggcgcggtggcgggtgcctgtagtcccagctactcgggaggctgaggcaggagaatgacgtgaacccaggaggcggagcttgcagtgagccgagatcgcgccactgcactccagcctgggcgacagagcgagactccgtctcaaaaaaaaaaaaaaaaaaaaa

SEQ ID NO: 196109 - DNA, 1490 bp, Homo sapiens
  Payload ID: 18688
  Gene Name: tubulin, delta 1
  Uniprot ID: Q9UJT1
  ENST ID: ENST00000346141
  CDS Start-End: 59-658
cgctggtcggcgtctggcggttgtttttagaggtaatacacctagtttgtggctcagcatgtcaattgtaacagtgcaacttggtcagtgtggcaatcagattggttttgaagtttttgatgctttgcttagtgactcacacagttcccagggactctgctctatgagagagaatgaggcatatcaagcatcttgcaaagaaagattcttcagtgaggaggagaatggaggtattgataggcatgtatggcctcctttatcaggacttcctcctcttagtaaaatgtctctcaacaaggacctgcattttaacacttccattgctaacttggtcattcttcgtgggaaagatgtgcaaagtgcagatgtggagggatttaaagatccagctctgtatacttcctggttgaagcctgttaatgctttcaacgtgtggaaaacccagcgggcctttagcaaatatgagaagtctgcagtgttggtcagcaacagccagttcttagtaaaaccacttgatatgattgttgggaaggcatggaatatgtttgcttcaaaagcctacattcatcagtacacaaaatttggaatcgaagaagaggactttttagacagtttcacgtcattagagcaggttgttgccagttactgtaatctctgatcttgaacaatgggaaaagtataccttaaggcatttctggactaaaatattttcaatactattttctctgtaaagttttcaaagttctccatcctggctaacacggtgaaacaccgtctctaccagaaaatacaaaaaattagccaggcgcggtggcgggtgcctgtagtcccagctactcgggaggctgaggcaggagaatgacgtgaacccaggaggcggagcttgcagtgagccgagatcgcgccactgcactccagcctgggcgacagagcgagactccgtctcaaaaaaaaaaaaaaaaaaaaatgttttcaaagttccattctgttaaagtaaccacgtagaatgctgagtctattctgcatactatgcccacagaaaaggaagaaaactttttaaaatggagaatcgcatgttttcaatgaaaacattcacttggtatttcatttgtaagaaaaaaaaatggtgcttttataaagaactttggggaaacactttgctgaaatgttgggactctggaactagccaagaaaagagaatattctctttgtctacatgttcctaaatctttactccaaaacaactccaaaaacaactcacaaagcatgaaccaaactttcacagcataatttcaagctaaggaattgtaattctgtacttaatatattcatgtttgaaatgaatgctttgaaccacaggagggagatgttgtcaaatgctacagtgtgaacatgtattttgaatattctgtaacagggcaagtttccactctaagcagctatttaaaaataaatatgaggattttggtaataaatgcttatgcttaagt

SEQ ID NO: 196110 - DNA, 1154 bp, Homo sapiens
  Payload ID: 18688
  Gene Name: tubulin, delta 1
  Uniprot ID: Q9UJT1
  ENST ID: ENST00000376094
  CDS Start-End: 2-1057
catgtcaattgtaacagtgcaacttggtcagtgtggcaatcagattggttttgaagtttttgatgctttgcttagtgactcacacagttcccagggactctgctctatgagagagaatgaggcatatcaagcatcttgcaaagaaagattcttcagtgaggaggagaatggagttccaattgcccgggctgttcttgttgacatggaacccaaagttatcaatcaaatgctgtcaaaggctgcccagtctggccaatggaaatatggtcaacatgcatgcttctgtcaaaaacaaggttctggaaacaactgggcatatggttactctgttcatggacccaggcatgaagaatctataatgaacataatccggaaggaagtggagaaatgtgactctttcagtggttttttcatcataatgagtatggctgggggcacaggatcaggattaggagctttcgttacacagaatttagaagatcagtactcaaactcattgaaaatgaatcagattatttggccttatggaactggtgaggttattgttcaaaactacaactccattttgacactttctcacttgtaccgatcttcagacgccctccttcttcatgagaatgatgccatccataagatctgtgcaaaactgatgaatatcaagcagatctcctttagtgatatcaatcaagtcctcgcacatcagctgggaagtgtgttccagcctacttattctgcagaaagctcatttcactacagacgaaatccactagagggatttaaagatccagctctgtatacttcctggttgaagcctgttaatgctttcaacgtgtggaaaacccagcgggcctttagcaaatatgagaagtctgcagtgttggtcagcaacagccagttcttagtaaaaccacttgatatgattgttgggaaggcatggaatatgtttgcttcaaaagcctacattcatcagtacacaaaatttggaatcgaagaagaggactttttagacagtttcacgtcattagagcaggttgttgccagttactgtaatctctgatcttgaacaatgggaaaagtataccttaaggcatttctggactaaaatattttcaatactattttctctgtaaagttttcaaagttctccatcctgg

SEQ ID NO: 196111 - DNA, 1680 bp, Homo sapiens
  Payload ID: 18688
  Gene Name: tubulin, delta 1
  Uniprot ID: Q9UJT1
  ENST ID: ENST00000394239
  CDS Start-End: 202-1392
atctttctgaataggaaaaaatatatacacaacaaaactctccgtttatggaacatgcgcatttgttctcagtaagtttttcgttttgaaagtgagcatgcgcatggtgagtaggttggtccgaagtttgaaccggacagaagcgctggtcggcgtctggcggttgtttttagaggtaatacacctagtttgtggctcagcatgtcaattgtaacagtgcaacttggtcagtgtggcaatcagattggttttgaagtttttgatgctttgcttagtgactcacacagttcccagggactctgctctatgagagagaatgaggcatatcaagcatcttgcaaagaaagattcttcagtgaggaggagaatggagttccaattgcccgggctgttcttgttgacatggaacccaaagttatcaatcaaatgctgtcaaaggctgcccagtctggccaatggaaatatggtcaacatgcatgcttctgtcaaaaacaaggttctggaaacaactgggcatatggttactctgttcatggacccaggcatgaagaatctataatgaacataatccggaaggaagtggagaaatgtgactctttcagtggttttttcatcataatgagtatggctgggggcacaggatcaggattaggagctttcgttacacagaatttagaagatcagtactcaaactcattgaaaatgaatcagattatttggccttatggaactggtgaggttattgttcaaaactacaactccattttgacactttctcacttgtaccgatcttcagacgccctccttcttcatgagaatgatgccatccataagatctgtgcaaaactgatgaatatcaagcagatctcctttagtgatatcaatcaagtcctcgcacatcagctgggaagtgtgttccagcctacttattctgcagaaagctcatttcactacagacgaaatccactaggagacttaatggagcatttagttccccatcctgaattcaagatgctgagtgttcgtaacattcctcacatgtctgagaattcattggcatacaccacatttacttgggctggcctcctcaagcatttgagacagatgctcatttctaatgcaaagatggaagaaggtattgataggcatgtatggcctcctttatcaggacttcctcctcttagtaaaatgtctctcaacaaggacctgcattttaacacttccattgctaacttggtcattcttcgtgggaaagatgtgcaaagtgcagatgtgggtaagaaattcagagcctacattcatcagtacacaaaatttggaatcgaagaagaggactttttagacagtttcacgtcattagagcaggttgttgccagttactgtaatctctgatcttgaacaatgggaaaagtataccttaaggcatttctggactaaaatattttcaatactattttctctgtaaagttttcaaagttctccatcctggctaacacggtgaaacaccgtctctaccagaaaatacaaaaaattagccaggcgcggtggcgggtgcctgtagtcccagctactcgggaggctgaggcaggagaatgacgtgaacccaggaggcggagcttgcagtgagccgagatcgcgccactgcactccagcctgggcgacagagcgagactccgtctc

SEQ ID NO: 196112 - DNA, 1027 bp, Homo sapiens
  Payload ID: 18688
  Gene Name: tubulin, delta 1
  Uniprot ID: Q9UJT1
  ENST ID: ENST00000539018
  CDS Start-End: 309-1022
gaagttcgtaaattgaaattgaacatgcgtaattaatctttctgaataggaaaaaatatatacacaacaaaactctccgtttatggaacatgcgcatttgttctcagtaagtttttcgttttgaaagtgagcatgcgcatggtgagtaggttggtccgaagtttgaaccggacagaagcgctggtcggcgtctggcggttattgttcaaaactacaactccattttgacactttctcacttgtaccgatcttcagacgccctccttcttcatgagaatgatgccatccataagatctgtgcaaaactgatgaatatcaagcagatctcctttagtgatatcaatcaagtcctcgcacatcagctgggaagtgtgttccagcctacttattctgcagaaagctcatttcactacagacgaaatccactaggagacttaatggagcatttagttccccatcctgaattcaagatgctgagtgttcgtaacattcctcacatgtctgagaattcattggcatacaccacatttacttgggctggcctcctcaagcatttgagacagatgctcatttctaatgcaaagatggaagaaggtattgataggcatgtatggcctcctttatcaggacttcctcctcttagtaaaatgtctctcaacaaggacctgcattttaacacttccattgctaacttggtcattcttcgtgggaaagatgtgcaaagtgcagatgtggagggatttaaagatccagctctgtatacttcctggttgaagcctgttaatgctttcaacgtgtggaaaacccagcgggcctttagcaaatatgagaagtctgcagtgttggtcagcaacagccagttcttagtaaaaccacttgatatgattgttgggaaggcatggaatatgtttgcttcaaaagcctacattcatcagtacacaaaatttggaatcgaagaagaggactttttagacagtttcacgtcattagagcaggttgttgccagttactgtaatctctgatcttg

SEQ ID NO: 196113 - DNA, 560 bp, Homo sapiens
  Payload ID: 18688
  Gene Name: tubulin, delta 1
  ENST ID: ENST00000590498
  CDS Start-End: 269-560
agctggagcgttcggtggacagtgagcatgcgtaccatatctgaagttcgtaaattgaaattgaacatgcgtaattaatctttctgaataggaaaaaatatatacacaacaaaactctccgtttatggaacatgcgcatttgttctcagtaagtttttcgttttgaaagtgagcatgcgcatggtgagtaggttggtccgaagtttgaaccggacagaagcgctggtcggcgtctggcgttccaattgcccgggctgttcttgttgacatggaacccaaagttatcaatcaaatgctgtcaaaggctgcccagtctggccaatggaaatatggtcaacatgcatgcttctgtcaaaaacaaggttctggaaacaactgggcatatggttactctgttcatggacccaggcatgaagaatctataatgaacataatccggaaggaagtggagaaatgtgactctttcagtggttttttcatcataatgagtatggctgggggcacaggatcaggattaggagctttcgttacacagaatttagaagatcagtactcaaact

SEQ ID NO: 196114 - DNA, 551 bp, Homo sapiens
  Payload ID: 18688
  Gene Name: tubulin, delta 1
  ENST ID: ENST00000593110
  CDS Start-End: 227-352
gaagttcgtaaattgaaattgaacatgcgtaattaatctttctgaataggaaaaaatatatacacaacaaaactctccgtttatggaacatgcgcatttgttctcagtaagtttttcgttttgaaagtgagcatgcgcatggtgagtaggttggtccgaagtttgaaccggacagaagcgctggtcggcgtctggcgttccaattgcccgggctgttcttgttgacatggaacccaaagttatcaatcaaatgctgtcaaaggctgcccagtctggccaatggaaatatggtcaacatgcatgcttctgtcaaaaacaaggttctggaaacaactgggcatatgggtattgataggcatgtatggcctcctttatcaggacttcctcctcttagtaaaatgtctctcaacaaggacctgcattttaacacttccattgctaacttggtcattcttcgtgggaaagatgtgcaaagtgcagatgtggagggatttaaagatccagctctgtatacttcctggttgaagcctgttaatgctttcaacgtgtgg

SEQ ID NO: 196115 - DNA, 544 bp, Homo sapiens
  Payload ID: 18688
  Gene Name: tubulin, delta 1
  ENST ID: ENST00000592145
  CDS Start-End: 384-544
agctggagcgttcggtggacagtgagcatgcgtaccatatctgaagttcgtaaattgaaattgaacatgcgtaattaatctttctgaataggaaaaaatatatacacaacaaaactctccgtttatggaacatgcgcatttgttctcagtaagtttttcgttttgaaagtgagcatgcgcatggtgagtaggttggtccgaagtttgaaccggacagaagcgctggtcggcgtctggcggaggatgtcactttgtcacccaggctggagtgcggtggcaagatcttggctcactgcagcctggacctcccaggctcaggggatcctcccacctcagcctcccgagtagctgggactgcaggcgcacaccaccacgccaagctaatggttgtttttagaggtaatacacctagtttgtggctcagcatgtcaattgtaacagtgcaacttggtcagtgtggcaatcagattggttttgaagtttttgatgctttgcttagtgactcacacagttcccagggactctgctctatgagagagaatga

SEQ ID NO: 196116 - DNA, 1577 bp, Homo sapiens
  Payload ID: 18688
  Gene Name: tubulin, delta 1
  ENST ID: ENST00000591548
  CDS Start-End: 285-662
attgtcagctggagcgttcggtggacagtgagcatgcgtaccatatctgaagttcgtaaattgaaattgaacatgcgtaattaatctttctgaataggaaaaaatatatacacaacaaaactctccgtttatggaacatgcgcatttgttctcagtaagtttttcgttttgaaagtgagcatgcgcatggtgagtaggttggtccgaagtttgaaccggacagaagcgctggtcggcgtctggcggttgtttttagaggtaatacacctagtttgtggctcagcatgtcaattgtaacagtgcaacttggtcagtgtggcaatcagattggttttgaagtttttgatgctttgcttagtgactcacacagttcccagggactctgctctatgagagagaatgaggcatatcaagcatcttgcaaagaaagattcttcagtgaggaggagaatggagttccaattgcccgggctgttcttgttgacatggaacccaaagttatcaatcaaatgctgtcaaaggctgcccagtctggccaatggaaatatggtcaacatgcatgcttctgtcaaaaacaaggttctggaaacaactgggcatatggtagagacaaggattcagcatgttacccagactggtctggaactcctggcctccagtgatccacctgcctcggcctcccaaagtgctgagattacagttactctgttcatggacccaggcatgaagaatctataatgaacataatccggaaggaagtggagaaatgtgactctttcagtggttttttcatcataatgagtatggctgggggcacaggatcaggattaggagctttcgttacacagaatttagaagatcagtactcaaactcattgaaaatgaatcagattatttggccttatggaactggtgaggttattgttcaaaactacaactccattttgacactttctcacttgtaccgatcttcagacgccctccttcttcatgagaatgatgccatccataagatctgtgcaaaactgatgaatatcaagcagatctcctttagtgatatcaatcaagtcctcgcacatcagctgggaagtgtgttccagcctacttattctgcagaaagctcatttcactacagacgaaatccactaggtattgataggcatgtatggcctcctttatcaggacttcctcctcttagtaaaatgtctctcaacaaggacctgcattttaacacttccattgctaacttggtcattcttcgtgggaaagatgtgcaaagtgcagatgtggagggatttaaagatccagctctgtatacttcctggttgaagcctgttaatgctttcaacgtgtggaaaacccagcgggcctttagcaaatatgagaagtctgcagtgttggtcagcaacagccagttcttagtaaaaccacttgatatgattgttgggaaggcatggaatatgtttgcttcaaaagcctacattcatcagtacacaaaatttggaatcgaagaagaggactttttagacagtttcacgtcattagagcaggttgttgccagttactgtaatctctga

SEQ ID NO: 196117 - DNA, 1460 bp, Homo sapiens
  Payload ID: 18688
  Gene Name: tubulin, delta 1
  Uniprot ID: Q9UJT1
  ENST ID: ENST00000592426
  CDS Start-End: 2-1363
catgtcaattgtaacagtgcaacttggtcagtgtggcaatcagattggttttgaagtttttgatgctttgcttagtgactcacacagttcccagggactctgctctatgagagagaatgaggcatatcaagcatcttgcaaagaaagattcttcagtgaggaggagaatggagttccaattgcccgggctgttcttgttgacatggaacccaaagttatcaatcaaatgctgtcaaaggctgcccagtctggccaatggaaatatggtcaacatgcatgcttctgtcaaaaacaaggttctggaaacaactgggcatatggttactctgttcatggacccaggcatgaagaatctataatgaacataatccggaaggaagtggagaaatgtgactctttcagtggttttttcatcataatgagtatggctgggggcacaggatcaggattaggagctttcgttacacagaatttagaagatcagtactcaaactcattgaaaatgaatcagattatttggccttatggaactggtgaggttattgttcaaaactacaactccattttgacactttctcacttgtaccgatcttcagacgccctccttcttcatgagaatgatgccatccataagatctgtgcaaaactgatgaatatcaagcagatctcctttagtgatatcaatcaagtcctcgcacatcagctgggaagtgtgttccagcctacttattctgcagaaagctcatttcactacagacgaaatccactaggagacttaatggagcatttagttccccatcctgaattcaagatgctgagtgttcgtaacattcctcacatgtctgagaattcattggcatacaccacatttacttgggctggcctcctcaagcatttgagacagatgctcatttctaatgcaaagatggaagaaggtattgataggcatgtatggcctcctttatcaggacttcctcctcttagtaaaatgtctctcaacaaggacctgcattttaacacttccattgctaacttggtcattcttcgtgggaaagatgtgcaaagtgcagatgtggagggatttaaagatccagctctgtatacttcctggttgaagcctgttaatgctttcaacgtgtggaaaacccagcgggcctttagcaaatatgagaagtctgcagtgttggtcagcaacagccagttcttagtaaaaccacttgatatgattgttgggaaggcatggaatatgtttgcttcaaaagcctacattcatcagtacacaaaatttggaatcgaagaagaggactttttagacagtttcacgtcattagagcaggttgttgccagttactgtaatctctgatcttgaacaatgggaaaagtataccttaaggcatttctggactaaaatattttcaatactattttctctgtaaagttttcaaagttctccatcctgg

SEQ ID NO: 196118 - DNA, 2184 bp, Homo sapiens
  Payload ID: 18688
  Gene Name: tubulin, delta 1
  Uniprot ID: Q9UJT1
  ENST ID: ENST00000613721
  CDS Start-End: 289-1344
gcgcattgtcagctggagcgttcggtggacagtgagcatgcgtaccatatctgaagttcgtaaattgaaattgaacatgcgtaattaatctttctgaataggaaaaaatatatacacaacaaaactctccgtttatggaacatgcgcatttgttctcagtaagtttttcgttttgaaagtgagcatgcgcatggtgagtaggttggtccgaagtttgaaccggacagaagcgctggtcggcgtctggcggttgtttttagaggtaatacacctagtttgtggctcagcatgtcaattgtaacagtgcaacttggtcagtgtggcaatcagattggttttgaagtttttgatgctttgcttagtgactcacacagttcccagggactctgctctatgagagagaatgaggcatatcaagcatcttgcaaagaaagattcttcagtgaggaggagaatggagttccaattgcccgggctgttcttgttgacatggaacccaaagttatcaatcaaatgctgtcaaaggctgcccagtctggccaatggaaatatggtcaacatgcatgcttctgtcaaaaacaaggttctggaaacaactgggcatatggttactctgttcatggacccaggcatgaagaatctataatgaacataatccggaaggaagtggagaaatgtgactctttcagtggttttttcatcataatgagtatggctgggggcacaggatcaggattaggagctttcgttacacagaatttagaagatcagtactcaaactcattgaaaatgaatcagattatttggccttatggaactggtgaggttattgttcaaaactacaactccattttgacactttctcacttgtaccgatcttcagacgccctccttcttcatgagaatgatgccatccataagatctgtgcaaaactgatgaatatcaagcagatctcctttagtgatatcaatcaagtcctcgcacatcagctgggaagtgtgttccagcctacttattctgcagaaagctcatttcactacagacgaaatccactagagggatttaaagatccagctctgtatacttcctggttgaagcctgttaatgctttcaacgtgtggaaaacccagcgggcctttagcaaatatgagaagtctgcagtgttggtcagcaacagccagttcttagtaaaaccacttgatatgattgttgggaaggcatggaatatgtttgcttcaaaagcctacattcatcagtacacaaaatttggaatcgaagaagaggactttttagacagtttcacgtcattagagcaggttgttgccagttactgtaatctctgatcttgaacaatgggaaaagtataccttaaggcatttctggactaaaatattttcaatactattttctctgtaaagttttcaaagttctccatcctggctaacacggtgaaacaccgtctctaccagaaaatacaaaaaattagccaggcgcggtggcgggtgcctgtagtcccagctactcgggaggctgaggcaggagaatgacgtgaacccaggaggcggagcttgcagtgagccgagatcgcgccactgcactccagcctgggcgacagagcgagactccgtctcaaaaaaaaaaaaaaaaaaaaatgttttcaaagttccattctgttaaagtaaccacgtagaatgctgagtctattctgcatactatgcccacagaaaaggaagaaaactttttaaaatggagaatcgcatgttttcaatgaaaacattcacttggtatttcatttgtaagaaaaaaaaatggtgcttttataaagaactttggggaaacactttgctgaaatgttgggactctggaactagccaagaaaagagaatattctctttgtctacatgttcctaaatctttactccaaaacaactccaaaaacaactcacaaagcatgaaccaaactttcacagcataatttcaagctaaggaattgtaattctgtacttaatatattcatgtttgaaatgaatgctttgaaccacaggagggagatgttgtcaaatgctacagtgtgaacatgtattttgaatattctgtaacagggcaagtttccactctaagcagctatttaaaaataaatatgaggattttggtaataaatgcttatgcttaagtacaaaagt

SEQ ID NO: 196119 - DNA, 2142 bp, Homo sapiens
  Payload ID: 18689
  Gene Name: tubulin, epsilon 1
  Uniprot ID: Q9UJT0
  ENST ID: ENST00000368662
  CDS Start-End: 80-1507
ctctagcagagcgccgttgctgggggaatgcagaagcggccgcgggctagcaagctcccggagccggcggcgcaccaccatgacccagtcggtggtcgtacaggtcggccagtgcggaaaccagatcggctgctgcttctgggacctggcactaagggagcacgccgcggtcaaccagaaaggaatttatgatgaggcaataagcagcttctttagaaatgtggacaccagagtggttggtgatggtggaagtatttccaagggaaaaatatgttctttaaaagcacgagcagtcttgattgatatggaagaaggggtagtgaatgaaattctgcagggaccactgagagatgtatttgatacgaaacagctcatcactgatatttctggctcaggaaataattgggccgtgggtcacaaagttttcggcagtctttaccaagaccagattttagagaaattcagaaagtcggcagagcactgtgattgcttgcagtgtttctttataatacattccatgggaggaggaacaggatctggacttggcacatttcttttaaaggtgcttgaagacgaattcccagaagtatacagatttgtgacttccatttatccttctggtgaggatgatgtcataacctcaccttataatagcatcttggcaatgaaggaacttaatgagcatgcagactgtgtattgcccattgacaatcaatctttatttgacatcattagcaaaatcgacctcatggtgaattctggaaagttgggtacaactgtgaagccaaagagtctggttacttcaagttctggggctttaaaaaagcagcataagaagccctttgatgcaatgaataacattgtggcaaatttgctcctcaacctaacgagctctgcaagatttgaagggtcccttaatatggaccttaatgaaatcagcatgaatttagttccttttcctcaacttcattatctcgtgtcaagcctaacacctctgtatacactgacagatgttaacattcctcctagaagattggatcagatgttttcagatgcctttagtaaagatcaccagctgcttcgggcagaccccaaacacagtctttacctcgcctgtgcactcatggttagaggaaatgtacaaatttcagatcttcgtagaaatattgaaagattaaaaccatctctacaatttgtctcctggaatcaagaaggctggaagaccagcctgtgttccgtacctcctgtgggccattctcattcgttattagctttagcaaataacacatgtgtgaagcccaccttcatggaactgaaagagagattcatgaggctctacaagaaaaaggctcaccttcatcactatctacaagttgaagggatggaagaaagctgtttcacagaagctgtgtcatctttatcagcactcatacaggaatatgaccaactggacgccacaaaaaacatgcctgtgcaggatttacccagactaagcatagctatgtgaaaaagaaaccctcaaaaatactttcttaatttcacattgttttttctgacctttctgtttcaacatttttgtaatttggaaactccagttttttcatattatcgggaaatatttttgtctaaaagagtgatttctgtttaatcgcaatttgttggtaataccaatgtgtgaaattagtgaaatcttagtaccttaacttcaaacatttctcttcagaaaagttcccttttctaaaattgagataacatagttcttgaatattttgctgtatttatagcctcatatttaggcatttatgcactgatgtgtcttcaataaaaatcttgtacagatatatttttataattatttataatttatattttgatattctatttaagttatcctgattctttaaaagtagttattgggagtagaagaacacaatataaatatttccgtgtaatagccaccaacttttcaggcataggttttattacaactgttaaggaggttttgcttcttctttagataacaacttgtttgcccaaaagaatcctaatttgtacacttaacatgtatttgtattaaactttttaaataattgctttcttatcaaaccaattgattttataataaatgtctatatttttcaa

SEQ ID NO: 196120 - DNA, 1645 bp, Homo sapiens
  Payload ID: 18689
  Gene Name: tubulin, epsilon 1
  ENST ID: ENST00000605457
  CDS Start-End: 76-738
agcagagcgccgttgctgggggaatgcagaagcggccgcgggctagcaagctcccggagccggcggcgcaccaccatgacccagtcggtggtcgtacaggtcggccagtgcggaaaccagatcggctgctgcttctgggacctggcactaagggagcacgccgcggtcaaccagaaaggaatttatgatgaggcaataagcagcttctttagaaatgtggacaccagagtggttggtgatggtggaagtatttccaagggaaaaatatgttctttaaaagcacgagcagtcttgattgatatggaagaaggggtagtgaatgaaattctgcagggaccactgagagatgtatttgatacgaaacagctcatcactgatatttctggctcaggaaataattgggccgtgggtcacaaagttttcggcagtctttaccaagaccagattttagagaaattcagaaagtcggcagagcactgtgattgcttgcagtgtttctttataatacattccatgggaggaggaacaggatctggacttggcacatttcttttaaaggtgcttgaagacgaattcccagaagtatacagatttgtgacttccatttatccttctggtgaggatgatgtcataacctcaccttataatagcatcttggcaatgaaggaacttaatgagcatgcagactgtgtattgcccattgacaatcaaaatatcatctacatccactcttcttaatagcttctctcccaatgtttttccctcaaaagtctttatttgacatcattagcaaaatcgacctcatggtgaattctggaaagttgggtacaactgtgaagccaaagagtctggttacttcaagttctggggctttaaaaaagcagcataagaagccctttgatgcaatgaataacattgtggcaaatttgctcctcaacctaacgagctctgcaagatttgaagggtcccttaatatggaccttaatgaaatcagcatgaatttagttccttttcctcaacttcattatctcgtgtcaagcctaacacctctgtatacactgacagatgttaacattcctcctagaagattggatcagatgttttcagatgcctttagtaaagatcaccagctgcttcgggcagaccccaaacacagtctttacctcgcctgtgcactcatggttagaggaaatgtacaaatttcagatcttcgtagaaatattgaaagattaaaaccatctctacaatttgtctcctggaatcaagaaggctggaagaccagcctgtgttccgtacctcctgtgggccattctcattcgttattagctttagcaaataacacatgtgtgaagcccaccttcatggaactgaaagagagattcatgaggctctacaagaaaaaggctcaccttcatcactatctacaagttgaagggatggaagaaagctgtttcacagaagctgtgtcatctttatcagcactcatacaggaatatgaccaactggacgccacaaaaaacatgcctgtgcaggatttacccagactaagcatagctatgtgaaaaagaaaccctcaaaaatactttcttaatttcacattgttttttctgacctttctgtttcaacatttttgtaatttggaaac

SEQ ID NO: 196121 - DNA, 582 bp, Homo sapiens
  Payload ID: 18689
  Gene Name: tubulin, epsilon 1
  ENST ID: ENST00000604967
  CDS Start-End: 33-197
tagcaagctcccggagccggcggcgcaccaccatgacccagtcggtggtcgtacaggtcggccagtgcggaaaccagatcggctgctgcttctgggacctggcactaagggagcacgccgcggtcaaccagaaaggaatttatgatgaggcaataagcagcttctttagaaatgtggacaccaggaaatctaactgaaaagctgtgtaataatctgaaggttgcttggtgaccatggaatcagaccaaaggaagttagttactttaatggctgtcttgattgatatggaagaaggggtagtgaatgaaattctgcagggaccactgagagatgtatttgatacgaaacagctcatcactgatatttctggctcaggaaataattgggccgtgggtcacaaagttttcggcagtctttaccaagaccagattttagagaaattcagaaagtcggcagagcactgtgattgcttgcagtgtttctttataatacattccatgggaggaggaacaggatctggacttggcacatttcttttaaaggtgcttgaagacgaattcccagaagtatacagatttgtga

SEQ ID NO: 196122 - DNA, 959 bp, Homo sapiens
  Payload ID: 18689
  Gene Name: tubulin, epsilon 1
  ENST ID: ENST00000604743
  CDS Start-End: 65-226
gttgctgggggaatgcagaagcggccgcgggctagcaagctcccggagccggcggcgcaccaccatgacccagtcggtggtcgtacaggtcggccagtgcggaaaccagatcggctgctgcttctgggacctggcactaagggagcacgccgcggtcaaccagaaaggaatttatgatgaggcaataagcagcttctttagaaatgtggacaccaggcagtcttgattgatatggaagaaggggtagtgaatgaaattctgcagggaccactgagagatgtatttgatacgaaacagctcatcactgatatttctggctcaggaaataattgggccgtgggtcacaaagttttcggcagtctttaccaagaccagattttagagaaattcagaaagtcggcagagcactgtgattgcttgcagtgtttctttataatacattccatgggaggaggaacaggatctggacttggcacatttcttttaaaggtgcttgaagacgaattcccagaagtatacagatttgtgacttccatttatccttctggtgaggatgatgtcataacctcaccttataatagcatcttggcaatgaaggaacttaatgagcatgcagactgtgtattgcccattgacaatcaatctttatttgacatcattagcaaaatcgacctcatggtgaattctggaaagttgggtacaactgtgaagccaaagagtctggttacttcaagttctggggctttaaaaaagcagcataagaagccctttgatgcaatgaataacattgtggcaaatttgctcctcaacctaacgagctctgcaagatttgaagggtcccttaatatggaccttaatgaaatcagcatgaatttagttccttttcctcaacttcattatctcgtgtcaagcctaacacctctgtatacactgacagatgttaacattcctcctagaag

SEQ ID NO: 196123 - DNA, 1611 bp, Homo sapiens
  Payload ID: 18690
  Gene Name: tubulin, gamma 1
  Uniprot ID: P23258
  ENST ID: ENST00000251413
  CDS Start-End: 63-1418
gcgggctggcgtgcggcgccgttgcgggcgggagcggctgcaacgccggtgcctgaggagcgatgccgagggaaatcatcaccctacagttgggccagtgcggcaatcagattgggttcgagttctggaaacagctgtgcgccgagcatggtatcagccccgagggcatcgtggaggagttcgccaccgagggcactgaccgcaaggacgtctttttctaccaggcagacgatgagcactacatcccccgggccgtgctgctggacttggaaccccgggtgatccactccatcctcaactccccctatgccaagctctacaacccagagaacatctacctgtcggaacatggaggaggagctggcaacaactgggccagcggattctcccagggagaaaagatccatgaggacatttttgacatcatagaccgggaggcagatggtagtgacagtctagagggctttgtgctgtgtcactccattgctggggggacaggctctggactgggttcctacctcttagaacggctgaatgacaggtatcctaagaagctggtgcagacatactcagtgtttcccaaccaggacgagatgagcgatgtggtggtccagccttacaattcactcctcacactcaagaggctgacgcagaatgcagactgtgtggtggtgctggacaacacagccctgaaccggattgccacagaccgcctgcacatccagaacccatccttctcccagatcaaccagctggtgtctaccatcatgtcagccagcaccaccaccctgcgctaccctggctacatgaacaatgacctcatcggcctcatcgcctcgctcattcccaccccacggctccacttcctcatgaccggctacacccctctcactacggaccagtcagtggccagcgtgaggaagaccacggtcctggatgtcatgaggcggctgctgcagcccaagaacgtgatggtgtccacaggccgagaccgccagaccaaccactgctacatcgccatcctcaacatcatccagggagaggtggaccccacccaggtccacaagagcttgcagaggatccgggaacgcaagttggccaacttcatcccgtggggccccgccagcatccaggtggccctgtcgaggaagtctccctacctgccctcggcccaccgggtcagcgggctcatgatggccaaccacaccagcatctcctcgctcttcgagagaacctgtcgccagtatgacaagctgcgtaagcgggaggccttcctggagcagttccgcaaggaggacatgttcaaggacaactttgatgagatggacacatccagggagattgtgcagcagctcatcgatgagtaccatgcggccacacggccagactacatctcctggggcacccaggagcagtgagtcccccaggacagggaccctcatctgccttactggttggcccaagccctgcctgactgaccaccccctcagagcacagatcagggacctcacgcatctctttctcatatacatggactctctgttggcctgcaaacacatttacttctcctcttatgagactatttatctttaataaagcactggatataaa

SEQ ID NO: 196124 - DNA, 847 bp, Homo sapiens
  Payload ID: 18690
  Gene Name: tubulin, gamma 1
  ENST ID: ENST00000591509
  CDS Start-End: 53-847
gtgcggcgccgttgcgggcgggagcggctgcaacgccggtgcctgaggagcgatgccgagggaaatcatcaccctacagttgggccagtgcggcaatcagattgggttcgagttctggaaacagctgtgcgccgagcatggtatcagccccgagggcatcgtggaggagttcgccaccgagggcactgaccgcaaggacgtctttttctaccaggcagacgatgagcactacatcccccgggccgtgctgctggacttggaaccccgggtgatccactccatcctcaactccccctatgccaagctctacaacccagagaacatctacctgtcggaacatggaggaggagctggcaacaactgggccagcggattctcccaggtcgtttcctattccctggcagggcccacaactcgctggggagaaaagatccatgaggacatttttgacatcatagaccgggaggcagatggtagtgacagtctagagggctttgtgctgtgtcactccattgctggggggacaggctctggactgggttcctacctcttagaacggctgaatgacaggtatcctaagaagctggtgcagacatactcagtgtttcccaaccaggacgagatgagcgatgtggtggtccagccttacaattcactcctcacactcaagaggctgacgcagaatgcagactgtgtggtggtgctggacaacacagccctgaaccggattgccacagaccgcctgcacatccagaacccatccttctcccagatcaaccagctggtgtctaccatcatgtcagccagcaccaccaccctgcgctaccctggctacatgaacaatgac

SEQ ID NO: 196125 - DNA, 1505 bp, Homo sapiens
  Payload ID: 18690
  Gene Name: tubulin, gamma 1
  ENST ID: ENST00000589688
  CDS Start-End: 50-457
cggcgccgttgcgggcgggagcggctgcaacgccggtgcctgaggagcgatgccgagggaaatcatcaccctacagttgggccagtgcggcaatcagattgggttcgagttctggaaacagctgtgcgccgagcatggtatcagccccgagggcatcgtggaggagttcgccaccgagggcactgaccgcaaggacgtctttttctaccaggcagacgatgagcactacatcccccgggccgtgctgctggacttggaaccccgggtgatccactccatcctcaactccccctatgccaagctctacaacccagagaacatctacctgtcggaacatggaggaggagctggcaacaactgggccagcggattctcccagggagaaaagatccatgaggacatttttgacatcatagaccgggaggcagatggtagtgacagtctagaggtatcctaagaagctggtgcagacatactcagtgtttcccaaccaggacgagatgagcgatgtggtggtccagccttacaattcactcctcacactcaagaggctgacgcagaatgcagactgtgtggtggtgctggacaacacagccctgaaccggattgccacagaccgcctgcacatccagaacccatccttctcccagatcaaccagctggtgtctaccatcatgtcagccagcaccaccaccctgcgctaccctggctacatgaacaatgacctcatcggcctcatcgcctcgctcattcccaccccacggctccacttcctcatgaccggctacacccctctcactacggaccagtcagtggccagcgtgaggaagaccacggtcctggatgtcatgaggcggctgctgcagcccaagaacgtgatggtgtccacaggccgagaccgccagaccaaccactgctacatcgccatcctcaacatcatccagggagaggtggaccccacccaggtccacaagagcttgcagaggatccgggaacgcaagttggccaacttcatcccgtggggccccgccagcatccaggtggccctgtcgaggaagtctccctacctgccctcggcccaccgggtcagcgggctcatgatggccaaccacaccagcatctcctcgctcttcgagagaacctgtcgccagtatgacaagctgcgtaagcgggaggccttcctggagcagttccgcaaggaggacatgttcaaggacaactttgatgagatggacacatccagggagattgtgcagcagctcatcgatgagtaccatgcggccacacggccagactacatctcctggggcacccaggagcagtgagtcccccaggacagggaccctcatctgccttactggttggcccaagccctgcctgactgaccaccccctcagagcacagatcagggacctcacgcatctctttctcatatacatggactctctgttggcctgcaaacacatttacttctcctcttatgagactatttatctttaataaag

SEQ ID NO: 196126 - DNA, 1761 bp, Homo sapiens
  Payload ID: 18691
  Gene Name: tubulin, gamma 2
  Uniprot ID: Q9NRH3
  ENST ID: ENST00000251412
  CDS Start-End: 200-1555
ggagaaaatgatgcccaggttgggctccccggcccaccggccgaggagaggcctgcgctgcacacgcgcagaccgagcatccgcgtcaagaggcgaagagagcgcgcgctccccacgtcctgcgctcctggctgccgggcattcgtctcagccgtgactctcgccaggccggggctggcgcgcccacgtctgaagagcgatgccccgggagatcatcaccctgcagctgggccagtgcggcaaccagattgggttcgagttctggaaacagctgtgcgccgagcatggtatcagccccgagggcatcgtggaggaattcgccaccgagggcactgaccgcaaggacgtctttttctaccaggcagacgatgagcactacatcccccgggccgtgctgctggacttggaaccccgggtgatccactccatcctcaactccccctatgccaagctctacaacccagagaacatctacctgtcggaacatggaggaggagctggcaacaactgggccagcggattctcccagggtgagaaaattcatgaagacatctttgacatcatagaccgagaagcagatggaagtgacagtttggagggcttcgtgctgtgtcactccatcgctgggggtacgggttctggcctgggctcctacctcctggagcgactgaatgacaggtaccccaagaagctagtgcagacttattcagtgtttccctaccaggacgagatgagcgacgtagtggttcagccctacaattcactcctgacactcaagaggctgacgcagaacgcagattgtgtggtggtgctggacaacacagccctgaaccggattgccacagaccgcctgcacatccagaacccgtccttctcccagatcaaccagctggtgtccaccatcatgtcggccagcaccaccaccctgcgctaccccggctacatgaacaatgacctcatcggcctcatcgcctcgctcattcccaccccacggctccacttcctcatgaccggctacaccccgctcactacagaccagtcagtggccagcgtgaggaagaccacggtcctggatgtcatgaggcggctgctgcagcccaagaacgtgatggtgtccacaggccgagaccgccagaccaaccactgctacatcgccatcctcaacatcatccagggagaggtggaccccacccaggtccacaagagcctgcagaggatccgggaacggaagttggccaacttcatcccgtggggccccgccagcatccaggtggccctgtcgaggaagtctccctacctgccctcggcccaccgggtcagcgggctcatgatggccaaccacaccagcatctcctcgctctttgaaagttcctgccagcagtttgacaagctgcggaagcgggatgccttcctcgagcagttccgtaaggaggacatgttcaaggacaactttgatgagatggacaggtctagggaggttgttcaggagctcattgatgagtaccatgcggccacccagccagactacatttcctggggcacccaggagcagtgatttccctccccactactccttctccttctagatggtaaccacagcctcgaccatgcctgctccctctgacccagcttcacctcatggacaacccttcttggttcatctccagcccgtgagctggtcctgcttcctcccttccatgccctaacttttaatatgcttgttcagctctaataaagtaataaagcttggttgtcagtata

SEQ ID NO: 196127 - DNA, 3885 bp, Homo sapiens
  Payload ID: 18692
  Gene Name: tubulin, gamma complex associated protein 2
  Uniprot ID: Q9BSJ2
  ENST ID: ENST00000252936
  CDS Start-End: 41-2749
ggagaacatattgtgatgttcgtgcctcagagctaaaactatgagtgaatttcggattcaccatgacgtcaatgaactgcttagcctgctgcgtgtccacggaggagatggggctgaggtctacattgacctgcttcaaaagaacaggaccccgtacgtcactaccactgtctctgctcacagtgccaaggttaaaattgcagagttttctcgtactccagaagactttctaaagaaatatgatgaactgaaatctaaaaatacaaggaaccttgacccgctggtgtacctgttgtcaaagctcacggaagacaaagagactctgcagtacttacaacagaatgcaaaagaaagagctgagcttgcagccgctgctgtgggcagcagtaccaccagcatcaacgtccctgccgcggcctccaagatctccatgcaggagcttgaggaactgaggaagcagcttggcagcgtggccacaggctccacgctgcagcagtctctggaacttaaaagaaagatgcttcgagacaagcagaacaaaaaaaattcaggccagcacctccccatcttcccagcatgggtgtatgagagacctgccctgatcggggatttcctgattggtgctggcatcagcacagacaccgctttgccgataggcacgttgcccctggcctcgcaggagtcggccgtggtggaggacctgctgtacgtgctggtgggcgtggacgggaggtacgtcagtgctcagcccctggctgggaggcagagccggaccttcctcgtggaccccaacctggacctgtccatcagggagctggtgcacaggatcctcccagtggccgccagctactccgctgtgaccaggttcattgaagagaagtcttccttcgagtacgggcaggtgaaccacgccctggcggccgccatgcgcaccctggtgaaggagcacctgattctggtgtcacagctggagcagctgcacaggcagggcctcctttcgctgcagaagctctggttctacatccagccagccatgcgcaccatggacatcctggcctccctcgccacctcggtggacaaaggcgaatgtcttggggggtccacgctgagcctgctccacgacaggagcttcagctacacaggggacagccaggcgcaggagctatgcctgtacctaaccaaggcggccagtgctccctacttcgaggttctggagaagtggatctacaggggcatcatccacgacccatacagtgagtttatggtcgaggagcacgagctgcggaaggagaggatccaggaggattacaacgacaagtactgggaccagcggtacaccatcgtccagcagcagatcccgtccttcctgcagaaaatggcggacaagatcctcagcacaggaaaatatctaaatgtggtcagagagtgtggccatgacgtcacctgcccggtggctaaagagatcatctacacgttaaaagagcgggcgtatgtggagcagatcgagaaggcgtttaactacgccagcaaggtgctgctggacttcctgatggaggagaaggagctggtggctcacctcaggtccatcaagcgctacttcctcatggaccagggcgacttcttcgtgcacttcatggacctcgcggaggaggagctccggaagccggtggaggacatcacgccccctcgcctggaagcgctcctggagctggcgctgcgcatgagcacggccaacactgaccccttcaaggacgacctcaagatcgacctgatgccccatgacctcatcactcagctcttgcgcgtcctggccatcgagaccaagcaggagaaggcgatggcgcacgccgaccccacggagctggcgctgagcggcctggaggccttctctttcgactacatcgtcaagtggcccctttcgctcatcatcaacaggaaagccctcactcgctaccagatgctcttcaggcacatgttctactgcaagcacgtggagcggcagctctgcagcgtctggatcagcaacaaaaccgccaagcagcactcgctgcactccgcccagtggtttgctggggctttcactctgcggcagcgaatgctcaacttcgtccagaatattcaatactacatgatgtttgaagtgatggaaccgacctggcacatcctggagaaaaacctgaaatccgcctccaacattgacgacgtccttggccaccacacaggcttcctggacacctgcctgaaggactgcatgctcaccaaccccgagctgctgaaggtcttctccaagctcatgtctgtgtgcgtcatgttcaccaactgcatgcagaaatttacacagagcatgaaattagatggcgagctgggcgggcagacgctggagcacagcaccgtcctggggctgcccgcaggggccgaggagcgggcccggaaggagctcgccaggaagcacctggctgagcacgcagacactgtgcagctggtgtccggcttcgaggccaccatcaacaagtttgacaagaacttctcagcccacctgctggacctcctggcccggctgagcatctatagcaccagtgactgtgagcacggcatggccagcgtcatctccaggcttgacttcaatggtttctacacggagcgcctggagcgcctgtctgcagagaggagccagaaggccaccccccaagtgcctgtcctgcgggggcccccggctcctgcacccagggtcgcagtcaccgcacagtgagccctggctgtgacaggaaggaagggtgtggggtcagcagggactggtgcaaatgggtccagaattttcaaatcgaatgctctgtgttctgtctttgcagtttaaatataaagcaggaatgattgactcagctcactttgtttctcaaggcgctgggtttcgttttatagaagctgcccaggcagggtggatgtctccctggatttgctaatctgtttgctttttgaaattacactatcacctttttgggtgtttttggcctcaaagtggaaatacatggtgtttaagccaggagcaagcaaagatgcatgtggggtaagatccaggcctggtgtccacatctttccgggtgagctggggccgggcttcctgaggtctgtcggaaccgggacaagcctctggaaacggtcagggagttgtggaaacccaccgggcatcgggtgtcgggtttgctttggccccagaggcagccccgttccttctcctgaggactcacccgcctccacgaccctcctcctgctgctgctccaactggtccagggcaggaggccacagacagggccctcaggcaccctgggagcccacacctccccctccgtgggagtgggtcgaggggcaggctctgctgctggctggaaaccccaccccgccctatccggtaccgccttgttacgtagaacttactcagcagactgacacccaatccccctcgggcgatcatctgccctgtcttcccacctccagggctacagtgggcagcaccgccatccccagtgtgacagggccctgggagcctcagggctgcccggccaggttggtctgctctggttacattctggccaagctgccccttcctgctgacctgcatgtgtattgttgtcaccttcagctctcagcacctcggcccccttgggcagtgaggaagggccctggaggcgaggttgggagaaaggatagctagaacaggatcctgcggggaacaagggttgtgggcagctctcacccggggctgcctcactgagagcaccgccgagtgggggtgggggtgtccaactctccagccacaaaccgcttcctccttgtctgcaggctgtgcaggtctggcctgtgagtaaacacatttatcagcaacccaa

SEQ ID NO: 196128 - DNA, 2685 bp, Homo sapiens
  Payload ID: 18692
  Gene Name: tubulin, gamma complex associated protein 2
  ENST ID: ENST00000368562
  CDS Start-End: 1073-2560
ctggtggggtctgtcggcttctcttcagtgcgatatatttaaatggataaaaatatgttagttcccaaagaattgtattatgtctattacgtcaagataccgttgttgaaatattttcaaaaaatacattagtgatgtggaaatgttatttctttactaatggaccaaataaaatctggtataatgggcacctttaaagaaagcaccttcacacttgaagtgcgtaaatgatgtttgaagttgttcagatgatgacgtggagatgtctggtttctgtcaatgttggccccgcctaccccacacgagcatcattttgggtgtcagggccccacgcaccccacacgagcatcattttgttgcctgggctcatcatggaaggaaatgctaaattccaaaaagaggtgggtgcagataaagacaaatcagtttcccacctatctctgcggaccgtacattctccctgagcccaggttaaatactccgttccagagcgaggtttgtaggtttgttggttttcttttttttttttttctttttttttttgaggcagagtctcgctccattgccaggctggagtgcagtggcatgatctcggctcgctgcaacccccacctcccaggttcaagcgattcccctgccttaacctcccaagtagctgggactacaggtgcacaccaccacgcccagctgattttttgtattttagtagagacggggtttcactgtgttggccaggatggtcttgatctcttgacttcgtgatctgcccacctcagcctcccaaagtgctggggttacaggcgtgagccactgtgcccggcccctaggttcgttttagccgagaagtgttggggttacaggcgtgagccaccgtgcccggcccctaggttcgttttagcccacagttgagaagtaactggtagattaggctcggcccttgtggaacgttacttggaagtgtgctggcctctgttaatgtccctgcgcgctgccggcctggagaagtgtcgcctgcctcaggcgcccttgctttgcctgtgaccgaagcgctccctgtggttttagtgagtttatggtcgaggagcacgagctgcggaaggagaggatccaggaggattacaacgacaagtactgggaccagcggtacaccatcgtccagcagcagatcccgtccttcctgcagaaaatggcggacaagatcctcagcacaggaaaatatctaaatgtggtcagagagtgtggccatgacgtcacctgcccggtggctaaagagatcatctacacgttaaaagagcgggcgtatgtggagcagatcgagaaggcgtttaactacgccagcaaggtgctgctggacttcctgatggaggagaaggagctggtggctcacctcaggtccatcaagcgctacttcctcatggaccagggcgacttcttcgtgcacttcatggacctcgcggaggaggagctccggaagccggtggaggacatcacgccccctcgcctggaagcgctcctggagctggcgctgcgcatgagcacggccaacactgaccccttcaaggacgacctcaagatcgacctgatgccccatgacctcatcactcagctcttgcgcgtcctggccatcgagaccaagcaggagaaggcgatggcgcacgccgaccccacggagctggcgctgagcggcctggaggccttctctttcgactacatcgtcaagtggcccctttcgctcatcatcaacaggaaagccctcactcgctaccagatgctcttcaggcacatgttctactgcaagcacgtggagcggcagctctgcagcgtctggatcagcaacaaaaccgccaagcagcactcgctgcactccgcccagtggtttgctggggctttcactctgcggcagcgaatgctcaacttcgtccagaatattcaatactacatgatgtttgaagtgatggaaccgacctggcacatcctggagaaaaacctgaaatccgcctccaacattgacgacgtccttggccaccacacaggcttcctggacacctgcctgaaggactgcatgctcaccaaccccgagctgctgaaggtcttctccaagctcatgtctgtgtgcgtcatgttcaccaactgcatgcagaaatttacacagagcatgaaattagatggcgagctgggcgggcagacgctggagcacagcaccgtcctggggctgcccgcaggggccgaggagcgggcccggaaggagctcgccaggaagcacctggctgagcacgcagacactgtgcagctggtgtccggcttcgaggccaccatcaacaagtttgacaagaacttctcagcccacctgctggacctcctggcccggctgagcatctatagcaccagtgactgtgagcacggcatggccagcgtcatctccaggcttgacttcaatggtttctacacggagcgcctggagcgcctgtctgcagagaggagccagaaggccaccccccaagtgcctgtcctgcgggggcccccggctcctgcacccagggtcgcagtcaccgcacagtgagccctggctgtgacaggaaggaagggtgtggggtcagcagggactggtgcaaatgggtccagaattttcaaatcgaatgctctgtgttctgtctttgcagtttaaatataaagcaggaatgattg

SEQ ID NO: 196129 - DNA, 4218 bp, Homo sapiens
  Payload ID: 18692
  Gene Name: tubulin, gamma complex associated protein 2
  Uniprot ID: Q9BSJ2
  ENST ID: ENST00000368563
  CDS Start-End: 374-3082
ctcgccgccgtaggccccactggatcctacaactactttttccctcttttgctcacgcacctcgaagaactggtgctcccgcgggaagcgcacggggcgcgcaacgaagcgaaagggcgcggccccagccgcgggatcccgctctacaggcagcggctccgccgccccgggccccgcagcgaggcgggcgcacagcgcggggggcaactgcatcaccccgggcgcgggcgggcgcagcctgtcggccaccgtccgcgagccgagccggacgtgacgtcacgctcacttccgccgccgtcgggggctgcgcgggggctgtggctccgggactgcggagaacatattgtgatgttcgtgcctcagagctaaaactatgagtgaatttcggattcaccatgacgtcaatgaactgcttagcctgctgcgtgtccacggaggagatggggctgaggtctacattgacctgcttcaaaagaacaggaccccgtacgtcactaccactgtctctgctcacagtgccaaggttaaaattgcagagttttctcgtactccagaagactttctaaagaaatatgatgaactgaaatctaaaaatacaaggaaccttgacccgctggtgtacctgttgtcaaagctcacggaagacaaagagactctgcagtacttacaacagaatgcaaaagaaagagctgagcttgcagccgctgctgtgggcagcagtaccaccagcatcaacgtccctgccgcggcctccaagatctccatgcaggagcttgaggaactgaggaagcagcttggcagcgtggccacaggctccacgctgcagcagtctctggaacttaaaagaaagatgcttcgagacaagcagaacaaaaaaaattcaggccagcacctccccatcttcccagcatgggtgtatgagagacctgccctgatcggggatttcctgattggtgctggcatcagcacagacaccgctttgccgataggcacgttgcccctggcctcgcaggagtcggccgtggtggaggacctgctgtacgtgctggtgggcgtggacgggaggtacgtcagtgctcagcccctggctgggaggcagagccggaccttcctcgtggaccccaacctggacctgtccatcagggagctggtgcacaggatcctcccagtggccgccagctactccgctgtgaccaggttcattgaagagaagtcttccttcgagtacgggcaggtgaaccacgccctggcggccgccatgcgcaccctggtgaaggagcacctgattctggtgtcacagctggagcagctgcacaggcagggcctcctttcgctgcagaagctctggttctacatccagccagccatgcgcaccatggacatcctggcctccctcgccacctcggtggacaaaggcgaatgtcttggggggtccacgctgagcctgctccacgacaggagcttcagctacacaggggacagccaggcgcaggagctatgcctgtacctaaccaaggcggccagtgctccctacttcgaggttctggagaagtggatctacaggggcatcatccacgacccatacagtgagtttatggtcgaggagcacgagctgcggaaggagaggatccaggaggattacaacgacaagtactgggaccagcggtacaccatcgtccagcagcagatcccgtccttcctgcagaaaatggcggacaagatcctcagcacaggaaaatatctaaatgtggtcagagagtgtggccatgacgtcacctgcccggtggctaaagagatcatctacacgttaaaagagcgggcgtatgtggagcagatcgagaaggcgtttaactacgccagcaaggtgctgctggacttcctgatggaggagaaggagctggtggctcacctcaggtccatcaagcgctacttcctcatggaccagggcgacttcttcgtgcacttcatggacctcgcggaggaggagctccggaagccggtggaggacatcacgccccctcgcctggaagcgctcctggagctggcgctgcgcatgagcacggccaacactgaccccttcaaggacgacctcaagatcgacctgatgccccatgacctcatcactcagctcttgcgcgtcctggccatcgagaccaagcaggagaaggcgatggcgcacgccgaccccacggagctggcgctgagcggcctggaggccttctctttcgactacatcgtcaagtggcccctttcgctcatcatcaacaggaaagccctcactcgctaccagatgctcttcaggcacatgttctactgcaagcacgtggagcggcagctctgcagcgtctggatcagcaacaaaaccgccaagcagcactcgctgcactccgcccagtggtttgctggggctttcactctgcggcagcgaatgctcaacttcgtccagaatattcaatactacatgatgtttgaagtgatggaaccgacctggcacatcctggagaaaaacctgaaatccgcctccaacattgacgacgtccttggccaccacacaggcttcctggacacctgcctgaaggactgcatgctcaccaaccccgagctgctgaaggtcttctccaagctcatgtctgtgtgcgtcatgttcaccaactgcatgcagaaatttacacagagcatgaaattagatggcgagctgggcgggcagacgctggagcacagcaccgtcctggggctgcccgcaggggccgaggagcgggcccggaaggagctcgccaggaagcacctggctgagcacgcagacactgtgcagctggtgtccggcttcgaggccaccatcaacaagtttgacaagaacttctcagcccacctgctggacctcctggcccggctgagcatctatagcaccagtgactgtgagcacggcatggccagcgtcatctccaggcttgacttcaatggtttctacacggagcgcctggagcgcctgtctgcagagaggagccagaaggccaccccccaagtgcctgtcctgcgggggcccccggctcctgcacccagggtcgcagtcaccgcacagtgagccctggctgtgacaggaaggaagggtgtggggtcagcagggactggtgcaaatgggtccagaattttcaaatcgaatgctctgtgttctgtctttgcagtttaaatataaagcaggaatgattgactcagctcactttgtttctcaaggcgctgggtttcgttttatagaagctgcccaggcagggtggatgtctccctggatttgctaatctgtttgctttttgaaattacactatcacctttttgggtgtttttggcctcaaagtggaaatacatggtgtttaagccaggagcaagcaaagatgcatgtggggtaagatccaggcctggtgtccacatctttccgggtgagctggggccgggcttcctgaggtctgtcggaaccgggacaagcctctggaaacggtcagggagttgtggaaacccaccgggcatcgggtgtcgggtttgctttggccccagaggcagccccgttccttctcctgaggactcacccgcctccacgaccctcctcctgctgctgctccaactggtccagggcaggaggccacagacagggccctcaggcaccctgggagcccacacctccccctccgtgggagtgggtcgaggggcaggctctgctgctggctggaaaccccaccccgccctatccggtaccgccttgttacgtagaacttactcagcagactgacacccaatccccctcgggcgatcatctgccctgtcttcccacctccagggctacagtgggcagcaccgccatccccagtgtgacagggccctgggagcctcagggctgcccggccaggttggtctgctctggttacattctggccaagctgccccttcctgctgacctgcatgtgtattgttgtcaccttcagctctcagcacctcggcccccttgggcagtgaggaagggccctggaggcgaggttgggagaaaggatagctagaacaggatcctgcggggaacaagggttgtgggcagctctcacccggggctgcctcactgagagcaccgccgagtgggggtgggggtgtccaactctccagccacaaaccgcttcctccttgtctgcaggctgtgcaggtctggcctgtgagtaaacacatttatcagcaacccaa

SEQ ID NO: 196130 - DNA, 4029 bp, Homo sapiens
  Payload ID: 18692
  Gene Name: tubulin, gamma complex associated protein 2
  Uniprot ID: Q9BSJ2
  ENST ID: ENST00000417178
  CDS Start-End: 575-2893
ctcgccgccgtaggccccactggatcctacaactactttttccctcttttgctcacgcacctcgaagaactggtgctcccgcgggaagcgcacggggcgcgcaacgaagcgaaagggcgcggccccagccgcgggatcccgctctacaggcagcggctccgccgccccgggccccgcagcgaggcgggcgcacagcgcggggggcaactgcatcaccccgggcgcgggcgggcgcagcctgtcggccaccgtccgcgagccgagccggacgtgacgtcacgctcacttccgccgccgtcgggggctgcgcgggggctgtggctccgggactgcggttaaaattgcagagttttctcgtactccagaagactttctaaagaaatatgatgaactgaaatctaaaaatacaaggaaccttgacccgctggtgtacctgttgtcaaagctcacggaagacaaagagactctgcagtacttacaacagaatgcaaaagaaagagctgagcttgcagccgctgctgtgggcagcagtaccaccagcatcaacgtccctgccgcggcctccaagatctccatgcaggagcttgaggaactgaggaagcagcttggcagcgtggccacaggctccacgctgcagcagtctctggaacttaaaagaaagatgcttcgagacaagcagaacaaaaaaaattcaggccagcacctccccatcttcccagcatgggtgtatgagagacctgccctgatcggggatttcctgattggtgctggcatcagcacagacaccgctttgccgataggcacgttgcccctggcctcgcaggagtcggccgtggtggaggacctgctgtacgtgctggtgggcgtggacgggaggtacgtcagtgctcagcccctggctgggaggcagagccggaccttcctcgtggaccccaacctggacctgtccatcagggagctggtgcacaggatcctcccagtggccgccagctactccgctgtgaccaggttcattgaagagaagtcttccttcgagtacgggcaggtgaaccacgccctggcggccgccatgcgcaccctggtgaaggagcacctgattctggtgtcacagctggagcagctgcacaggcagggcctcctttcgctgcagaagctctggttctacatccagccagccatgcgcaccatggacatcctggcctccctcgccacctcggtggacaaaggcgaatgtcttggggggtccacgctgagcctgctccacgacaggagcttcagctacacaggggacagccaggcgcaggagctatgcctgtacctaaccaaggcggccagtgctccctacttcgaggttctggagaagtggatctacaggggcatcatccacgacccatacagtgagtttatggtcgaggagcacgagctgcggaaggagaggatccaggaggattacaacgacaagtactgggaccagcggtacaccatcgtccagcagcagatcccgtccttcctgcagaaaatggcggacaagatcctcagcacaggaaaatatctaaatgtggtcagagagtgtggccatgacgtcacctgcccggtggctaaagagatcatctacacgttaaaagagcgggcgtatgtggagcagatcgagaaggcgtttaactacgccagcaaggtgctgctggacttcctgatggaggagaaggagctggtggctcacctcaggtccatcaagcgctacttcctcatggaccagggcgacttcttcgtgcacttcatggacctcgcggaggaggagctccggaagccggtggaggacatcacgccccctcgcctggaagcgctcctggagctggcgctgcgcatgagcacggccaacactgaccccttcaaggacgacctcaagatcgacctgatgccccatgacctcatcactcagctcttgcgcgtcctggccatcgagaccaagcaggagaaggcgatggcgcacgccgaccccacggagctggcgctgagcggcctggaggccttctctttcgactacatcgtcaagtggcccctttcgctcatcatcaacaggaaagccctcactcgctaccagatgctcttcaggcacatgttctactgcaagcacgtggagcggcagctctgcagcgtctggatcagcaacaaaaccgccaagcagcactcgctgcactccgcccagtggtttgctggggctttcactctgcggcagcgaatgctcaacttcgtccagaatattcaatactacatgatgtttgaagtgatggaaccgacctggcacatcctggagaaaaacctgaaatccgcctccaacattgacgacgtccttggccaccacacaggcttcctggacacctgcctgaaggactgcatgctcaccaaccccgagctgctgaaggtcttctccaagctcatgtctgtgtgcgtcatgttcaccaactgcatgcagaaatttacacagagcatgaaattagatggcgagctgggcgggcagacgctggagcacagcaccgtcctggggctgcccgcaggggccgaggagcgggcccggaaggagctcgccaggaagcacctggctgagcacgcagacactgtgcagctggtgtccggcttcgaggccaccatcaacaagtttgacaagaacttctcagcccacctgctggacctcctggcccggctgagcatctatagcaccagtgactgtgagcacggcatggccagcgtcatctccaggcttgacttcaatggtttctacacggagcgcctggagcgcctgtctgcagagaggagccagaaggccaccccccaagtgcctgtcctgcgggggcccccggctcctgcacccagggtcgcagtcaccgcacagtgagccctggctgtgacaggaaggaagggtgtggggtcagcagggactggtgcaaatgggtccagaattttcaaatcgaatgctctgtgttctgtctttgcagtttaaatataaagcaggaatgattgactcagctcactttgtttctcaaggcgctgggtttcgttttatagaagctgcccaggcagggtggatgtctccctggatttgctaatctgtttgctttttgaaattacactatcacctttttgggtgtttttggcctcaaagtggaaatacatggtgtttaagccaggagcaagcaaagatgcatgtggggtaagatccaggcctggtgtccacatctttccgggtgagctggggccgggcttcctgaggtctgtcggaaccgggacaagcctctggaaacggtcagggagttgtggaaacccaccgggcatcgggtgtcgggtttgctttggccccagaggcagccccgttccttctcctgaggactcacccgcctccacgaccctcctcctgctgctgctccaactggtccagggcaggaggccacagacagggccctcaggcaccctgggagcccacacctccccctccgtgggagtgggtcgaggggcaggctctgctgctggctggaaaccccaccccgccctatccggtaccgccttgttacgtagaacttactcagcagactgacacccaatccccctcgggcgatcatctgccctgtcttcccacctccagggctacagtgggcagcaccgccatccccagtgtgacagggccctgggagcctcagggctgcccggccaggttggtctgctctggttacattctggccaagctgccccttcctgctgacctgcatgtgtattgttgtcaccttcagctctcagcacctcggcccccttgggcagtgaggaagggccctggaggcgaggttgggagaaaggatagctagaacaggatcctgcggggaacaagggttgtgggcagctctcacccggggctgcctcactgagagcaccgccgagtgggggtgggggtgtccaactctccagccacaaaccgcttcctccttgtctgcaggctgtgcaggtctggcctgtgagtaaacacatttatcagcaacccaa

SEQ ID NO: 196131 - DNA, 3553 bp, Homo sapiens
  Payload ID: 18692
  Gene Name: tubulin, gamma complex associated protein 2
  ENST ID: ENST00000482278
  CDS Start-End: 758-2923
taaaatcaactttaactagaaaggcagacggcacaggtgacgctagaaaggcagacagtacaggtcatgctagaaaggcagacggcacaggtcatgctaggaaggcagacggcacaggtgacgctagaaacgcagacggcacaggtgacgctagaaacgcagacggcacaggtgatgctattaaggcagacgcctgggttgtgactgaagcaactgcaagtgagactctttccatcccactcagacaatgaggaaaagtgagtggtgcttggcattcctgcgcttcaatggctcaaaaacagagtatgcgagagaaactaagttattcacaggacctgagatatctggactttcttctctggcggaagccgattttcttacccagcgttacctttctgaattcagtatgagaagagctgcggcccaggtgcagcccagaatcctcagcaccgaacacatgttgagaacgggtttcagaaagagctcagacactgacctatgtctgtagatccgcctctcacctgccggtgcaggggaggctgccacaggctcagagcagatttccatggcctccccttctgaccgctctccactgtcccctggggcttctgctgaggctgggctgcggggagagagcagtgagtaactgccctgcacggctcccacagcccctgtgttccccagaaatgaacatgcaagaaagaaactggatttccctgagaacatattgtgatgttcgtgcctcagagctaaaactatgagtgaatttcggattcaccatgacgtcaatgaactgcttagcctgctgcgtgtccacggaggagatggggctgaggtctacattgacctgcttcaaaagaacaggaccccgtacgtcactaccactgtctctgctcacagtgccaaggttaaaattgcagagttttctcgtactccagaagactttctaaagaaatatgatgaactgaaatctaaaaatacaaggaaccttgacccgctggtgtacctgttgtcaaagctcacggaagacaaagagactctgcagtacttacaacagaatgcaaaagaaagagctgagcttgcagccgctgctgtgggcagcagtaccaccagcatcaacgtccctgccgcggcctccaagatctccatgcaggagcttgaggaactgaggaagcagcttggcagcgtggccacaggctccacgctgcagcagtctctggaacttaaaagaaagatgcttcgagacaagcagaacaaaaaaaattcaggccagcacctccccatcttcccagcatgggtgtatgagagacctgccctgatcggggatttcctgattggtgctggcatcagcacagacaccgctttgccgataggcacgttgcccctggcctcgcaggagtcggccgtggtggaggacctgctgtacgtgctggtgggcgtggacgggaggtacgtcagtgctcagcccctggctgggaggcagagccggaccttcctcgtggaccccaacctggacctgtccatcagggagctggtgcacaggatcctcccagtggccgccagctactccgctgtgaccaggttcattgaagagaagtcttccttcgagtacgggcaggtgaaccacgccctggcggccgccatgcgcaccctggtgaaggagcacctgattctggtgtcacagctggagcagctgcacaggcagggcctcctttcgctgcagaagctctggttctacatccagccagccatgcgcaccatggacatcctggcctccctcgccacctcggtggacaaaggcgaatgtcttggggggtccacgctgagcctgctccacgacaggagcttcagctacacaggggacagccaggcgcaggagctatgcctgtacctaaccaaggcggccagtgctccctacttcgaggttctggagaagtggatctacaggggcatcatccacgacccatacagtgagtttatggtcgaggagcacgagctgcggaaggagaggatccaggaggattacaacgacaagtactgggaccagcggtacaccatcgtccagcagcagatcccgtccttcctgcagaaaatggcggacaagatcctcagcacaggaaaatatctaaatgtggtcagagagtgtggccatgacgtcacctgcccggtggctaaagagatcatctacacgttaaaagagcgggcgtatgtggagcagatcgagaaggcgtttaactacgccagcaaggtgctgctggacttcctgatggaggagaaggagctggtggctcacctcaggtccatcaagcgctacttcctcatggaccagggcgacttcttcgtgcacttcatggacctcgcggaggaggagctccggaagccggtggaggacatcacgccccctcgcctggaagcgctcctggagctggcgctgcgcatgagcacggccaacactgaccccttcaaggacgacctcaagatcgacctgatgccccatgacctcatcactcagctcttgcgcgtcctggccatcgagaccaagcaggagaaggcgatggcgcacgccgaccccacggagctggcgctgagcggcctggaggccttctctttcgactacatcgtcaagtggcccctttcgctcatcatcaacaggaaagccctcactcgctaccagatgctcttcaggcacatgttctactgcaagcacgtggagcggcagctctgcagcgtctggatcagcaacaaaaccgccaagcagcactcgctgcactccgcccagtggtttgctggggctttcactctgcggcagcgaatgctcaacttcgtccagaatattcaatactacatgatgtttgaagtgatggaaccgacctggcacatcctggagaaaaacctgaaatccgcttcctggacacctgcctgaaggactgcatgctcaccaaccccgagctgctgaaggtcttctccaagctcatgtctgtgtgcgtcatgttcaccaactgcatgcagaaatttacacagagcatgaaattagatggcgagctgggcgggcagacgctggagcacagcaccgtcctggggctgcccgcaggggccgaggagcgggcccggaaggagctcgccaggaagcacctggctgagcacgcagacactgtgcagctggtgtccggcttcgaggccaccatcaacaagtttgacaagaacttctcagcccacctgctggacctcctggcccggctgagcatctatagcaccagtgactgtgagcacggcatggccagcgtcatctccaggcttgacttcaatggtttctacacggagcgcctggagcgcctgtctgcagagaggagccagaaggccaccccccaagtgcctgtcctgcgggggcccccggctcctgcacccagggtcgcagtcaccgcacagtgagccctggctgtgacaggaaggaagggtgtggggtcagcagggactggtgcaaatgggtccagaattttcaaatcgaatgctctgtgttctgtctttgcagtttaaatataaagcaggaatgatt

SEQ ID NO: 196132 - DNA, 4302 bp, Homo sapiens
  Payload ID: 18692
  Gene Name: tubulin, gamma complex associated protein 2
  Uniprot ID: Q9BSJ2
  ENST ID: ENST00000543663
  CDS Start-End: 374-3166
ctcgccgccgtaggccccactggatcctacaactactttttccctcttttgctcacgcacctcgaagaactggtgctcccgcgggaagcgcacggggcgcgcaacgaagcgaaagggcgcggccccagccgcgggatcccgctctacaggcagcggctccgccgccccgggccccgcagcgaggcgggcgcacagcgcggggggcaactgcatcaccccgggcgcgggcgggcgcagcctgtcggccaccgtccgcgagccgagccggacgtgacgtcacgctcacttccgccgccgtcgggggctgcgcgggggctgtggctccgggactgcggagaacatattgtgatgttcgtgcctcagagctaaaactatgagtgaatttcggattcaccatgacgtcaatgaactgcttagcctgctgcgtgtccacggaggagatggggctgaggtctacattgacctgcttcaaaagaacaggaccccgtacgtcactaccactgtctctgctcacagtgccaaggttaaaattgcagagttttctcgtactccagaagactttctaaagaaatatgatgaactgaaatctaaaaatacaaggaaccttgacccgctggtgtacctgttgtcaaagctcacggaagacaaagagactctgcagtacttacaacagaatgcaaaagaaagagctgagcttgcagccgctgctgtgggcagcagtaccaccagcatcaacgtccctgccgcggcctccaagatctccatgcaggagcttgaggaactgaggaagcagcttggcagcgtggccacaggctccacgctgcagcagtctctggaacttaaaagaaagatgcttcgagacaagcagaacaaaaaaaattcaggccagcacctccccatcttcccagcatgggtgtatgagagacctgccctgatcggggatttcctgattggtgctggcatcagcacagacaccgctttgccgatagttcttttgagatggaatctcgctctgtcgcccaggctgaagtgcagtggcgtgatctcggcacactgcaacctccacctcccaggcacgttgcccctggcctcgcaggagtcggccgtggtggaggacctgctgtacgtgctggtgggcgtggacgggaggtacgtcagtgctcagcccctggctgggaggcagagccggaccttcctcgtggaccccaacctggacctgtccatcagggagctggtgcacaggatcctcccagtggccgccagctactccgctgtgaccaggttcattgaagagaagtcttccttcgagtacgggcaggtgaaccacgccctggcggccgccatgcgcaccctggtgaaggagcacctgattctggtgtcacagctggagcagctgcacaggcagggcctcctttcgctgcagaagctctggttctacatccagccagccatgcgcaccatggacatcctggcctccctcgccacctcggtggacaaaggcgaatgtcttggggggtccacgctgagcctgctccacgacaggagcttcagctacacaggggacagccaggcgcaggagctatgcctgtacctaaccaaggcggccagtgctccctacttcgaggttctggagaagtggatctacaggggcatcatccacgacccatacagtgagtttatggtcgaggagcacgagctgcggaaggagaggatccaggaggattacaacgacaagtactgggaccagcggtacaccatcgtccagcagcagatcccgtccttcctgcagaaaatggcggacaagatcctcagcacaggaaaatatctaaatgtggtcagagagtgtggccatgacgtcacctgcccggtggctaaagagatcatctacacgttaaaagagcgggcgtatgtggagcagatcgagaaggcgtttaactacgccagcaaggtgctgctggacttcctgatggaggagaaggagctggtggctcacctcaggtccatcaagcgctacttcctcatggaccagggcgacttcttcgtgcacttcatggacctcgcggaggaggagctccggaagccggtggaggacatcacgccccctcgcctggaagcgctcctggagctggcgctgcgcatgagcacggccaacactgaccccttcaaggacgacctcaagatcgacctgatgccccatgacctcatcactcagctcttgcgcgtcctggccatcgagaccaagcaggagaaggcgatggcgcacgccgaccccacggagctggcgctgagcggcctggaggccttctctttcgactacatcgtcaagtggcccctttcgctcatcatcaacaggaaagccctcactcgctaccagatgctcttcaggcacatgttctactgcaagcacgtggagcggcagctctgcagcgtctggatcagcaacaaaaccgccaagcagcactcgctgcactccgcccagtggtttgctggggctttcactctgcggcagcgaatgctcaacttcgtccagaatattcaatactacatgatgtttgaagtgatggaaccgacctggcacatcctggagaaaaacctgaaatccgcctccaacattgacgacgtccttggccaccacacaggcttcctggacacctgcctgaaggactgcatgctcaccaaccccgagctgctgaaggtcttctccaagctcatgtctgtgtgcgtcatgttcaccaactgcatgcagaaatttacacagagcatgaaattagatggcgagctgggcgggcagacgctggagcacagcaccgtcctggggctgcccgcaggggccgaggagcgggcccggaaggagctcgccaggaagcacctggctgagcacgcagacactgtgcagctggtgtccggcttcgaggccaccatcaacaagtttgacaagaacttctcagcccacctgctggacctcctggcccggctgagcatctatagcaccagtgactgtgagcacggcatggccagcgtcatctccaggcttgacttcaatggtttctacacggagcgcctggagcgcctgtctgcagagaggagccagaaggccaccccccaagtgcctgtcctgcgggggcccccggctcctgcacccagggtcgcagtcaccgcacagtgagccctggctgtgacaggaaggaagggtgtggggtcagcagggactggtgcaaatgggtccagaattttcaaatcgaatgctctgtgttctgtctttgcagtttaaatataaagcaggaatgattgactcagctcactttgtttctcaaggcgctgggtttcgttttatagaagctgcccaggcagggtggatgtctccctggatttgctaatctgtttgctttttgaaattacactatcacctttttgggtgtttttggcctcaaagtggaaatacatggtgtttaagccaggagcaagcaaagatgcatgtggggtaagatccaggcctggtgtccacatctttccgggtgagctggggccgggcttcctgaggtctgtcggaaccgggacaagcctctggaaacggtcagggagttgtggaaacccaccgggcatcgggtgtcgggtttgctttggccccagaggcagccccgttccttctcctgaggactcacccgcctccacgaccctcctcctgctgctgctccaactggtccagggcaggaggccacagacagggccctcaggcaccctgggagcccacacctccccctccgtgggagtgggtcgaggggcaggctctgctgctggctggaaaccccaccccgccctatccggtaccgccttgttacgtagaacttactcagcagactgacacccaatccccctcgggcgatcatctgccctgtcttcccacctccagggctacagtgggcagcaccgccatccccagtgtgacagggccctgggagcctcagggctgcccggccaggttggtctgctctggttacattctggccaagctgccccttcctgctgacctgcatgtgtattgttgtcaccttcagctctcagcacctcggcccccttgggcagtgaggaagggccctggaggcgaggttgggagaaaggatagctagaacaggatcctgcggggaacaagggttgtgggcagctctcacccggggctgcctcactgagagcaccgccgagtgggggtgggggtgtccaactctccagccacaaaccgcttcctccttgtctgcaggctgtgcaggtctggcctgtgagtaaacacatttatcagcaacccaa

SEQ ID NO: 196133 - DNA, 1092 bp, Homo sapiens
  Payload ID: 18692
  Gene Name: tubulin, gamma complex associated protein 2
  ENST ID: ENST00000487796
  CDS Start-End: 78-314
gtcgggggctgcgcgggggctgtggctccgggactgcggagaacatattgtgatgttcgtgcctcagagctaaaactatgagtgaatttcggattcaccatgacgtcaatgaactgcttagcctgctgcgtgtccacggaggagatggggctgaggtctacattgacctgcttcaaaagaacaggaccccgtacgtcactaccactgtctctgctcacagtgccaaggctggaatgcatgtggcacgatcttgtcttactgcagtctcaacctcccaggctgatgtgatcctcccatctcagcttcccaagtagtgaccacaggcaagtgccaccacgcctcgctaatttttgaatctttttgtagaaatggggttttgttattttggccaggctggtcttgaactcctggactcaagcagtctaccagcctcggcctcccaaagtgctgggattacagtcatgagccactgcctagctcaaaacatggataagtttaacacaatatggagatgagttttgttagtttatttcagagggataattatttaacctacccaatttaattccattggcttattgtgttcaattttcgtaaaggtttttttttacagtgctttattaattaccgtcattaaatcactcatgtttgtgcttttgaggttaaaattgcagagttttctcgtactccagaagactttctaaagaaatatgatgaactgaaatctaaaaatacaaggaaccttgacccgctggtgtacctgttgtcaaagctcacggaagacaaagagactctgcagtacttacaacagaatgcaaaagaaagagctgagcttgcagccgctgctgtgggcagcagtaccaccagcatcaacgtccctgccgcggcctccaagatctccatgcaggagcttgaggaactgaggaagcagcttggcagcgtggccacaggctccacgctgcagcagtctctggaacttaaaagaaagatgcttcgagacaagcagaacaaaaaaaattcaggccagcacctccccatcttcccagcatgggtgtatgagagacctgccctgatcggggatttcctgattgg

SEQ ID NO: 196134 - DNA, 3899 bp, Homo sapiens
  Payload ID: 18693
  Gene Name: tubulin, gamma complex associated protein 3
  Uniprot ID: Q96CW5
  ENST ID: ENST00000261965
  CDS Start-End: 188-2911
tgtgggaagcgcccgcgctttcggcgggttccgttaaaatggcgccctggtggccggcggcgcccgcgccttagcctgtcaggagcagggagcttgcggggcgcaggaagggcgcgggccgcggtccctgcgcgtgcggcggcagtggcggctctgcccggaccaccgtgcacggctccgggcgaggatggcgaccccggaccagaagtcgccgaacgttctgctgcagaacctgtgctgcaggatcctgggcaggagcgaagctgatgtagcccagcagttccagtatgctgtgcgggtgattggcagcaacttcgccccaactgttgaaagagatgaatttttagtagctgaaaaaatcaagaaagagcttattcgacaacgaagagaagcagatgctgcattattttcagaactccacagaaaacttcattcacagggagttttgaaaaataaatggtcaatactctacctcttgctgagcctcagtgaggacccacgcaggcagccaagcaaggtttctagctatgctacgttatttgctcaggccttaccaagagatgcccactcaaccccttactactatgccaggcctcagacccttcccctgagctaccaagatcggagtgcccagtcagcccagagctccggcagcgtgggcagcagtggcatcagcagcattggcctgtgtgccctcagtggccccgcgcctgcgccacaatctctcctcccaggacagtctaatcaagctccaggagtaggagattgccttcgacagcagttggggtcacgactcgcatggactttaactgcaaatcagccttcttcacaagccactacctcaaaaggtgtccccagtgctgtgtctcgcaacatgacaaggtccaggagagaaggggatacgggtggtactatggaaattacagaagcagctctggtaagggacattttgtacgtctttcagggcatagatggcaaaaacatcaaaatgaacaacactgaaaattgttacaaagtagaaggaaaggcaaatctaagtaggtctttgagagacacagcagtcaggctttctgagttgggatggttgcataataaaatcagaagatacacggaccagaggagcctggaccgctcattcggactcgtcgggcagagcttttgtgctgccttgcaccaggaactcagagaatactatcgattgctctctgttttacattctcagctacaactagaggatgaccagggtgtgaatttgggacttgagagtagtttaacacttcggcgcctcctggtttggacctatgatcccaaaatacgactgaagacccttgcggccctagtggaccactgccaaggaaggaaaggaggtgagctggcctcagctgtccacgcctacacaaaaacaggagacccgtacatgcggtctctggtgcagcacatcctcagcctcgtgtctcatcctgttttgagcttcctgtaccgctggatatatgatggggagcttgaggacacttaccacgaattttttgtagcatcagatccaacagttaaaacagatcgactgtggcacgacaagtatactttgaggaaatcgatgattccttcgtttatgacgatggatcagtctaggaaggtccttttgataggaaaatcaataaatttcttgcaccaagtttgtcatgatcagactcccactacaaagatgatagctgtgaccaagtctgcagagtcaccccaggacgctgcagacctattcacagacttggaaaatgcatttcaggggaagattgatgctgcttattttgagaccagcaaatacctgttggatgttctcaataaaaagtacagcttgctggaccacatgcaggcaatgaggcggtacctgcttcttggtcaaggagactttataaggcacttaatggacttgctaaaaccagaacttgtccgtccagctacgactttgtatcagcataacttgactggaattctagaaaccgctgtcagagccaccaacgcacagtttgacagtcctgagatcctgcgaaggctggacgtgcggctgctggaggtctctccaggtgacactggatgggatgtcttcagcctcgattatcatgttgacggaccaattgcaactgtgtttactcgagaatgtatgagccactacctaagagtatttaacttcctctggagggcgaagcggatggaatacatcctcactgacatacggaagggacacatgtgcaatgcaaagctcctgagaaacatgccagagttctccggggtgctgcaccagtgtcacattttggcctctgagatggtccatttcattcatcagatgcagtattacatcacatttgaggtgcttgaatgttcttgggatgagctttggaacaaagtccagcaggcccaggatttggatcacatcattgctgcacacgaggtgttcttagacaccatcatctcccgctgcctgctggacagtgactccagggcacttttaaatcaacttagagctgtgtttgatcaaattattgaacttcagaatgctcaagatgcaatatacagagctgctctggaagaattgcagagacgattacagtttgaagagaaaaagaaacagcgtgaaattgagggccagtggggagtgacggcagcagaggaagaggaggaaaataagaggattggagaatttaaagaatctataccaaaaatgtgctcacagttgcgaatattgacccatttctaccagggtatcgtgcagcagtttttggtgttactgacgaccagctctgacgagagtcttcggtttcttagcttcaggctggacttcaacgagcattacaaagccagggagcccaggctccgtgtgtctctgggtaccagggggcggcgcagctcccacacgtgaagctcgcggtcctcccagggagctgcgggtgatgttcgttgcactgctagacacgaaattcccattgacgtcctgcaggaactgcatgctgcaggtgtcctgcccttccgcccacgagtgcgccatgtttcagcggagcggcgtgtgggagaagccacgtcgtgtttcacatgtcggagtcgaatgcatttgtaaatccctaagtcaagtaggctggctgcactgttcacatttgtctctaaaagtcttcatcgctaaaagataccataatttgctgaggcttcttaagctttctatgttataatttatatttgtcactttaaaaaatccatttcttttagaaaaaattagggtgataggatattcattagttaagatggtaacgtcattgctatttttttaacatcctctttagaggtaatttttgttaacataaccaaaaattaaattgaaacaaaatgtcccaactaagaaaatatatagagcattttatttttttttagtgttgtaaaatattaacctctgtgagatcctttgtatcttaatgcattacctttacacatatttattcttattttctctcctttcagagtttacatttttatatttaatttactatttcagatttttaaaatagtatagaaaaaagtaggagtgatagagaacaaaaatactcttatacagtgcaacccaaataccgcgaatgcatcagctaaagcagcgtgtaaataggagtgacgagaaagttaatggagtattttattttcaaagttcctgataagcattggaaagaaatcgacatggataatgaagatttcctttttccttgcctattttttcattgtaaatatttatatactactgaccaagatgttggggtgggggggattgttttttgtaaaaatgtcattatcaggtcacataaatctgcctttatgttgcataagtgaaaatttagaaaattaaaagcaattatctttcagatgca

SEQ ID NO: 196135 - DNA, 2723 bp, Homo sapiens
  Payload ID: 18693
  Gene Name: tubulin, gamma complex associated protein 3
  Uniprot ID: Q96CW5
  ENST ID: ENST00000375669
  CDS Start-End: 146-2620
cgccctggtggccggcggcgcccgcgccttagcctgtcaggagcagggagcttgcggggcgcaggaagggcgcgggccgcggtccctgcgcgtgcggcggcagtggcggctctgcccggaccaccgtgcacggctccgggcgaggatggcgaccccggaccagaagtcgccgaacgttctgctgcagaacctgtgctgcaggatcctgggcaggagcgaagctgatgtagcccagcagttccagtatgctgtgcgggtgattggcagcaacttcgccccaactgttgaaagagatgaatttttagtagctgaaaaaatcaagaaagagcttattcgacaacgaagagaagcagatgctgcattattttcagaactccacagaaaacttcattcacagggagttttgaaaaataaatggtcaatactctacctcttgctgagcctcagtgaggacccacgcaggcagccaagcaaggtttctagctatgctacgttatttgctcaggccttaccaagagatgcccactcaaccccttactactatgccaggcctcagacccttcccctgagctaccaagatcggagtgcccagtcagcccagagctccggcagcgtgggcagcagtggcatcagcagcattggcctgtgtgccctcagtggccccgcgcctgcgccacaatctctcctcccaggacagtctaatcaagctccaggagtaggagattgccttcgacagcagttggggtcacgactcgcatggactttaactgcaaatcagccttcttcacaagccactacctcaaaaggtgtccccagtgctgtgtctcgcaacatgacaaggtccaggagagaaggggatacgggtggtactatggaaattacagaagcagctctggtaagggacattttgtacgtctttcagggcatagatggcaaaaacatcaaaatgaacaacactgaaaattgttacaaagtagaaggaaaggcaaatctaagtaggtctttgagagacacagcagtcaggctttctgagttgggatggttgcataataaaatcagaagatacacggaccagaggagcctggaccgctcattcggactcgtcgggcagagcttttgtgctgccttgcaccaggaactcagagaatactatcgattgctctctgttttacattctcagctacaactagaggatgaccagggtgtgaatttgggacttgagagtagtttaacacttcggcgcctcctggtttggacctatgatcccaaaatacgactgaagacccttgcggccctagtggaccactgccaaggaaggaaaggaggtgagctggcctcagctgtccacgcctacacaaaaacaggagacccgtacatgcggtctctggtgcagcacatcctcagcctcgtgtctcatcctgttttgagcttcctgtaccgctggatatatgatggggagcttgaggacacttaccacgaattttttgtagcatcagatccaacagttaaaacagatcgactgtggcacgacaagtatactttgaggaaatcgatgattccttcgtttatgacgatggatcagtctaggaaggtccttttgataggaaaatcaataaatttcttgcaccaagtttgtcatgatcagactcccactacaaagatgatagctgtgaccaagtctgcagagtcaccccaggacgctgcagacctattcacagacttggaaaatgcatttcaggggaagattgatgctgcttattttgagaccagcaaatacctgttggatgttctcaataaaaagtacagcttgctggaccacatgcaggcaatgaggcggtacctgcttcttggtcaaggagactttataaggcacttaatggacttgctaaaaccagaacttgtccgtccagctacgactttgtatcagcataacttgactggaattctagaaaccgctgtcagagccaccaacgcacagtttgacagtcctgagatcctgcgaaggctggacgtgcggctgctggaggtctctccaggtgacactggatgggatgtcttcagcctcgattatcatgttgacggaccaattgcaactgtgtttactcgagaatgtatgagccactacctaagagtatttaacttcctctggagggcgaagcggatggaatacatcctcactgacatacggaagggacacatgtgcaatgcaaagctcctgagaaacatgccagagttctccggggtgctgcaccagtgtcacattttggcctctgagatggtccatttcattcatcagatgcagtattacatcacatttgaggtgcttgaatgttcttgggatgagctttggaacaaagtccagcaggcccaggatttggatcacatcattgctgcacacgaggtgttcttagacaccatcatctcccgctgcctgctggacagtgactccagggcacttttaaatcaacttagagctgtgtttgatcaaattattgaacttcagaatgctcaagatgcaatatacagagctgctctggaagaattgcagagacgattacagtttgaagagaaaaagaaacagcgtgaaattgaggttgagatgtgcctatactgcgtttgaagtcccgagaaatcactgacagttgtaaagagggaggggccaccctcactggcatcatcatcctgtttcacaaaataaataaaaacagcagcattcatgagaa

SEQ ID NO: 196136 - DNA, 2461 bp, Homo sapiens
  Payload ID: 18693
  Gene Name: tubulin, gamma complex associated protein 3
  ENST ID: ENST00000464139
  CDS Start-End: 156-1475
gttaaaatggcgccctggtggccggcggcgcccgcgccttagcctgtcaggagcagggagcttgcggggcgcaggaagggcgcgggccgcggtccctgcgcgtgcggcggcagtggcggctctgcccggaccaccgtgcacggctccgggcgaggatggcgaccccggaccagaagtcgccgaacgttctgctgcagaacctgtgctgcaggatcctgggcaggagcgaagctgatgtagcccagcagttccagtatgctgtgcgggtgattggcagcaacttcgccccaactgttgaaagagatgaatttttagtagctgaaaaaatcaagaaagagcttattcgacaacgaagagaagcagatgctgcattattttcagaactccacagaaaacttcattcacagggagttttgaaaaataaatggtcaatactctacctcttgctgagcctcagtgaggacccacgcaggcagccaagcaaggtttctagctatgctacgttatttgctcaggccttaccaagagatgcccactcaaccccttactactatgccaggcctcagacccttcccctgagctaccaagatcggagtgcccagtcagcccagagctccggcagcgtgggcagcagtggcatcagcagcattggcctgtgtgccctcagtggccccgcgcctgcgccacaatctctcctcccaggacagtctaatcaagctccaggagtaggagattgccttcgacagcagttggggtcacgactcgcatggactttaactgcaaatcagccttcttcacaagccactacctcaaaaggtgtccccagtgctgtgtctcgcaacatgacaaggtccaggagagaaggggatacgggtggtactatggaaattacagaagcagctctggtaagggacattttgtacgtctttcagggcatagatggcaaaaacatcaaaatgaacaacactgaaaattgttacaaagtagaaggaaaggcaaatctaagtaggtctttgagagacacagcagtcaggctttctgagttgggatggttgcataataaaatcagaagatacacggaccagaggagcctggaccgctcattcggactcgtcgggcagagcttttgtgctgccttgcaccaggaactcagagaatactatcgattgctctctgttttacattctcagctacaactagaggatgaccagggtgtgaatttgggacttgagagtagtttaacacttcggcgcctcctggtttggacctatgatcccaaaatacgactgaagacccttgcggccctagtggaccactgccaaggtcccacgcgcgtctttcccacgcacgtctttcccacgcgcgactttcccacgcgcgactttcccacgcgcgactttcccatgcacgtctttcccacgcgcgtctttcccacgcgcgtctggcactcgctttgtttcagaactcgtttgtagggtgcgccatccaggcttgcttttgtgtcctgcccgtttttgtccttaatggccgtgttgattcgataggaatcgacagatgggagccaagaggggacgtaaccacttgccagtgtggcccagtatttatatggtagaagctcgggctggcattgagatggaggtgggaaagaggagggtgtctcgtgtttaaagatttctctcttgtgtggtccttggttatggctccccatggtgcttgctgctcccttggtcgcctttccttgcattttgctttttgcctttagtccttctgcagtcagggaccatgttggtgactctcggtcagatgttcccatatttgcatgtcttgctttggcctctctggctctaggttctgtattgctagttgctttctgacattttttctcattgtttgtgctaccttggccaagaacctctttgccttctccctcgtttgtaacattgagatcctagtagcagttacttcttagggttgttaggatgacatgagatgggcgagttggccatctgccacacaagagttcccttctcactgccatcctctgcccagggtgttccccagaatctgcagggccccattggtcatcttgctgtctgcacaccttcctctctcacctcttggcacttccctcaaaaaagagagaagtggagcacagtaaataaacgccagcgttttctccagttcccagcacctctccggaactggatcccccaaactcctctgtcactttctgtgtccagcgggcccctggggtccttcactgtcttcactctgctcagcctgtgcgcttggccttggtgctgtagggactgttataagagctgctgtccgatccccatattcaatctcacagccccactttgtgtacacacaccagagccatcttcttaaaatcagatcctgtcactcctctccctaaaatctaccagtggtctaataaaatcttgaatttttagcataa

SEQ ID NO: 196137 - DNA, 2451 bp, Homo sapiens
  Payload ID: 18693
  Gene Name: tubulin, gamma complex associated protein 3
  ENST ID: ENST00000618439
  CDS Start-End: 156-1469
gttaaaatggcgccctggtggccggcggcgcccgcgccttagcctgtcaggagcagggagcttgcggggcgcaggaagggcgcgggccgcggtccctgcgcgtgcggcggcagtggcggctctgcccggaccaccgtgcacggctccgggcgaggatggcgaccccggaccagaagtcgccgaacgttctgctgcagaacctgtgctgcaggatcctgggcaggagcgaagctgatgtagcccagcagttccagtatgctgtgcgggtgattggcagcaacttcgccccaactgttgaaagagatgaatttttagtagctgaaaaaatcaagaaagagcttattcgacaacgaagagaagcagatgctgcattattttcagaactccacagaaaacttcattcacagggagttttgaaaaataaatggtcaatactctacctcttgctgagcctcagtgaggacccacgcaggcagccaagcaaggtttctagctatgctacgttatttgctcaggccttaccaagagatgcccactcaaccccttactactatgccaggcctcagacccttcccctgagctaccaagatcggagtgcccagtcagcccagagctccggcagcgtgggcagcagtggcatcagcagcattggcctgtgtgccctcagtggccccgcgcctgcgccacaatctctcctcccaggacagtctaatcaagctccaggagtaggagattgccttcgacagcagttggggtcacgactcgcatggactttaactgcaaatcagccttcttcacaagccactacctcaaaaggtgtccccagtgctgtgtctcgcaacatgacaaggtccaggagagaaggggatacgggtggtactatggaaattacagaagcagctctggtaagggacattttgtacgtctttcagggcatagatggcaaaaacatcaaaatgaacaacactgaaaattgttacaaagtagaaggaaaggcaaatctaagtaggtctttgagagacacagcagtcaggctttctgagttgggatggttgcataataaaatcagaagatacacggaccagaggagcctggaccgctcattcggactcgtcgggcagagcttttgtgctgccttgcaccaggaactcagagaatactatcgattgctctctgttttacattctcagctacaactagaggatgaccagggtgtgaatttgggacttgagagtagtttaacacttcggcgcctcctggtttggacctatgatcccaaaatacgactgaagacccttgcggccctagtggaccactgccaaggtcccacgcgcgtctttcccacgcacgtctttcccacgcgcgactttcccacgcgcgactttcccacgcgcgactttcccacgtctttcccacgcgtctttcccacgcgcgtctggcactcgctttgtttcagaactcgtttgtagggtgcgccatccaggcttgcttttgtgtcctgcccgtttttgtccttaatggccgtgttgattcgataggaatcgacagatgggagccaagaggggacgtaaccacttgccagtgtggcccagtatttatatggtagaagctcgggctggcattgagatggaggtgggaaagaggagggtgtctcgtgtttaaagatttctctcttgtgtggtccttggttatggctccccatggtgcttgctgctcccttggtcgcctttccttgcattttgctttttgcctttagtccttctgcagtcagggaccatgttggtgactctcggtcagatgttcccatatttgcatgtcttgctttggcctctctggctctaggttctgtattgctagttgctttctgacattttttctcattgtttgtgctaccttggccaagaacctctttgccttctccctcgtttgtaacattgagatcctagtagcagttacttcttagggttgttaggatgacatgagatgggcgagttggccatctgccacacaagagttcccttctcactgccatcctctgcccagggtgttccccagaatctgcagggccccattggtcatcttgctgtctgcacaccttcctctctcacctcttggcacttccctcaaaaaagagagaagtggagcacagtaaataaacgccagcgttttctccagttcccagcacctctccggaactggatcccccaaactcctctgtcactttctgtgtccagcgggcccctggggtccttcactgtcttcactctgctcagcctgtgcgcttggccttggtgctgtagggactgttataagagctgctgtccgatccccatattcaatctcacagccccactttgtgtacacacaccagagccatcttcttaaaatcagatcctgtcactcctctccctaaaatctaccagtggtctaataaaatcttgaatttttagc

SEQ ID NO: 196138 - DNA, 1508 bp, Homo sapiens
  Payload ID: 18693
  Gene Name: tubulin, gamma complex associated protein 3
  ENST ID: ENST00000611152
  CDS Start-End: 1-389
tttgtgctgccttgcaccaggaactcagagaatactatcgattgctctctgttttacattctcagctacaactagaggatgaccagggtgtgaatttgggacttgagagtagtttaacacttcggcgcctcctggtttggacctatgatcccaaaatacgactgaagacccttgcggccctagtggaccactgccaaggaaggaaaggaggtgagctggcctcagctgtccacgcctacacaaaaacaggagacccgtacatgcggtctctggtgcagcacatcctcagcctcgtgtctcatcctgttttgagcttcctgtaccgctggatatatgatggggagcttgaggacacttaccacgaagtaaggatcggtgttcggttctgagacttggatttaaaaagcatgggcacgcagttatgctgtttcatttttcccctcatgattaccatgttctcctaacaggaatgcaactgcacttccattgaataccatatacattttacacagtgcctcgacagctggttatctcactgaacagcagataagttcacgagttctttggttagtggagaattgtcccagtttattcctcagcaaggtggaatcactcgtccgagtttactagcacgtggatggcaaaacaggacgaggcctcctgagtcttggggcagtcatcatcgcagattctgctgctttgccatgattactttgcaaactcactttggtgctaacagcttaatgaaacaagttagttgtgtatgtagctattgaaatagggtcagttctgtaacgcagcatgtgctgcttaaaaatcactgttgtgtaaatcacatgatagaaatgatagggcttttggtggaaggtagggtgaggggcaccacactcaaaacctttgtcagtaagacaggaatctaacaaaagttgtagtgcagtttaacacgttaaagtttaagaaatacataagcactgccataaatatcacattggccttggaaaaaccctggcgctttcttgtgggagtgggccgtcggggccgcagactgtgtgtggcgggaagtggcggaggcctggccatctgaaacaggtgtgccttgtgtgggcgctgctggctgcagtggcctgtgttctcctgccgtttctcatggatgaaattgcaaataagcaagcgtgaggtttgtattacattcaatttgttttctaatttattgtttgtgctgttacaagttgtttttaaagcaagcgtttgggcagaatggagtctctggtgctctgtgtgcttttgaaacacatgggcggcatggcgtgtgtgcatctgcgttgggcgagttgcttagcctgtcttgtagcactttcccgatggtgtgtgtagtttttctttattactgcatattatttcacagtagggacagatatgtttttatctagctactgtcctgttgatggagatgatgttttctttgtagtttttaatcttatgaacagtattaaaatgaacatcctttt

SEQ ID NO: 196139 - DNA, 492 bp, Homo sapiens
  Payload ID: 18693
  Gene Name: tubulin, gamma complex associated protein 3
  ENST ID: ENST00000633234
  CDS Start-End: 1-389
agttctccggggtgctgcaccagtgtcacattttggcctctgagatggtccatttcattcatcagatgcagtattacatcacatttgaggtgcttgaatgttcttgggatgagctttggaacaaagtccagcaggcccaggatttggatcacatcattgctgcacacgaggtgttcttagacaccatcatctcccgctgcctgctggacagtgactccagggcacttttaaatcaacttagagctgtgtttgatcaaattattgaacttcagaatgctcaagatgcaatatacagagctgctctggaagaattgcagagacgattacagtttgaagagaaaaagaaacagcgtgaaattgaggttgagatgtgcctatactgcgtttgaagtcccgagaaatcactgacagttgtaaagagggaggggccaccctcactggcatcatcatcctgtttcacaaaataaataaaaacagcagcattcatgagaa

SEQ ID NO: 196140 - DNA, 1622 bp, Homo sapiens
  Payload ID: 18693
  Gene Name: tubulin, gamma complex associated protein 3
  ENST ID: ENST00000631451
  CDS Start-End: 1-638
agttctccggggtgctgcaccagtgtcacattttggcctctgagatggtccatttcattcatcagatgcagtattacatcacatttgaggtgcttgaatgttcttgggatgagctttggaacaaagtccagcaggcccaggatttggatcacatcattgctgcacacgaggtgttcttagacaccatcatctcccgctgcctgctggacagtgactccagggcacttttaaatcaacttagagctgtgtttgatcaaattattgaacttcagaatgctcaagatgcaatatacagagctgctctggaagaattgcagagacgattacagtttgaagagaaaaagaaacagcgtgaaattgagggccagtggggagtgacggcagcagaggaagaggaggaaaataagaggattggagaatttaaagaatctataccaaaaatgtgctcacagttgcgaatattgacccatttctaccagggtatcgtgcagcagtttttggtgttactgacgaccagctctgacgagagtcttcggtttcttagcttcaggctggacttcaacgagcattacaaagccagggagcccaggctccgtgtgtctctgggtaccagggggcggcgcagctcccacacgtgaagctcgcggtcctcccagggagctgcgggtgatgttcgttgcactgctagacacgaaattcccattgacgtcctgcaggaactgcatgctgcaggtgtcctgcccttccgcccacgagtgcgccatgtttcagcggagcggcgtgtgggagaagccacgtcgtgtttcacatgtcggagtcgaatgcatttgtaaatccctaagtcaagtaggctggctgcactgttcacatttgtctctaaaagtcttcatcgctaaaagataccataatttgctgaggcttcttaagctttctatgttataatttatatttgtcactttaaaaaatccatttcttttagaaaaaattagggtgataggatattcattagttaagatggtaacgtcattgctatttttttaacatcctctttagaggtaatttttgttaacataaccaaaaattaaattgaaacaaaatgtcccaactaagaaaatatatagagcattttatttttttttagtgttgtaaaatattaacctctgtgagatcctttgtatcttaatgcattacctttacacatatttattcttattttctctcctttcagagtttacatttttatatttaatttactatttcagatttttaaaatagtatagaaaaaagtaggagtgatagagaacaaaaatactcttatacagtgcaacccaaataccgcgaatgcatcagctaaagcagcgtgtaaataggagtgacgagaaagttaatggagtattttattttcaaagttcctgataagcattggaaagaaatcgacatggataatgaagatttcctttttccttgcctattttttcattgtaaatatttatatactactgaccaagatgttggggtgggggggattgttttttgtaaaaatgtcattatcaggtcacataaatctgcctttatgttgcataagtgaaaatttagaaaattaaaagcaattatctttcaga

SEQ ID NO: 196141 - DNA, 2617 bp, Homo sapiens
  Payload ID: 18694
  Gene Name: tubulin, gamma complex associated protein 4
  Uniprot ID: Q9UGJ1
  ENST ID: ENST00000260383
  CDS Start-End: 255-2258
agtctccgcagagcccgggcgggagtagctggtggaccccgttgagctgccgaacttccgggactcccccgcgaccccttcccagcttcccgtccgctccgccgcagcgattgtctcggtgggttgattcggcacaaaccgcccgacccaggggccggtgcgcgtgtggaaggggaagcactcccctcgtggtcgcctggaggtgcgctggaggagggggtgacataaccagggactcgaggtccgccgtgggaatgatccacgaactgctcttggctctgagcgggtaccctgggtccattttcacctggaacaagcggagtggcctgcaggtatcgcaggacttccctttcctccaccccagtgagaccagtgtcctgaatcgactctgccggctcggcacagactatattcgcttcactgagttcattgaacagtacacgggccatgtgcaacagcaggatcaccatccatctcaacagggccaaggtgggttacatggaatctacctgcgggccttctgcacagggctggattctgttttgcagccttatcgccaagcactgcttgatttggaacaagagttcctgggtgatccccatctctccatatcacatgtcaactacttcctagaccagttccagcttctttttccctctgtgatggttgtagtagaacaaattaaaagtcaaaagattcatggttgtcaaatcctggaaacagtctacaaacacagctgtggggggttgcctcctgttcgaagtgcactggaaaaaatcctggccgtttgtcatggggtcatgtataaacagctctcagcctggatgctccatggactcctcttggaccagcatgaagaattctttatcaaacaggggccatcttctggtaatgtcagtgcccagccagaagaggacgaggaggatctgggcattgggggactgacaggaaaacaactgagagaactgcaggacttgcgcctgattgaggaagagaacatgctggcaccatctctgaagcagttttccctacgagtggagattttgccatcctacattccagtgagggttgctgaaaaaatcctatttgttggagaatctgtccagatgtttgagaatcaaaatgtgaacctgactagaaaaggatccattttgaaaaaccaggaagacacttttgctgcagagctgcaccgtctcaagcagcagccactcttcagcttggtggactttgaacaggtggtggatcgcattcgcagcactgtggctgagcatctctggaagttgatggtagaagaatccgatttactgggtcagctgaagatcattaaagacttttaccttctgggacgtggagaactgtttcaggccttcattgacacagctcaacacatgttgaaaacaccacccactgcagtaactgagcatgatgtgaatgtggcctttcaacagtcagcacacaaggtattgctagatgatgacaaccttctccctctgttgcacttgacaatcgagtatcacggaaaggagcacaaagcagatgctactcaggcaagagaagggccttctcgggaaacttctccccgggaagcccctgcatctggctgggcagccctaggtctttcctacaaagtacagtggccactacatattctcttcaccccagctgtcctggaaaagtacaatgttgtttttaagtacttactgagtgtgcgccgggtgcaagctgagctgcagcactgctgggccctacaaatgcagcgcaagcacctcaagtcgaaccagactgatgcaatcaagtggcgcctaagaaatcacatggcatttttggtggataatcttcagtactatctccaggtagatgtgttggagtctcagttctcccagctgcttcatcagatcaattctacccgagactttgaaagcatccgattggctcatgaccacttcctgagcaatttgctggctcaatcctttatcctattgaaacctgtgtttcactgcctgaatgaaatcctagatctctgtcacagtttttgttcgctggtcagtcagaacctaggcccactggatgagcgtggagccgcccagctgagcattctcgtgaagggctttagccgccagtcttcactcctgttcaagattctctccagtgttcggaatcatcagatcaactcagatttggctcaactactgttacgactagattataacaaatactatacccaggctggtggaactctgggcagtttcgggatgtgaaaatttctggctcataaattgaaataacagccacgttcccaaggttgtaacagaagattcaaaacatcccattctagccacacacaaataaatatctgcggcttagtgataggactctaccttttctcctagaagcagttactgaacatccaggagtacaactccttcccatcattcccatgtggaagggtctctcccatcaaggagaacatgtggcatctctgatcctttacattgagaacatttgttggatatgttcatttattcaatagtcatttattgagcacctactacgtaccttggtactgttcaagctgtgggagatacagcggtaaacaaacaatatagagcagaaagtt

SEQ ID NO: 196142 - DNA, 771 bp, Homo sapiens
  Payload ID: 18694
  Gene Name: tubulin, gamma complex associated protein 4
  ENST ID: ENST00000563517
  CDS Start-End: 283-531
gcatgcgcgagggcagcgaccgcgactcagtctccgcagagcccgggcgggagtagctggtggaccccgttgagctgccgaacttccgggactcccccgcgaccccttcccagcttcccgtccgctccgccgcagcgattgtctcggtgggttgattcggcacaaaccgcccgacccaggggccggtgcgcgtgtggaaggggaagcactcccctcgtggtcgcctggaggtgcgctggaggagggggtgacataaccagggactcgaggtccgccgtgggaatgatccacgaactgctcttggctctgagcgggtaccctgggtccattttcacctggaacaagcggagtggcctgcaggtatcgcaggacttccctttcctccaccccagtgagaccagtgtcctgaatcgactctgccggctcggcacagactatattcgcttcactgagttcattgaacagtacacgggccatgtgcaacagcaggtttcagggcctgagctgagaagttggcttctgtttgtttgatttcaggatcaccatccatctcaacagggccaaggtgggttacatggaatctacctgcgggccttctgcacagggctggattctgttttgcagccttatcgccaagcactgcttgatttggaacaagagttcctgggtgatccccatctctccatatcacatgtcaactacttcctagaccagttccagcttctttttccctctgtgatggttgtagtagaacaaattaaaagtcaaaag

SEQ ID NO: 196143 - DNA, 846 bp, Homo sapiens
  Payload ID: 18694
  Gene Name: tubulin, gamma complex associated protein 4
  ENST ID: ENST00000563147
  CDS Start-End: 1-516
aaagtacagtggccactacatattctcttcaccccagctgtcctggaaaagtacaatgttgtttttaagtacttactgagtgtgcgccgggtgcaagctgagctgcagcactgctgggccctacaaatgcagcgcaagcacctcaagtcgaaccagactgatgcaatcaagtggcgcctaagaaatcacatggcatttttggtggataatcttcagtactatctccaggtagatgtgttggagtctcagttctcccagctgcttcatcagatcaattctacccgagactttgaaagcatccgattggctcatgaccacttcctgagcaatttgctggctcaatcctttatcctattgaaacctggctttagccgccagtcttcactcctgttcaagattctctccagtgttcggaatcatcagatcaactcagatttggctcaactactgttacgactagattataacaaatactatacccaggctggtggaactctgggcagtttcgggatgtgaaaatttctggctcataaattgaaataacagccacgttcccaaggttgtaacagaagattcaaaacatcccattctagccacacacaaataaatatctgcggcttagtgataggactctaccttttctcctagaagcagttactgaacatccaggagtacaactccttcccatcattcccatgtggaagggtctctcccatcaaggagaacatgtggcatctctgatcctttacattgagaacatttgttggatatgttcatttattcaatagtcatttattgagcacctactacgtaccttggtactgttcaagctgtgggagatacagc

SEQ ID NO: 196144 - DNA, 1928 bp, Homo sapiens
  Payload ID: 18694
  Gene Name: tubulin, gamma complex associated protein 4
  ENST ID: ENST00000561691
  CDS Start-End: 1-1193
atggaatctacctgcgggccttctgcacagggctggattctgttttgcagccttatcgccaagcactgcttgatttggaacaagagttcctgggtgatccccatctctccatatcacatgtcaactacttcctagaccagttccagcttctttttccctctgtgatggttgtagtagaacaaattaaaagtcaaaagattcatggttgtcaaatcctggaaacagtctacaaacacagctgtggggggttgcctcctgttcgaagtgcactggaaaaaatcctggccgtttgtcatggggtcatgtataaacagctctcagcctggatgctccatggactcctcttggaccagcatgaagaattctttatcaaacaggggccatcttctggtaatgtcagtgcccagccagaagaggacgaggaggatctgggcattgggggactgacaggaaaacaactgagagaactgcaggacttgcgcctgattgaggaagagaacatgctggcaccatctctgaagcagttttccctacgagtggagattttgccatcctacattccagtgagggttgctgaaaaaatcctatttgttggagaatctgtccagatgtttgagaatcaaaatgtgaacctgactagaaaaggatccattttgaaaaaccaggaagacacttttgctgcagagctgcaccgtctcaagcagcagccactcttcagcttggtggactttgaacaggtggtggatcgcattcgcagcactgtggctgagcatctctggaagttgatggtagaagaatccgatttactgggtcagctgaagatcattaaagacttttaccttctgggacgtggagaactgtttcaggccttcattgacacagctcaacacatgttgaaaacaccacccactgcagtaactgagcatgatgtgaatgtggcctttcaacagtcagcacacaaggtattgctagatgatgacaaccttctccctctgttgcacttgacaatcgagtatcacggaaaggagcacaaagcagatgctactcaggcaagagaagggccttctcgggaaacttctccccgggaagcccctgcatctggctgggcagccctaggtctttcctacaaagtacagtggccactacatattctcttcaccccagctgtcctggaaaaaaatagacaattttaaaaaccaaacagaatgggactgtcttctgcaagcctacctacaaacaggtacaatgttgtttttaagtacttactgagtgtgcgccgggtgcaagctgagctgcagcactgctgggccctacaaatgcagcgcaagcacctcaagtcgaaccagactgatgcaatcaagtggcgcctaagaaatcacatggcatttttggtggataatcttcagtactatctccaggtagatgtgttggagtctcagttctcccagctgcttcatcagatcaattctacccgagactttgaaagcatccgattggctcatgaccacttcctgagcaatttgctggctcaatcctttatcctattgaaacctgtgtttcactgcctgaatgaaatcctagatctctgtcacagtttttgttcgctggtcagtcagaacctaggcccactggatgagcgtggagccgcccagctgagcattctcgtgaagggctttagccgccagtcttcactcctgttcaagattctctccagtgttcggaatcatcagatcaactcagatttggctcaactactgttacgactagattataacaaatactatacccaggctggtggaactctgggcagtttcgggatgtgaaaatttctggctcataaattgaaataacagccacgttcccaaggttgtaacagaagattcaaaacatcccattctagccacacacaaataaatatctgcggctta

SEQ ID NO: 196145 - DNA, 460 bp, Homo sapiens
  Payload ID: 18694
  Gene Name: tubulin, gamma complex associated protein 4
  ENST ID: ENST00000566251
  CDS Start-End: 1-201
ttgctggctcaatcctttatcctattgaaacctgtgtttcactgcctgaatgaaatcctagatctctgtcacagtttttgttcgctggtcagtcagaacctaggcccactggatgagcgtggagccgcccagctgagcattctcgtgaaggtgcgtctgcctggaagtatgcagccttgccgaaaggacagagggctttagccgccagtcttcactcctgttcaagattctctccagtgttcggaatcatcagatcaactcagatttggctcaactactgttacgactagattataacaaatactatacccaggctggtggaactctgggcagtttcgggatgtgaaaatttctggctcataaattgaaataacagccacgttcccaaggttgtaacagaagattcaaaacatcccattctagccacacacaaataaatatctgcggcttagtgatagga

SEQ ID NO: 196146 - DNA, 561 bp, Homo sapiens
  Payload ID: 18694
  Gene Name: tubulin, gamma complex associated protein 4
  ENST ID: ENST00000563412
  CDS Start-End: 1-312
aaaagtcaaaagattcatggttgtcaaatcctggaaacagtctacaaacacagctgtggggggttgcctcctgttcgaagtgcactggaaaaaatcctggccgtttgtcatggggtcatgtataaacagctctcagcctggatgctccatggactcctcttggaccagcatgaagaattctttatcaaacaggggccatcttctggtaatgtcagtgcccagccagaagaggacgaggaggatctgggcattgggggactgacaggaaaacaactgagagaactgcaggacttgtcacagaagacgatgtgattgtataggaagtgtaggctgagaggaaaagacagtctgggacagtgccctgaggagcaccagcagagaagacatagagagaagacctggaaaacaaaaaagaccacctctttcatcgtacaacgcctgattgaggaagagaacatgctggcaccatctctgaagcagttttccctacgagtggagattttgccatcctacattccagtgagggttgctgaaaaaatcctatttgttggagaatctgtc

SEQ ID NO: 196147 - DNA, 762 bp, Homo sapiens
  Payload ID: 18694
  Gene Name: tubulin, gamma complex associated protein 4
  ENST ID: ENST00000565548
  CDS Start-End: 1-318
ttcctgagcaatttgctggctcaatcctttatcctattgaaacctgtgtttcactgcctgaatgaaatcctagatctctgtcacagtttttgttcgctggtcagtcagaacctaggcccactggatgagcgtggagccgcccagctgagcattctcgtgaagggctttagccgccagtcttcactcctgttcaagattctctccagtgttcggaatcatcagatcaactcagatttggctcaactactgttacgactagattataacaaatactatacccaggctggtggaactctgggcagaaaaaaaccttgttgacccctgctttagagaatgagaagccatgcagggatcagtgatgccagaggaagggaaggaactgcttccagctattgtgacaataataataataataatattgggtctttgactagaacgtgtaacatttccaggtgttctcacttgtgcttcccatgtttatcttacggaaggtcattccatcaagcttatggtcactgtcccttcatggcagttggtcctttcgttctccctttagctctaagagttggggagtacccacaggtgagctgtgatctcagctcagagagagagcatgaggtcttttttaactgtcaggaaacagagctgtgcccaattccactcaacttttggcacaactgttaatctgggccttcacctaccttaaactgagtttctgcaagcatagcattttagacaccctggaataaccttttgggaatg

SEQ ID NO: 196148 - DNA, 6798 bp, Homo sapiens
  Payload ID: 18694
  Gene Name: tubulin, gamma complex associated protein 4
  Uniprot ID: Q9UGJ1
  ENST ID: ENST00000564079
  CDS Start-End: 241-2241
ccgggcgggagtagctggtggaccccgttgagctgccgaacttccgggactcccccgcgaccccttcccagcttcccgtccgctccgccgcagcgattgtctcggtgggttgattcggcacaaaccgcccgacccaggggccggtgcgcgtgtggaaggggaagcactcccctcgtggtcgcctggaggtgcgctggaggagggggtgacataaccagggactcgaggtccgccgtgggaatgatccacgaactgctcttggctctgagcgggtaccctgggtccattttcacctggaacaagcggagtggcctgcaggtatcgcaggacttccctttcctccaccccagtgagaccagtgtcctgaatcgactctgccggctcggcacagactatattcgcttcactgagttcattgaacagtacacgggccatgtgcaacagcaggatcaccatccatctcaacagggccaaggtgggttacatggaatctacctgcgggccttctgcacagggctggattctgttttgcagccttatcgccaagcactgcttgatttggaacaagagttcctgggtgatccccatctctccatatcacatgtcaactacttcctagaccagttccagcttctttttccctctgtgatggttgtagtagaacaaattaaaagtcaaaagattcatggttgtcaaatcctggaaacagtctacaaacacagctgtggggggttgcctcctgttcgaagtgcactggaaaaaatcctggccgtttgtcatggggtcatgtataaacagctctcagcctggatgctccatggactcctcttggaccagcatgaagaattctttatcaaacaggggccatcttctggtaatgtcagtgcccagccagaagaggacgaggaggatctgggcattgggggactgacaggaaaacaactgagagaactgcaggacttgcgcctgattgaggaagagaacatgctggcaccatctctgaagcagttttccctacgagtggagattttgccatcctacattccagtgagggttgctgaaaaaatcctatttgttggagaatctgtccagatgtttgagaatcaaaatgtgaacctgactagaaaaggatccattttgaaaaaccaggaagacacttttgctgcagagctgcaccgtctcaagcagcagccactcttcagcttggtggactttgaacaggtggtggatcgcattcgcagcactgtggctgagcatctctggaagttgatggtagaagaatccgatttactgggtcagctgaagatcattaaagacttttaccttctgggacgtggagaactgtttcaggccttcattgacacagctcaacacatgttgaaaacaccacccactgcagtaactgagcatgatgtgaatgtggcctttcaacagtcagcacacaaggtattgctagatgatgacaaccttctccctctgttgcacttgacaatcgagtatcacggaaaggagcacaaagatgctactcaggcaagagaagggccttctcgggaaacttctccccgggaagcccctgcatctggctgggcagccctaggtctttcctacaaagtacagtggccactacatattctcttcaccccagctgtcctggaaaagtacaatgttgtttttaagtacttactgagtgtgcgccgggtgcaagctgagctgcagcactgctgggccctacaaatgcagcgcaagcacctcaagtcgaaccagactgatgcaatcaagtggcgcctaagaaatcacatggcatttttggtggataatcttcagtactatctccaggtagatgtgttggagtctcagttctcccagctgcttcatcagatcaattctacccgagactttgaaagcatccgattggctcatgaccacttcctgagcaatttgctggctcaatcctttatcctattgaaacctgtgtttcactgcctgaatgaaatcctagatctctgtcacagtttttgttcgctggtcagtcagaacctaggcccactggatgagcgtggagccgcccagctgagcattctcgtgaagggctttagccgccagtcttcactcctgttcaagattctctccagtgttcggaatcatcagatcaactcagatttggctcaactactgttacgactagattataacaaatactatacccaggctggtggaactctgggcagtttcgggatgtgaaaatttctggctcataaattgaaataacagccacgttcccaaggttgtaacagaagattcaaaacatcccattctagccacacacaaataaatatctgcggcttagtgataggactctaccttttctcctagaagcagttactgaacatccaggagtacaactccttcccatcattcccatgtggaagggtctctcccatcaaggagaacatgtggcatctctgatcctttacattgagaacatttgttggatatgttcatttattcaatagtcatttattgagcacctactacgtaccttggtactgttcaagctgtgggagatacagcggtaaacaaacaatatagagcagaaagttaaatattttatggttcatatgtgaaaaagtaattatgtttataaatagactaactgctggatgttaccaccaagtaagaaagcaacaggtaagataggctttctctctccctataccaagtaatttatacctacacagattgggcaattctagctaatgaaaatatacttaaaagtatttcttaggccgggcatggtggctcacacctgtaatcccagcactttgggaggccgaggcgggcggatcacctgaagtcaggagtttgagaccagcctgaccaacatgatgaaacctcgattctactaaaaatacaaaaattagccaggtgtggtggcatgtgcctgtaatcccagctactcaggaggctgagacaggagaattgcttgaacctgggaagcagacgctgcagtgagctgagattgtgccattgcattccagcccgggcaacaagagcgaaattccgtctcaaaaaaaaaaaaaaaaaaaaaaaaagtattattctccaagaaaaaggtccttaagaaaaaattgagatcaagttgttagatttttaaatactgaagattgcaggcccaattacccatcttacacaaaccataggggttgaagttatcttaatatggcccagccatcactggtaatcaatattcatatcagtgtaagtaaaaagaaatattcactgaacaacgccctccaaactgaaaaagaatgcagtgttctggcatcaggttatagtcactgcatctggttttcatcactacatattctacacacactgggaagctctgacaacttattccctgctattatcaactaaagatcaccctttctactgctgtctctggagcaggagctggcaaactatggcctgctgtctgtttttgtacagttttactgaaacacagccatgcccatttgtttactcattgtctatggttgctttcatgccctcacagcaaaggcgagtagttgtgatggatcaaatggcccacaaagcctgaaatatttactctttgaccctttacagaaaaaaaccttgttgacccctgctttagagaatgagaagccatgcagggatcagtgatgccagaggaagggaaggaactgcttccagctattgtgacaataataataataataatattgggtctttgactagaacgtgtaacatttccaggtgttctcacttgtgcttcccatgtttatcttacggaaggtcattccatcaagcttatggtcactgtcccttcatggcagttggtcctttcgttctccctttagctctaagagttggggagtacccacaggtgagctgtgatctcagctcagagagagagcatgaggtcttttttaactgtcaggaaacagagctgtgcccaattccactcaacttttggcacaactgttaatctgggccttcacctaccttaaactgagtttctgcaagcatagcattttagacaccctggaataaccttttgggaatgatgccacagaataaagttcactcttaacttttcaatttccttggccagctgtcctccgtaagtgaataagcctgttgaaagactcagagaaagtactatgtcttgtcatttgttctgagattaagctcaaaaaaacagatgaagaaatcccagttactacaaccaaagagattcaacatttattttatcataaaagttcagcaaataaaactatatacaagatccatgcaaggaatccagttacacacaagacacatttaaaacctggttaaaacacaatctccacgatagcagggaataaaaccagtaagaccaagtatctttagtgagaaacataatcgtgtttatattttggatgctgcttgaatccaattctctccccaacaatgaggcactggatcacccactcttgtgacaccacaggcagctgcaatgcttcagcacacttcagcaccgaggctgggcatgaggggtccgtcaccaccacatcaaatacccctaaagcaatatctgcaaggagcaagggaaagtgaagaaggaaaggacactcaacttagccctccattagaaagagagatttgattctaaccaatacatcccactctgcacaaaccaaagccctattatgtcaaacacactgctactgatcatgaccaaaggcagagttataatcactatgtgctgaccttgtagaaatatttaacaaatatacgtccagtgcttcacttatgttgactcacctcttgaaggtggtacttttcttctctaagaaacatggatacggtcaacctattaggcctgagccttggaccacaaggcctaacacctacaggtctaaggagatccctggaacaaagacactacacacactctttcaggtacctttgttatgggcacttgaatggtgctgcttcacagaggctgcaccaccagtcatgaggatctcagaccagagctccaggaagttctgctgttggtctgataccaagagtaccttcagattctggaaaggattttcacggggttgcctatgaaggagacaggaaaggaccttagcatgacaagtaatatccaacaaactgcctttctgcaaagggactcatgtacatctgaatgctttcaaaaataaatgccccatcagacatagtgtctcaagcctgtaatcccagcactttgggaggctgtcgtggttggatctcttgggcctgggagttcgagaccagcctgggcaatgtggtgagaccccatctctacaaaagacaacaaaaaaattagctgggtgtggtggcgagtgcctgtagtcccagcagcttgggaggctgaggtagggggatcacttcagcctgggaggttgaggctgcagtaagtcgtcactgcgccactgtactccagcctaggtgacagagcaagacttcatcttaaaaaactaagccctatattagggtcccccttctcttccttctttctatgaatgatctgtattccttgcattcctggctttctaatttccatgtttgttctggggctgagaataatccaaatcatgctcctgagcctatatatttttaatgcttgcttaaaacttagttctctgactttacaggttgagaatattgaacctatatacaaatcttcacacatttgcaaaaggttcctagccaatgtaacctagggaaataaactagataaactcctgaagtcatttcaaacccactcaaatttatcccacagacattccaatttctagaaagctttactctctcacctagattctcttccctccaaagcttgctgtcctcctgcctatacaattctggatgggcttcaaatacttaccagtccagaattctttgctcctcaaggctgtacccagctggcaacagataattacggtagttctggagctggttggcatggcaactatcatggacccagacatgagacacacaaggaatcccactggcaaggcacaggaagtacttccgggttcgacaatgctgatccgcaattagaagacactggtaagctgtgttacactgcaagaaaagaagcagagccaatgggtttggtgacttctgtggaaagctcctaagcagcagccataatgagccatgaagagcagatctgaagactcccaactactacccaaaatgtgatttagtctatcctgcccaaggccactcttctcactggaaggcccaagtaatttccatagatgttctctctgcctcacctgcagcatactgaggacctaaatcctcaacggacaaccaaaacctatgaactcagcctttcaggctaaaaatcagcaaccctaataggggtttctactactaaacataaacatcaatcttcttttgtcccagcaacagaaccatagccattaactaacccaaggtcctaccttctcttccctatacacaacaaaaattctatttcatgcaaaaacattttggcagtttctcagttcctgaaatctctggctactttatccaggttccccaacccctcccaggcctcttctcaacacagcaagttggctcttatcattgccactatattaggttacacaaagaaactcctcacctgggcttcattgaaatcttcaaggatatagccagctcctgctcgaagctgggattctgtatactgcttgttgaaaggaggaatttccaaaaattctatattaaaaaaaaaaaccaagataataa

SEQ ID NO: 196149 - DNA, 582 bp, Homo sapiens
  Payload ID: 18695
  Gene Name: tubulin, gamma complex associated protein 5
  ENST ID: ENST00000612085
  CDS Start-End: 1-582
ctgctagttggaagagattaacggaggaatttctaaatgcaccacttcccagtataaaggaaataaagacagatgcacattattccatactgtcacttcttctgtgtctgtcagactctccttcaaacagcagttatgtggagacaccaagaaataaagaagtggaaaagaaagatgatttcgactggggaaaatacttgatggaagatgaagaaatggacattggtccgtacatggacacaccaaattggtctgaagaaagtgaagaggaaaatgatcaacagcccttaagcagagaggactctggaattcaggtagacaggacaccgttagaagaacaagatcaaaacagaaaactggatccttgtatcagttggaaagcagatgagccagatgaccgaagctggctggaacatcatgtggtccatcagtactggacagccaggccctcccagtttcctcatagtttacatttgcactctaatttagctgctgtctgggaccaacacttgtacagcagtgatccattgtatgttccagatgacagggttttggttactgagactcaggttattcgggaaa

SEQ ID NO: 196150 - DNA, 500 bp, Homo sapiens
  Payload ID: 18695
  Gene Name: tubulin, gamma complex associated protein 5
  ENST ID: ENST00000622507
  CDS Start-End: 1-500
attaacggaggaatttctaaatgcaccacttcccagtataaaggaaataaagacagatgcacattattccatactgtcacttcttctgtgtctgtcagactctccttcaaacagcagttatgtggagacaccaagaaataaagaagtggaaaagaaagatgatttcgactggggaaaatacttgatggaagatgaagaaatggacattggtccgtacatggacacaccaaattggtctgaagaaagtgaagaggaaaatgatcaacagcccttaagcagagaggactctggaattcaggtagacaggacaccgttagaagaacaagatcaaaacagaaaactggatccttgtatcagttggaaagatgaccgaagctggctggaacatcatgtggtccatcagtactggacagccaggccctcccagtttcctcatagtttacatttgcactctaatttagctgctgtctgggaccaacacttgtacagcagtgatccat

SEQ ID NO: 196151 - DNA, 3849 bp, Homo sapiens
  Payload ID: 18695
  Gene Name: tubulin, gamma complex associated protein 5
  Uniprot ID: Q96RT8
  ENST ID: ENST00000615383
  CDS Start-End: 131-3205
gaagtcgcccggcgcgggagcgcgaactctcgcgagaatgccgccagctccggaggcgactgcggcaggagcccgagctctcgcgcgacaggcaccaattcgttagacgcgcgctgcaggagcgcggaacatggcgcggcacgggccaccgtggagtcggttggacgcgcagcaggagcgcgacgtgcgggagctcgtccggggtgtcgccggcctccaggacgaggcagaccccaacttccagctcgccctaaacttcgcctggtccaacttcagatttcatcgtttcttggatgtcaacagccacaaaatagaaaaaacaatcgaaggaatttatgaaaaatttgtcattcattctgatctaagcaaagctgctagttggaagagattaacggaggaatttctaaatgcaccacttcccagtataaaggaaataaagacagatgcacattattccatactgtcacttcttctgtgtctgtcagactctccttcaaacagcagttatgtggagacaccaagaaataaagaagtggaaaagaaagatgatttcgactggggaaaatacttgatggaagatgaagaaatggacattggtccgtacatggacacaccaaattggtctgaagaaagtgaagaggaaaatgatcaacagcccttaagcagagaggactctggaattcaggtagacaggacaccgttagaagaacaagatcaaaacagaaaactggatccttgtatcagttggaaagatgagccagatgaccgaagctggctggaacatcatgtggtccatcagtactggacagccaggccctcccagtttcctcatagtttacatttgcactctaatttagctgctgtctgggaccaacacttgtacagcagtgatccattgtatgttccagatgacagggttttggttactgagactcaggttattcgggaaaccctatggttactttcaggagtgaaaaagctctttatatttcagttgatagatgggaaggtaactgtgagaaacaatattatagtaactcatttaacacatagctgtttacgatctgtgctggaacaaatagcagcatatggccaggttgtgtttcgactccaggagttcattgatgaagtcatgggacacagttctgagagcatgctgcctggaagtgggtctgttcctaagaagtcaactgaagctccctttagaacctaccaggctttcatgtgggccctgtacaaatatttcattagtttcaaagaggaacttgcagaaattgagaagtgcatcatcaataatgatactacaataactcttgcaatagtggtggacaagttggcacctcgattgtctcagctcaaggttctgcacaaagtgtttagtactggagtagcagaagttccacctgatactcgaaatgtcgtccgggcctctcacctgcttaacaccctgtacaaggccattcttgaatatgacaatgttggagaagcctctgagcaaaccgtctccctccttttctctctctgggtggaaacggtgcggccttacctgcagacggtggacgagtggatcgtgcacgggcacctgtgggatggcgccagggagttcatcatccagagaaacaaaaatgttccagttaatcacagagacttctggtatgcaacttacacgttatatagcgtatcagaaaagacagaaaatgaagaaaaaatgagtgataacgctagtgcgagttccggcagtgaccaggggccctccagcaggcagcacaccatggtgtccttcctcaaacctgtcctgaagcagatcataatggctggcaagtcgatgcagctgctgaagaacctgcagtgtgcggagagcaccacctgccaggcaggagccagagatgcagaaagaaaaagtttatacactctctttctggaatctgtacagtcccgtcttcgacatggagaagattccactccacaggttcttactgagcaacaggcaaccaaggagaacctgatgaagatgcagtccattgctgaaagccatcttgaactggatgatgttcatgatccactgcttgccattaactttgcaaggatgtatttggagcagagtgactttcacgagaagtttgctggtggtgatgtatgtgtggatagatcatcggaatctgtgacatgccagacttttgaattaacgctgagatcctgcctctatcctcatattgacaagcagtatctagattgctgtggaaatctcatgcaaactctaaaaaaagattacaggttggtagaatacttgcaagctatgaggaattttttcttaatggaaggaggagataccatgtatgacttctacacgtcaatttttgataaaataagagaaaaggaaacatggcagaatgtgtcttttcttaatgtccaactccaagaagcagtaggacagcgttatcctgaagatagttcacgtctatctatatcttttgaaaatgttgacacagctaagaagaagctgcctgttcatatcttagatggtctgaccctcagctacaaggtcccatggcccgtggacattgttataagtttggaatgtcaaaaaatttataatcaagtgtttcttctcttattgcaaataaagtgggcaaaatatagtctggatgttttactttttggtgaactggttagtactgcagaaaaaccacgacttaaagaaggccttatacatgaacaagacacagttgctcagttcggaccacaaaaagaaccagtaagacagcagattcatcgcatgttcctcttaagagtgaagctcatgcatttcgtgaacagcttgcacaactacatcatgaccaggattctacacagtacagggctggagtttcaacatcaagtcgaggaagccaaggatttagatcaattgattaaaattcactataggtatctgtcaaccatccatgaccggtgtctgctgagagaaaaggtcagctttgtgaaagaagctatcatgaaggtgttgaacttggctctcatgtttgcagacggttggcaggcaggcctgggcacttggcgaatggaatctatagagaaaatggaatctgattttaaaaactgccatatgtttcttgtaaccattttaaacaaagccgtctgtagaggatcctttccccatttggaatctctagcgttgtcactcatggctggcatggaacaaagttaaatgtcttcagcgtaataaatatctccgactttgtcatcatacatgtacatttccaccatgtgcagctgaaaagtgaaaatatttttattttggtttatttgtaaaacttgtccacagtcagcctggcacagtcgctcatgcctctaatcccagcacgatgggaggccaagacaggcagatcacttgagcccaggagtttgaggccagcctgggcaacatggtgaaacccggtgtctaccaaaaatacaaaatgtatccagacatggtggtgtgtacctgtagtcccagctactcaggaggcaaagatgggaggattacttgagcccaggaggtcaaggctacagtgagccatgattgcactactgcagtgcaacctgggtgacagagtgagaccctgactcagaaagaaccacttgcccacagtccagacagatggattgtaggtgggttttctggagattagtagatactgtatagagttgtatacataaaattgtgtcagtagtacaaagtgtatataggctgtttactcttacatttcctactgtaagatacagatttatggtactgatacctttaaattatatcatattttgaaaatgtaattactgatattcaaaataaattaaaggacttaaaatcat

SEQ ID NO: 196152 - DNA, 3342 bp, Homo sapiens
  Payload ID: 18695
  Gene Name: tubulin, gamma complex associated protein 5
  Uniprot ID: Q96RT8
  ENST ID: ENST00000620435
  CDS Start-End: 30-3104
gttagacgcgcgctgcaggagcgcggaacatggcgcggcacgggccaccgtggagtcggttggacgcgcagcaggagcgcgacgtgcgggagctcgtccggggtgtcgccggcctccaggacgaggcagaccccaacttccagctcgccctaaacttcgcctggtccaacttcagatttcatcgtttcttggatgtcaacagccacaaaatagaaaaaacaatcgaaggaatttatgaaaaatttgtcattcattctgatctaagcaaagctgctagttggaagagattaacggaggaatttctaaatgcaccacttcccagtataaaggaaataaagacagatgcacattattccatactgtcacttcttctgtgtctgtcagactctccttcaaacagcagttatgtggagacaccaagaaataaagaagtggaaaagaaagatgatttcgactggggaaaatacttgatggaagatgaagaaatggacattggtccgtacatggacacaccaaattggtctgaagaaagtgaagaggaaaatgatcaacagcccttaagcagagaggactctggaattcaggtagacaggacaccgttagaagaacaagatcaaaacagaaaactggatccttgtatcagttggaaagatgagccagatgaccgaagctggctggaacatcatgtggtccatcagtactggacagccaggccctcccagtttcctcatagtttacatttgcactctaatttagctgctgtctgggaccaacacttgtacagcagtgatccattgtatgttccagatgacagggttttggttactgagactcaggttattcgggaaaccctatggttactttcaggagtgaaaaagctctttatatttcagttgatagatgggaaggtaactgtgagaaacaatattatagtaactcatttaacacatagctgtttacgatctgtgctggaacaaatagcagcatatggccaggttgtgtttcgactccaggagttcattgatgaagtcatgggacacagttctgagagcatgctgcctggaagtgggtctgttcctaagaagtcaactgaagctccctttagaacctaccaggctttcatgtgggccctgtacaaatatttcattagtttcaaagaggaacttgcagaaattgagaagtgcatcatcaataatgatactacaataactcttgcaatagtggtggacaagttggcacctcgattgtctcagctcaaggttctgcacaaagtgtttagtactggagtagcagaagttccacctgatactcgaaatgtcgtccgggcctctcacctgcttaacaccctgtacaaggccattcttgaatatgacaatgttggagaagcctctgagcaaaccgtctccctccttttctctctctgggtggaaacggtgcggccttacctgcagacggtggacgagtggatcgtgcacgggcacctgtgggatggcgccagggagttcatcatccagagaaacaaaaatgttccagttaatcacagagacttctggtatgcaacttacacgttatatagcgtatcagaaaagacagaaaatgaagaaaaaatgagtgataacgctagtgcgagttccggcagtgaccaggggccctccagcaggcagcacaccatggtgtccttcctcaaacctgtcctgaagcagatcataatggctggcaagtcgatgcagctgctgaagaacctgcagtgtgcggagagcaccacctgccaggcaggagccagagatgcagaaagaaaaagtttatacactctctttctggaatctgtacagtcccgtcttcgacatggagaagattccactccacaggttcttactgagcaacaggcaaccaaggagaacctgatgaagatgcagtccattgctgaaagccatcttgaactggatgatgttcatgatccactgcttgccattaactttgcaaggatgtatttggagcagagtgactttcacgagaagtttgctggtggtgatgtatgtgtggatagatcatcggaatctgtgacatgccagacttttgaattaacgctgagatcctgcctctatcctcatattgacaagcagtatctagattgctgtggaaatctcatgcaaactctaaaaaaagattacaggttggtagaatacttgcaagctatgaggaattttttcttaatggaaggaggagataccatgtatgacttctacacgtcaatttttgataaaataagagaaaaggaaacatggcagaatgtgtcttttcttaatgtccaactccaagaagcagtaggacagcgttatcctgaagatagttcacgtctatctatatcttttgaaaatgttgacacagctaagaagaagctgcctgttcatatcttagatggtctgaccctcagctacaaggtcccatggcccgtggacattgttataagtttggaatgtcaaaaaatttataatcaagtgtttcttctcttattgcaaataaagtgggcaaaatatagtctggatgttttactttttggtgaactggttagtactgcagaaaaaccacgacttaaagaaggccttatacatgaacaagacacagttgctcagttcggaccacaaaaagaaccagtaagacagcagattcatcgcatgttcctcttaagagtgaagctcatgcatttcgtgaacagcttgcacaactacatcatgaccaggattctacacagtacagggctggagtttcaacatcaagtcgaggaagccaaggatttagatcaattgattaaaattcactataggtatctgtcaaccatccatgaccggtgtctgctgagagaaaaggtcagctttgtgaaagaagctatcatgaaggtgttgaacttggctctcatgtttgcagacggttggcaggcaggcctgggcacttggcgaatggaatctatagagaaaatggaatctgattttaaaaactgccatatgtttcttgtaaccattttaaacaaagccgtctgtagaggatcctttccccattgtgagtatatcatgttaaaatatttctacctctgtatttccttgtaactaagtgtatgtgtcattgttttgttactgatcccatgaagaattagaaattctcaccattttcaaaactgaaaagtcccttagcagttgtcccatgctttgaattgctttttaagcattacggtgaggtgagtgtaagcctgaggatcttactttctggtataccatttattacaacagatttctaaaactcctattaaataaagttgatggcagaatagatttctgtcacacttca

SEQ ID NO: 196153 - DNA, 676 bp, Homo sapiens
  Payload ID: 18695
  Gene Name: tubulin, gamma complex associated protein 5
  ENST ID: ENST00000610294
  CDS Start-End: 1-676
gttggtagaatacttgcaagctatgaggaattttttcttaatggaaggaggagataccatgtatgacttctacacgtcaatttttgataaaataagagaaaaggaaacatggcagaatgtgtcttttcttaatgtccaactccaagaagcagtaggacagcgttatcctgaagatagttcacgaaaatggaggccaggcacggtggctcacacctgtaatgccagcactttgggaggcagaggcggtggatcacctgaggtcaggagttcgagaccagcctggccaacatgtctatctatatcttttgaaaatgttgacacagctaagaagaagctgcctgttcatatcttagatggtctgaccctcagctacaaggtcccatggcccgtggacattgttataagtttggaatgtcaaaaaatttataatcaagtgtttcttctcttattgcaaataaagtgggcaaaatatagtctggatgttttactttttggtgaactggttagtactgcagaaaaaccacgacttaaagaaggccttatacatgaacaagacacagttgctcagttcggaccacaaaaagaaccagtaagacagcagattcatcgcatgttcctcttaagagtgaagctcatgcatttcgtgaacagcttgcacaactacatcatgaccagg

SEQ ID NO: 196154 - DNA, 3848 bp, Homo sapiens
  Payload ID: 18695
  Gene Name: tubulin, gamma complex associated protein 5
  ENST ID: ENST00000620361
  CDS Start-End: 131-3205
gaagtcgcccggcgcgggagcgcgaactctcgcgagaatgccgccagctccggaggcgactgcggcaggagcccgagctctcgcgcgacaggcaccaattcgttagacgcgcgctgcaggagcgcggaacatggcgcggcacgggccaccgtggagtcggttggacgcgcagcaggagcgcgacgtgcgggagctcgtccggggtgtcgccggcctccaggacgaggcagaccccaacttccagctcgccctaaacttcgcctggtccaacttcagatttcatcgtttcttggatgtcaacagccacaaaatagaaaaaacaatcgagggaatttatgaaaaatttgtcattcattctgatctaagcaaagctgctagttggaagagattaacggaggaatttctaaatgcaccacttcccagtataaaggaaataaagacagatgcacattattccatactgtcacttcttctgtgtctgtcagactctccttcaaacagcagttatgtggagacaccaagaaataaagaagtggaaaagaaagatgatttcgactggggaaaatacttgatggaagatgaagaaatggacattggtccgtacatggacacaccaaattggtctgaagaaagtgaagaggaaaatgatcaacagcccttaagcagagaggactctggaattcaggtagacaggacaccgttagaagaacaagatcaaaacagaaaactggatccttgtatcagttggaaagatgagccagatgaccgaagctggctggaacatcatgtggtccatcagtactggacagccaggccctcccattttcctcatagtttacatttgcactctaatttagctgctgtctgggaccaacacttgtacagcagtgatccattgtatgttccagatgacagggttttggttactgagactcaggttattcgggaaaccctatggttactttcaggagtgaaaaagctctttatatttcagttgatagatgggaaggtaactgtgagaaacaatattatagtaactcatttaacacatagctgtttacgatctgtgctggaacaaatagcagcatatggccaggttgtgtttcgactccaggagttcattgatgaagtcatgggacacagttctgagagcatgctgcctggaagtgggtctgttcctaagaagtcaactgaagctccctttagaacctaccaggctttcatgtgggccctgtacaaatatttcattagtttcaaagaggaacttgcagaaattgagaagtgcatcatcaataatgatactacaataactcttgcaatagtggtggacaagttggcacctcgattgtctcagctcaaggttctgcacaaagtgtttagtactggagtagcagaagttccacctgatactcgaaatgtcgtccgggcctctcacctgcttaacaccctgtacaaggccattcttgaatatgacaatgttggagaagcctctgagcaaaccgtctccctccttttctctctctgggtggaaacggtgcggccttacctgcagacggtggacgagtggatcgtgcacgggcacctgtgggatggcgccagggagttcatcatccagagaaacaaaaatgttccagttaatcacagagacttctggtatgcaacttacacgttatatagcgtatcagaaaagacagaaaatgaagaaaaaatgagtgataacgctagtgcgagttccggcagtgaccaggggccctccagcaggcagcacaccatggtgtccttcctcaaacctgtcctgaagcagatcataatggctggcaagtcgatgcagctgctgaagaacctgcagtgtgcggagagcaccacctgccaggcaggagccagagatgcagaaagaaaaagtttatacactctctttctggaatctgtacagtcccgtcttcgacatggagaagattccactccacaggttcttactgagcaacaggcaaccaaggagaacctgatgaagatgcagtccattgctgaaagccatcttgaactggatgatgttcatgatccactgcttgccattaactttgcaaggatgtatttggagcagagtgactttcacgagaagtttgctggtggtgatgtatgtgtggatagatcatcggaatctgtgacatgccagacttttgaattaacgctgagatcctgcctctatcctcatattgacaagcagtatctagattgctgtggaaatctcatgcaaactctaaaaaaagattacaggttggtagaatacttgcaagctatgaggaattttttcttaatggaaggaggagataccatgtatgacttctacacgtcaatttttgataaaataagagaaaaggaaacatggcagaatgtgtcttttcttaatgtccaactccaagaagcagtaggacagcgttatcctgaagatagttcacgtctatctatatcttttgaaaatgttgacacagctaagaagaagctgcctgttcatatcttagatggtctgaccctcagctacaaggtcccatggcccgtggacattgttataagtttggaatgtcaaaaaatttataatcaagtgtttcttctcttattgcaaataaagtgggcaaaatatagtctggatgttttactttttggtgaactggttagtactgcagaaaaaccacgacttaaagaaggccttatacatgaacaagacacagttgctcagttcggaccacaaaaagaaccagtaagacagcagattcatcgcatgttcctcttaagagtgaagctcatgcatttcgtgaacagcttgcacaactacatcatgaccaggattctacacagtacagggctggagtttcaacatcaagtcgaggaagccaaggatttagatcaattgattaaaattcactataggtatctgtcaaccatccatgaccggtgtctgctgagagaaaaggtcagctttgtgaaagaagctatcatgaaggtgttgaacttggctctcatgtttgcagacggttggcaggcaggcctgggcacttggcgaatggaatctatagagaaaatggaatctgattttaaaaactgccatatgtttcttgtaaccattttaaacaaagccgtctgtagaggatcctttccccatttggaatctctagcgttgtcactcatggctggcatggaacaaagttaaatgtcttcagcgtaataaatatctccgactttgtcatcatacatgtacatttccaccatgtgcagctgaaaagtgagaatatttttattttggtttatttgtaaaacttgtccacagtcagcctggcacagtcgctcatgcctctaatcccagcacgatgggaggccaagacaggcagatcacttgagcccaggagtttgaggccagcctgggcaacatggtgaaacccggtgtctaccaaaaatacaaaatgtatccagacatggtggtgtgtacctgtagtcccagctactcaggaggcaaagatgggaggattacttgagcccaggaggtcaaggctacagtgagccatgattgcactactgcagtgcaacctgggtgacagagtgagaccctgactcagaaagaaccacttgcccacagtccagacagatggattgtaggtgggttttctggagattagtagatactgtatagagttgtatacataaaattgtgtcagtagtacaaagtgtatataggctgtttactcttatatttcctactgtaagatacagatttatggtactgatacctttaaattatatcatattttgaaaatgtaattactgatattcaaaataaattaaaggacttaaaatca

SEQ ID NO: 196155 - DNA, 3588 bp, Homo sapiens
  Payload ID: 18695
  Gene Name: tubulin, gamma complex associated protein 5
  ENST ID: ENST00000614508
  CDS Start-End: 27-3107
agacgcgcgctgcaggagcgcggaacatggcgcggcacgggccaccgtggagtcggttggacgcgcagcaggagcgcgacgtgcgggagctcgtccggggtgtcgccggcctccaggacgaggcagaccccaacttccagctcgccctaaacttcgcctggtccaacttcagatttcatcgtttcttggatgtcaacagccacaaaatagaaaaaacaatcgaaggaatttatgaaaaatttgtcattcattctgatctaagcaaagctgctagttggaagagattaacggaggaatttctaaatgcaccacttcccagtataaaggaaataaagacagatgcacattattccatactgtcacttcttctgtgtctgtcagactctccttcaaacagcagttatgtggagacaccaagaaataaagaagtggaaaagaaagatgatttcgactggggaaaatacttgatggaagatgaagaaatggacattggtccgtacatggacacaccaaattggtctgaagaaagtgaagaggaaaatgatcaacagcccttaagcagagaggactctggaattcaggtagacaggacaccgttagaagaacaagatcaaaacagaaaactggatccttgtatcagttggaaagatgagccagatgaccgaagctggctggaacatcatgtggtccatcagtactggacagccaggccctcccagtttcctcatagtttacatttgcactctaatttagctgctgtctgggaccaacacttgtacagcagtgatccattgtatgttccagatgacagggttttggttactgagactcaggttattcgggaaaccctatggttactttcaggagtgaaaaagctctttatatttcagttgatagatgggaaggtaactgtgagaaacaatattatagtaactcatttaacacatagctgtttacgatctgtgctggaacaaatagcagcatatggccaggttgtgtttcgactccaggagttcattgatgaagtcatgggacacagttctgagagcatgctgcctggaagtgggtctgttcctaagaagtcaactgaagctccctttagaacctaccaggctttcatgtgggccctgtacaaatatttcattagtttcaaagaggaacttgcagaaattgagaagtgcatcatcaataatgatactacaataactcttgcaatagtggtggacaagttggcacctcgattgtctcagctcaaggttctgcacaaagtgtttagtactggagtagcagaagttccacctgatactcgaaatgtcgtccgggcctctcacctgcttaacaccctgtacaaggccattcttgaatatgacaatgttggagaagcctctgagcaaaccgtctccctccttttctctctctgggtggaaacggtgcggccttacctgcagacggtggacgagtggatcgtgcacgggcacctgtgggatggcgccagggagttcatcatccagagaaacaaaaatgttccagttaatcacagagacttctggtatgcaacttacacgttatatagcgtatcagaaaagacagaaaatgaagaaaaaatgagtgataacgctagtgcgagttccggcagtgaccaggggccctccagcaggcagcacaccatggtgtccttcctcaaacctgtcctgaagcagatcataatggctggcaagtcgatgcagctgctgaagaacctgcagtgtgcggagagcaccacctgccaggcaggagccagagatgcagaaagaaaaagtttatacactctctttctggaatctgtacagtcccgtcttcgacatggagaagattccactccacaggttcttactgagcaacaggcaaccaaggagaacctgatgaagatgcagtccattgctgaaagccatcttgaactggatgatgttcatgatccactgcttgccattaactttgcaaggatgtatttggagcagagtgactttcacgagaagtttgctggtggtgatgtatgtgtggatagatcatcggaatctgtgacatgccagacttttgaattaacgctgagatcctgcctctatcctcatattgacaagcagtatctagattgctgtggaaatctcatgcaaactctaaaaaaagattacaggttggtagaatacttgcaagctatgaggaattttttcttaatggaaggaggagataccatgtatgacttctacacgtcaatttttgataaaataagagaaaaggaaacatggcagaatgtgtcttttcttaatgtccaactccaagaagcagtaggacagcgttatcctgaagatagttcacgtctatctatatcttttgaaaatgttgacacagctaagaagaagctgcctgttcatatcttagatggtctgaccctcagctacaaggtcccatggcccgtggacattgttataagtttggaatgtcaaaaaatttataatcaagtgtttcttctcttattgcaaataaagtgggcaaaatatagtctggatgttttactttttggtgaactggttagtactgcagaaaaaccacgacttaaagaaggccttatacatgaacaagacacagttgctcagttcggaccacaaaaagaaccagtaagacagcagattcatcgcatgttcctcttaagagtgaagctcatgcatttcgtgaacagcttgcacaactacatcatgaccaggattctacacagtacagggctggagtttcaacatcaagtcgaggaagccaaggatttagatcaattgattaaaattcactataggtatctgtcaaccatccatgaccggtgtctgctgagagaaaaggtcagctttgtgaaagaagctatcatgaaggtgttgaacttggctctcatgtttgcagacggttggcaggcaggcctgggcacttggcgaatggaatctatagagaaaatggaatctgattttaaaaactgccatatgtttcttgtaaccattttaaacaaagccgtctgtagaggatcctttccccattgtcttgctttgttgcccatgctggagcgcattggcacagtcttggctcactgaagcctcaacctccggggagcaagcactcctccctcagcctcctgagtagctgagactacagatggaatctcactctgtgagtctcactctatcgcccaggctggagtgcagtggcacaatctcagctcactgcaacctctgcctccagagctcaagcaatccgcccaccttgacctcccaaaatgctgggattaccgacctgtgtgtactttataaattaaactttatcataggcctgcatatatagaaaaatatatagtctatacagtgtagagtgtgctactatctgtcctttcagacatccaccaggggtcttgaagcttatcccccagaagatgaggtgggaactactgtaaataattttgaccctttgaaatctgatgagacttgttttacttcctaacatatggtatattttgtgaatgttacgtgtttatttgaaaactttaattcctgtcagtaacagcttgaagtcttcagt

SEQ ID NO: 196156 - DNA, 676 bp, Homo sapiens; identical to SEQ ID NO: 196153
  Payload ID: 18695
  Gene Name: tubulin, gamma complex associated protein 5
  ENST ID: ENST00000625857
  CDS Start-End: 1-676

SEQ ID NO: 196157 - DNA, 1078 bp, Homo sapiens
  Payload ID: 18695
  Gene Name: tubulin, gamma complex associated protein 5
  ENST ID: ENST00000630135
  CDS Start-End: 1-446
taagagtgaagctcatgcatttcgtgaacagcttgcacaactacatcatgaccaggattctacacagtacagggctggagtttcaacatcaagtcgaggaagccaaggatttagatcaattgattaaaattcactataggtatctgtcaaccatccatgaccggtgtctgctgagagaaaaggtcagctttgtgaaagaagctatcatgaaggtgttgaacttggctctcatgtttgcagacggttggcaggcaggcctgggcacttggcgaatggaatctatagagaaaatggaatctgattttaaaaactgccatatgtttcttgtaaccattttaaacaaagccgtctgtagaggatcctttccccatttttccatagggctgcctgttgtctgcatccgacgctggagtctactgtccacaggaggtttgggagggacctaaacctgcgtcagttcttgctgcttctggccttggtggtgtggaggtgctgcagaagctagggcctctcatcatgaagatgagccagatgcctccttcgggagccacaggatccagagagtcaatgaaagtaaaacttcaggactgtctggatttattacgccagggaggaagttgagccctggagactgtcaggtcgtacgactgcaattcttctcagattcactcttttcctcattgttcttgttctgtaaatgactaagagagaccagagaccagacctccccacttccaatcactggttttgttgtagatgaactgcctcctttgctgtccggtacctaatgtggaccagacggtgctcaagaccctatcactagtacaacctcagtgtggaatgttaaatatgccttgcctggaagaaaaagaccaacttgactaatcagatcatcataactatgcatgaagtcttccacagaaagatgatgaaattttgttacacttccctaacctttgtctaaataagcattcccaaacatctacactttggaacactgacttctgttctttgagatgggtgcttcccaggtggcccatcctcaaactttttgcttgaataaactctctaaactaga

SEQ ID NO: 196158 - DNA, 582 bp, Homo sapiens
  Payload ID: 18695
  Gene Name: tubulin, gamma complex associated protein 5
  ENST ID: ENST00000626276
  CDS Start-End: 1-582
ctgctagttggaagagattaacggaggaatttctaaatgcaccacttcccagtataaaggaaataaagacagatgcacattattccatactgtcacttcttctgtgtctgtcagactctccttcaaacagcagttatgtggagacaccaagaaataaagaagtggaaaagaaagatgatttcgactggggaaaatacttgatggaagatgaagaaatggacattggtccgtacatggacacaccaaattggtctgaagaaagtgaagaggaaaatgatcaacagcccttaagcagagaggactctggaattcaggtagacaggacaccgttagaagaacaagatcaaaacagaaaactggatccttgtatcagttggaaagcagatgagccagatgaccgaagctggctggaacatcatgtggtccatcagtactggacagccaggccctcccattttcctcatagtttacatttgcactctaatttagctgctgtctgggaccaacacttgtacagcagtgatccattgtatgttccagatgacagggttttggttactgagactcaggttattcgggaaa

SEQ ID NO: 196159 - DNA, 68 bp, Homo sapiens
  Payload ID: 18695
  Gene Name: tubulin, gamma complex associated protein 5
  ENST ID: ENST00000625230
  CDS Start-End: 1-68
ctgctagttggaagagattaacggaggaatttctaaatgcaccacttcccagtataaaggaaataaag

SEQ ID NO: 196160 - DNA, 52 bp, Homo sapiens
  Payload ID: 18695
  Gene Name: tubulin, gamma complex associated protein 5
  ENST ID: ENST00000631056
  CDS Start-End: 1-52
attaacggaggaatttctaaatgcaccacttcccagtataaaggaaataaag

SEQ ID NO: 196161 - DNA, 3342 bp, Homo sapiens
  Payload ID: 18695
  Gene Name: tubulin, gamma complex associated protein 5
  ENST ID: ENST00000628386
  CDS Start-End: 30-3104
gttagacgcgcgctgcaggagcgcggaacatggcgcggcacgggccaccgtggagtcggttggacgcgcagcaggagcgcgacgtgcgggagctcgtccggggtgtcgccggcctccaggacgaggcagaccccaacttccagctcgccctaaacttcgcctggtccaacttcagatttcatcgtttcttggatgtcaacagccacaaaatagaaaaaacaatcgagggaatttatgaaaaatttgtcattcattctgatctaagcaaagctgctagttggaagagattaacggaggaatttctaaatgcaccacttcccagtataaaggaaataaagacagatgcacattattccatactgtcacttcttctgtgtctgtcagactctccttcaaacagcagttatgtggagacaccaagaaataaagaagtggaaaagaaagatgatttcgactggggaaaatacttgatggaagatgaagaaatggacattggtccgtacatggacacaccaaattggtctgaagaaagtgaagaggaaaatgatcaacagcccttaagcagagaggactctggaattcaggtagacaggacaccgttagaagaacaagatcaaaacagaaaactggatccttgtatcagttggaaagatgagccagatgaccgaagctggctggaacatcatgtggtccatcagtactggacagccaggccctcccattttcctcatagtttacatttgcactctaatttagctgctgtctgggaccaacacttgtacagcagtgatccattgtatgttccagatgacagggttttggttactgagactcaggttattcgggaaaccctatggttactttcaggagtgaaaaagctctttatatttcagttgatagatgggaaggtaactgtgagaaacaatattatagtaactcatttaacacatagctgtttacgatctgtgctggaacaaatagcagcatatggccaggttgtgtttcgactccaggagttcattgatgaagtcatgggacacagttctgagagcatgctgcctggaagtgggtctgttcctaagaagtcaactgaagctccctttagaacctaccaggctttcatgtgggccctgtacaaatatttcattagtttcaaagaggaacttgcagaaattgagaagtgcatcatcaataatgatactacaataactcttgcaatagtggtggacaagttggcacctcgattgtctcagctcaaggttctgcacaaagtgtttagtactggagtagcagaagttccacctgatactcgaaatgtcgtccgggcctctcacctgcttaacaccctgtacaaggccattcttgaatatgacaatgttggagaagcctctgagcaaaccgtctccctccttttctctctctgggtggaaacggtgcggccttacctgcagacggtggacgagtggatcgtgcacgggcacctgtgggatggcgccagggagttcatcatccagagaaacaaaaatgttccagttaatcacagagacttctggtatgcaacttacacgttatatagcgtatcagaaaagacagaaaatgaagaaaaaatgagtgataacgctagtgcgagttccggcagtgaccaggggccctccagcaggcagcacaccatggtgtccttcctcaaacctgtcctgaagcagatcataatggctggcaagtcgatgcagctgctgaagaacctgcagtgtgcggagagcaccacctgccaggcaggagccagagatgcagaaagaaaaagtttatacactctctttctggaatctgtacagtcccgtcttcgacatggagaagattccactccacaggttcttactgagcaacaggcaaccaaggagaacctgatgaagatgcagtccattgctgaaagccatcttgaactggatgatgttcatgatccactgcttgccattaactttgcaaggatgtatttggagcagagtgactttcacgagaagtttgctggtggtgatgtatgtgtggatagatcatcggaatctgtgacatgccagacttttgaattaacgctgagatcctgcctctatcctcatattgacaagcagtatctagattgctgtggaaatctcatgcaaactctaaaaaaagattacaggttggtagaatacttgcaagctatgaggaattttttcttaatggaaggaggagataccatgtatgacttctacacgtcaatttttgataaaataagagaaaaggaaacatggcagaatgtgtcttttcttaatgtccaactccaagaagcagtaggacagcgttatcctgaagatagttcacgtctatctatatcttttgaaaatgttgacacagctaagaagaagctgcctgttcatatcttagatggtctgaccctcagctacaaggtcccatggcccgtggacattgttataagtttggaatgtcaaaaaatttataatcaagtgtttcttctcttattgcaaataaagtgggcaaaatatagtctggatgttttactttttggtgaactggttagtactgcagaaaaaccacgacttaaagaaggccttatacatgaacaagacacagttgctcagttcggaccacaaaaagaaccagtaagacagcagattcatcgcatgttcctcttaagagtgaagctcatgcatttcgtgaacagcttgcacaactacatcatgaccaggattctacacagtacagggctggagtttcaacatcaagtcgaggaagccaaggatttagatcaattgattaaaattcactataggtatctgtcaaccatccatgaccggtgtctgctgagagaaaaggtcagctttgtgaaagaagctatcatgaaggtgttgaacttggctctcatgtttgcagacggttggcaggcaggcctgggcacttggcgaatggaatctatagagaaaatggaatctgattttaaaaactgccatatgtttcttgtaaccattttaaacaaagccgtctgtagaggatcctttccccattgtgagtatatcatgttaaaatatttctacctctgtatttccttgtaactaagtgtatgtgtcattgttttgttactgatcccatgaagaattagaaattctcaccattttcaaaactgaaaagtcccttagcagttgtcccatgctttgaattgctttttaagcattacggtgaggtgagtgtaagcctgaggatcttactttctggtataccatttattacaacagatttctaaaactcctattaaataaagttgatggcagaatagatttctgtcacacttca

SEQ ID NO: 196162 - DNA, 338 bp, Homo sapiens
  Payload ID: 18695
  Gene Name: tubulin, gamma complex associated protein 5
  ENST ID: ENST00000625645
  CDS Start-End: 30-338
gttagacgcgcgctgcaggagcgcggaacatggcgcggcacgggccaccgtggagtcggttggacgcgcagcaggagcgcgacgtgcgggagctcgtccggggtgtcgccggcctccaggacgaggcagaccccaacttccagctcgccctaaacttcgcctggtccaacttcagatttcatcgtttcttggatgtcaacagccacaaaatagaaaaaacaatcgaaggaatttatgaaaaatttgtcattcattctgatctaagcaaagctgctagttggaagagattaacggaggaatttctaaatgcaccacttcccagtataaaggaaataaag

SEQ ID NO: 196163 - DNA, 335 bp, Homo sapiens
  Payload ID: 18695
  Gene Name: tubulin, gamma complex associated protein 5
  ENST ID: ENST00000630031
  CDS Start-End: 27-335
agacgcgcgctgcaggagcgcggaacatggcgcggcacgggccaccgtggagtcggttggacgcgcagcaggagcgcgacgtgcgggagctcgtccggggtgtcgccggcctccaggacgaggcagaccccaacttccagctcgccctaaacttcgcctggtccaacttcagatttcatcgtttcttggatgtcaacagccacaaaatagaaaaaacaatcgaaggaatttatgaaaaatttgtcattcattctgatctaagcaaagctgctagttggaagagattaacggaggaatttctaaatgcaccacttcccagtataaaggaaataaag

SEQ ID NO: 196164 - DNA, 757 bp, Homo sapiens
  Payload ID: 18695
  Gene Name: tubulin, gamma complex associated protein 5
  ENST ID: ENST00000627961
  CDS Start-End: 24-461
cgcgcgctgcaggagcgcggaacatggcgcggcacgggccaccgtggagtcggttggacgcgcagcaggagcgcgacgtgcgggagctcgtccggggtgtcgccggcctccaggacgaggcagaccccaacttccagctcgccctaaacttcgcctggtccaacttcagatttcatcgtttcttggatgtcaacagccacaaaatagaaaaaacaatcgagggaatttatgaaaaatttgtcattcattctgatctaagcaaagctgctagttggaagagattaacggaggaatttctaaatgcaccacttcccagtataaaggaaataaagatgcacattattccatactgtcacttcttctgtgtctgtcagactctccttcaaacagcagttatgtggagacaccaagaaataaagaagtggaaaagaaagatgatttcgactggggaaaatacttgatggaagatgaagaaatggacattggtccgtacatggacacaccaaattggtctgaagaaagtgaagaggaaaatgatcaacagcccttaagcagagaggactctggaattcaggtagacaggacaccgttagaagaacaagatcaaaacagaaaactggatccttgtatcagttggaaagatgagccagatgaccgaagctggctggaacatcatgtggtccatcagtactggacagccaggccctcccattttcctcatagtttacatttgcactctaatttagctgctgtctgg

SEQ ID NO: 196165 - DNA, 439 bp, Homo sapiens
  Payload ID: 18695
  Gene Name: tubulin, gamma complex associated protein 5
  ENST ID: ENST00000625753
  CDS Start-End: 131-439
gaagtcgcccggcgcgggagcgcgaactctcgcgagaatgccgccagctccggaggcgactgcggcaggagcccgagctctcgcgcgacaggcaccaattcgttagacgcgcgctgcaggagcgcggaacatggcgcggcacgggccaccgtggagtcggttggacgcgcagcaggagcgcgacgtgcgggagctcgtccggggtgtcgccggcctccaggacgaggcagaccccaacttccagctcgccctaaacttcgcctggtccaacttcagatttcatcgtttcttggatgtcaacagccacaaaatagaaaaaacaatcgaaggaatttatgaaaaatttgtcattcattctgatctaagcaaagctgctagttggaagagattaacggaggaatttctaaatgcaccacttcccagtataaaggaaataaag

SEQ ID NO: 196166 - DNA, 500 bp, Homo sapiens
  Payload ID: 18695
  Gene Name: tubulin, gamma complex associated protein 5
  ENST ID: ENST00000626693
  CDS Start-End: 1-500
attaacggaggaatttctaaatgcaccacttcccagtataaaggaaataaagacagatgcacattattccatactgtcacttcttctgtgtctgtcagactctccttcaaacagcagttatgtggagacaccaagaaataaagaagtggaaaagaaagatgatttcgactggggaaaatacttgatggaagatgaagaaatggacattggtccgtacatggacacaccaaattggtctgaagaaagtgaagaggaaaatgatcaacagcccttaagcagagaggactctggaattcaggtagacaggacaccgttagaagaacaagatcaaaacagaaaactggatccttgtatcagttggaaagatgaccgaagctggctggaacatcatgtggtccatcagtactggacagccaggccctcccattttcctcatagtttacatttgcactctaatttagctgctgtctgggaccaacacttgtacagcagtgatccat

SEQ ID NO: 196167 - DNA, 3588 bp, Homo sapiens
  Payload ID: 18695
  Gene Name: tubulin, gamma complex associated protein 5
  ENST ID: ENST00000631187
  CDS Start-End: 27-3107
agacgcgcgctgcaggagcgcggaacatggcgcggcacgggccaccgtggagtcggttggacgcgcagcaggagcgcgacgtgcgggagctcgtccggggtgtcgccggcctccaggacgaggcagaccccaacttccagctcgccctaaacttcgcctggtccaacttcagatttcatcgtttcttggatgtcaacagccacaaaatagaaaaaacaatcgagggaatttatgaaaaatttgtcattcattctgatctaagcaaagctgctagttggaagagattaacggaggaatttctaaatgcaccacttcccagtataaaggaaataaagacagatgcacattattccatactgtcacttcttctgtgtctgtcagactctccttcaaacagcagttatgtggagacaccaagaaataaagaagtggaaaagaaagatgatttcgactggggaaaatacttgatggaagatgaagaaatggacattggtccgtacatggacacaccaaattggtctgaagaaagtgaagaggaaaatgatcaacagcccttaagcagagaggactctggaattcaggtagacaggacaccgttagaagaacaagatcaaaacagaaaactggatccttgtatcagttggaaagatgagccagatgaccgaagctggctggaacatcatgtggtccatcagtactggacagccaggccctcccattttcctcatagtttacatttgcactctaatttagctgctgtctgggaccaacacttgtacagcagtgatccattgtatgttccagatgacagggttttggttactgagactcaggttattcgggaaaccctatggttactttcaggagtgaaaaagctctttatatttcagttgatagatgggaaggtaactgtgagaaacaatattatagtaactcatttaacacatagctgtttacgatctgtgctggaacaaatagcagcatatggccaggttgtgtttcgactccaggagttcattgatgaagtcatgggacacagttctgagagcatgctgcctggaagtgggtctgttcctaagaagtcaactgaagctccctttagaacctaccaggctttcatgtgggccctgtacaaatatttcattagtttcaaagaggaacttgcagaaattgagaagtgcatcatcaataatgatactacaataactcttgcaatagtggtggacaagttggcacctcgattgtctcagctcaaggttctgcacaaagtgtttagtactggagtagcagaagttccacctgatactcgaaatgtcgtccgggcctctcacctgcttaacaccctgtacaaggccattcttgaatatgacaatgttggagaagcctctgagcaaaccgtctccctccttttctctctctgggtggaaacggtgcggccttacctgcagacggtggacgagtggatcgtgcacgggcacctgtgggatggcgccagggagttcatcatccagagaaacaaaaatgttccagttaatcacagagacttctggtatgcaacttacacgttatatagcgtatcagaaaagacagaaaatgaagaaaaaatgagtgataacgctagtgcgagttccggcagtgaccaggggccctccagcaggcagcacaccatggtgtccttcctcaaacctgtcctgaagcagatcataatggctggcaagtcgatgcagctgctgaagaacctgcagtgtgcggagagcaccacctgccaggcaggagccagagatgcagaaagaaaaagtttatacactctctttctggaatctgtacagtcccgtcttcgacatggagaagattccactccacaggttcttactgagcaacaggcaaccaaggagaacctgatgaagatgcagtccattgctgaaagccatcttgaactggatgatgttcatgatccactgcttgccattaactttgcaaggatgtatttggagcagagtgactttcacgagaagtttgctggtggtgatgtatgtgtggatagatcatcggaatctgtgacatgccagacttttgaattaacgctgagatcctgcctctatcctcatattgacaagcagtatctagattgctgtggaaatctcatgcaaactctaaaaaaagattacaggttggtagaatacttgcaagctatgaggaattttttcttaatggaaggaggagataccatgtatgacttctacacgtcaatttttgataaaataagagaaaaggaaacatggcagaatgtgtcttttcttaatgtccaactccaagaagcagtaggacagcgttatcctgaagatagttcacgtctatctatatcttttgaaaatgttgacacagctaagaagaagctgcctgttcatatcttagatggtctgaccctcagctacaaggtcccatggcccgtggacattgttataagtttggaatgtcaaaaaatttataatcaagtgtttcttctcttattgcaaataaagtgggcaaaatatagtctggatgttttactttttggtgaactggttagtactgcagaaaaaccacgacttaaagaaggccttatacatgaacaagacacagttgctcagttcggaccacaaaaagaaccagtaagacagcagattcatcgcatgttcctcttaagagtgaagctcatgcatttcgtgaacagcttgcacaactacatcatgaccaggattctacacagtacagggctggagtttcaacatcaagtcgaggaagccaaggatttagatcaattgattaaaattcactataggtatctgtcaaccatccatgaccggtgtctgctgagagaaaaggtcagctttgtgaaagaagctatcatgaaggtgttgaacttggctctcatgtttgcagacggttggcaggcaggcctgggcacttggcgaatggaatctatagagaaaatggaatctgattttaaaaactgccatatgtttcttgtaaccattttaaacaaagccgtctgtagaggatcctttccccattgtcttgctttgttgcccatgctggagcgcattggcacagtcttggctcactgaagcctcaacctccggggaccaagcactcctccctcagcctcctgagtagctgagactacagatggaatctcactctgtgagtctcactctatcgcccaggctggagtgcagtggcacaatctcagctcactgcaacctctgcctccagagctcaagcaatccgcccaccttgacctcccaaaatgctgggattaccgacctgtgtgtactttataaattaaactttatcataggcctgcatatatagaaaaatatatagtctatacagtgtagagtgtgctactatctgtcctttcagacatccaccaggggtcttgaagcttatcccccagaagatgaggtgggaactactgtaaataattttgaccctttgaaatctgatgagacttgttttacttcctaacatatggtatattttgtgaatgttacgtgtttatttgaaaactttaattcctgtcagtaacagcttgaagtcttcagt

SEQ ID NO: 196168 - DNA, 5612 bp, Homo sapiens
  Payload ID: 18696
  Gene Name: tubulin, gamma complex associated protein 6
  Uniprot ID: Q96RT7
  ENST ID: ENST00000248846
  CDS Start-End: 106-5565
attcagcctcttcggaccctctctcactccctgtcttccggagcgtgagtgaagcccgggtgaggtgttttcccacacgccgggggcccggagctgagaaggggcatggccagcatcacgcagctgttcgacgacctgtgtgaggccctcctgccggctgccaagactcacctgggccagcgcagtgtgaaccggaagagggcaaagcggagcctcaagaaggtggcctacaatgctcttttcacaaatctttttcaagatgagactcaacagctgcagcctgacatgtcaaaactaccagcgagaaacaagatcctcatgttgtcctttgacttgagagtgggtggcctgggccccaaggccgaccgtttggaggagcttgtggaggagctggaagcagccccttgctgtccgcttttggaggtggggtctgttttggacctcctggttcagctggcagggagtggtccccctcaagttctgccgagaaaacgagactacttccttaacaacaagcatgtggggagaaacgttccgtacagcggctatgattgcgacgacctgagtgtgtttgagatggacgttcagtctctgatctccagagaagagtgtttgtgtcacagcatgatccaggaaacacttcaggttatggaggctgctccaggcactggcctgcccaccgtcgggctcttctcatttggtgacccttgtggtgacaggttcgagagagacacccgggtctcgctcttcggggcccttgtgcacagccgcacttatgacatggacgtccgactgggcctgccccccgtgccagacaatgcggacctctctgggctggctattaaggtcccaccgagtgtggatcagtgggaagacgaaggattccagtcagcgtccaacttgactcctgattcccagtctgagcccagcgtgaccccagacgtggacctgtgggaagccgcacttacctatgaggccagcaagcggaggtgctgggagcgagttggctgcccccctggccacagagaggagccttacctgacggaggcgggaagggacgctttcgacaagttctgcaggctccaccaaggggagctccagctgcttgctgggggcgtcctacaggccccgcagcccgtgctggtgaaggagtgcgagctggtgaaagacgtgctgaacgtcttgattggggtcgtgtctgccacgttttcgctctgccagccggcccaggcctttgtggtgaagcggggcgtccacgtgtcaggagcgtctcccgagagcatcagcagcctgctctcggaagtggccgagtatgggacctgctacacgcgcctgagtcatttctctctgcagcccgtcctggactctttgtacagcaagggcctcgtgttccaggccttcaccagtggcctgaggaggtacctgcagtattaccgggcctgcgtcctttccactccgcccaccctgagcctcctcaccattggttttctcttcaagaaacttggccggcagctcaggtacctggccgagctctgtggcgttggcgctgtgctcccgggcacctgtggaggaggccccagggccgcgtttcccaccggcgtgaagctgctgtcctacctctaccaggaggctctgcacaactgcagcaacgagcactaccctgtactgctgtccctgctgaagaccagctgcgagccctacacccggttcatccacgactgggtgtacagcggggtgttcagagacgcttatggcgagttcatgattcaggtgaaccacgagtacctcagcttccgagataagttgtactggacacatggctacgtgctcatctccaaagaggtggaggactgtgttcccgtgtttctgaagcacattgcccacgacatatacgtctgcggaaagaccattaacctgctgaagctctgctgcccccggcattacctctgttggtccgacgtccctgtcccccggatctcggtgattttctcccttgaggagttgaaggagattgagaaggactgtgccgtctacgttgggcgcatggagagggtggcccgccacagctctgtcagcaaggaggagaaggaattacgtatggaaattgcaaaacaagaattaatcgctcatgcccgggaagcagcatccagggtcctgagtgcactgagtgaccggcagatgtcagaacggatggccttggatgcccggaagcgtgagcagtttcagaggctgaaagaacaatttgtgaaggaccaggagcgacgccaggcggccaggcaggaggagctggatgatgacttcagctacgcccgtgaactccgagacagggagagaaggctgaagtccctggaggaggagctggagaggaaggcgaggcaggcactggtcgaccactacagcaagctctctgcagaggcagctcgtcgggagcagaaggcactgtggagaatccagaggcaccgactggagagtgcacggcttcgttttctcttagaagatgagaaacacattcaggagatgctgaaagcagtgtctgaggctcaccagccccaggagccgccagacgtcctcttgagcgtgcacccccaggtcacgtctccgggccctgagcacccagagggaggccaaggctgtgattctgggtctgcagagcaacactcgcctgcctgggatggctggaacaggccaggcctgctgaccccacagccccttaagcctctagcagtgggggctggtggcagggggctgcagcaggcggagggggccagacccttctctgacagcctcagcattggagacttcctacctgtgggcccaggggctgagccgtccgtgcagactggcatggtccctctcctggaggtggcgctgcagaccattaacttggacctgcccccctcagctcctggggaggcacccgcagcagccagcactcagccctccaggccacaggagtacgactttagtactgtcctgaggccagctgtggccacctcacctgcaccagggcccctgcaggctgcagagtgcagcttgggcagctcagggctacagctgtgggaggacagttgtgggaagatggatgcctgtggctccgcctcgcgggagactctgctcccctcacacccacccaggcgtgctgctctggaggaggggagcagccagcccacagagcggctctttgggcaggtgtcagggggtggtcttcccacaggggactacgcttctgaaatagctcccacccggccacggtggaacacccacgggcacgtgtctgacgccagcatcagggtcggggagaatgtgtcagatgtggctcccacccagccacggtggaacacccacggacacgtatccaatgccagcatcagcttaggggagtctgtgtcagatgtggctcccactcggccacggtggaacatccatggacatgtgtccaacgccagcatcagggtcggggagaatgtgtcagatgtggctcccaccaggccacggtggaatacccacgggcacgtgtccaacgccagcatcagggttggggagaacgtgtcggacgtggctcccacccggccacggtggaacacccatggacacgtgtccgatgccagcatcagcttgggggagtctgtgtcagacatggctcccgcccggccacggtggaacacccatggacacgtgtctgatgccagcatcagcttgggggagtctgtgtcagacatggctcccacccggccacggtggaacacccacggacatgtgtctgacaccagcatcagggttggggagaacgtatcggacgtggctcccatccggtcacggtgcaacacccatggacacgtgtccgacgccagcatcagcttgggggagcctgtgtcggatgtggtttccacccggccacggtggaacacccatgtacccatccctccgccccacatggtgctgggggctctctcaccagaagctgagcccaacacacccaggccccaacagagcccccctggccacacgtcccagtcagcgctcagcctgggagcacagagcactgtgctggactgtgggccacggctgcctgtagaagtggggccatctctgtcctcccccagctcgggctgcggggaggggagcatcagcgtgggggagaacgtgtcagacgtggctcccacccaaccatggtggcccaacaccccgggagacagtgtctctgaagaactaggccctgggaggagcggggacactgaggacctctctccaaattggcctctcaactcacaggaagacacagctgcccagagcagcccaggccgtggtgaggaggcggaggcatcggcggcggaggctcagggtggggagcaggcctacctggcaggcctggcagggcagtaccacttggagcggtacccggacagttacgagtccatgtccgagccgcccattgctcatcttttgcgccccgtgcttccccgggccttcgccttccccgtggacccccaggtccagtctgccgctgatgagactgctgtgcagctgagcgagttgctgacgctgcccgtgctcatgaagcgctccatcacggcaccgctggccgcccacatctccttggtgaacaaggccgctgtcgactacttcttcgtggagctgcacctggaggcgcactatgaggcactgcggcacttcctgctgatggaggacggcgagttcgcccagtccctcagcgacctgctctttgagaagcttggagctgggcaaacgcccggagagctgctcaacccgctggtgctgaactctgtgctgagcaaggccctgcagtgcagcctgcatggggacaccccgcacgcctccaacctctccctcgctctcaagtacctgcccgaggtgtttgcccccaacgccccggatgtgctgagctgcctggagctcaggtacaaggtggactggcctctcaacattgtcatcaccgagggctgcgtgagcaagtacagcggcgtcttctccttcctgctgcagctgaagctcatgatgtgggcgctcaaggacgtctgcttccacctcaagcgcacagccctgctgagccacatggccggctctgtgcagttccgtcagctgcagctgttcaagcacgagatgcagcatttcgtgaaggtcatccagggctacatcgccaaccagatcctgcacgtcacctggtgcgagttcagggccaggttggccaccgtgggcgacctggaggagatccagcgtgcgcacgcagagtacctgcacaaggccgtcttcaggggcctgctcacggagaaggcggcgcccgtcatgaacgtcatccacagcatcttcagcctcgtgctcaagttccgcagccagctcatctcccaggcctgggggccccctgggggcccgcggggtgcagagcaccccaactttgcactcatgcagcagtcctacaacaccttcaagtactactcccactttctcttcaaagtggtgaccaagctggtgaaccgcggctaccagccccacctggaggactttctgctgcgcatcaacttcaacaactactaccaggacgcctgaggctgctctgcgggggacgtgcacaataaaggtgttctcggaccctg

SEQ ID NO: 196169 - DNA, 6078 bp, Homo sapiens
  Payload ID: 18696
  Gene Name: tubulin, gamma complex associated protein 6
  ENST ID: ENST00000439308
  CDS Start-End: 513-4994
actttccacgggtgaggcctggagaacgggtggacgtgcaggccagaacccgggacccacccggctgagcccccagactctccgctgcccacgaccctcggagtggcaccctctcctggccgtctcctctcgtgggtcccgaagaacgggtgcaaagccgagttcgtccgctgtactgcgcgggcgcgcgtttcgttcttcggttttgccacggttctgtgactccctaaaggttgagggctactgaattagaagaaacgccgagctggcttctggtgggctgccgggcgccgggcagcgtgcttggactggggagggcagggcgtgtttactctgagtagagcaaccgcaagacctcctttaaaaaataccagttctgagcttcggcattggagaggccgcctgtcattcagcctcttcggaccctctctcactccctgtcttccggagcgtgagtgaagcccgggtgaggtgttttcccacacgccgggggcccggagctgagaaggggcatggccagcatcacgcagctgttcgacgacctgtgtgaggccctcctgccggctgccaagactcacctgggccagcgcagtgtgaaccggaagagggcaaagcggagcctcaagaaggtggcctacaatgctcttttcacaaatctttttcaagatgagactcaacagctgcagcctgacatgtcaaaactaccagcgagaaacaagatcctcatgttgtcctttgacttgagagtgggtggcctgggccccaaggccgaccgtttggaggagcttgtggaggagctggaagcagccccttgctgtccgcttttggaggtggggtctgttttggacctcctggttcagctggcagggagtggtccccctcaagttctgccgagaaaacgagactacttccttaacaacaagcatgtggggagaaacgttccgtacagcggctatgattgcgacgacctgagtgtgtttgagatggacgttcagtctctgatctccagagaagagtgtttgtgtcacagcatgatccaggaaacacttcaggttatggaggctgctccaggcactggcctgcccaccgtcgggctcttctcatttggtgacccttgtggtgacaggttcgagagagacacccgggtctcgctcttcggggcccttgtgcacagccgcacttatgacatggacgtccgactgggcctgccccccgtgccagacaatgcggacctctctgggctggctattaaggtcccaccgagtgtggatcagtgggaagacgaaggattccagtcagcgtccaacttgactcctgattcccagtctgagcccagcgtgaccccagacgtggacctgtgggaagccgcacttacctatgaggccagcaagcggaggtgctgggagcgagttggctgcccccctggccacagagaggagccttacctgacggaggcgggaagggacgctttcgacaagttctgcaggctccaccaaggggagctccagctgcttgctgggggcgtcctacaggccccgcagcccgtgctggtgaaggagtgcgagctggtgaaagacgtgctgaacgtcttgattggggtcgtgtctgccacgttttcgctctgccagccggcccaggcctttgtggtgaagcggggcgtccacgtgtcaggagcgtctcccgagagcatcagcagcctgctctcggaagtggccgagtatgggacctgctacacgcgcctgagtcatttctctctgcagcccgtcctggactctttgtacagcaagggcctcgtgttccaggccttcaccagtggcctgaggaggtacctgcagtattaccgggcctgcgtcctttccactccgcccaccctgagcctcctcaccattggttttctcttcaagaaacttggccggcagctcaggtacctggccgagctctgtggcgttggcgctgtgctcccgggcacctgtggaggaggccccagggccgcgtttcccaccggcgtgaagctgctgtcctacctctaccaggaggctctgcacaactgcagcaacgagcactaccctgtactgctgtccctgctgaagaccagctgcgagccctacacccggttcatccacgactgggtgtacagcggggtgttcagagacgcttatggcgagttcatgattcaggtgaaccacgagtacctcagcttccgagataagttgtactggacacatggctacgtgctcatctccaaagaggtggaggactgtgttcccgtgtttctgaagcacattgcccacgacatatacgtctgcggaaagaccattaacctgctgaagctctgctgcccccggcattacctctgttggtccgacgtccctgtcccccggatctcggtgattttctcccttgaggagttgaaggagattgagaaggactgtgccgtctacgttgggcgcatggagagggtggcccgccacagctctgtcagcaaggaggagaaggaattacgtatggaaattgcaaaacaagaattaatcgctcatgcccgggaagcagcatccagggtcctgagtgcactgagtgaccggcagatgtcagaacggatggccttggatgcccggaagcgtgagcagtttcagaggctgaaagaacaatttgtgaaggaccaggagcgacgccaggcggccaggcaggaggagctggatgatgacttcagctacgcccgtgaactccgagacagggagagaaggctgaagtccctggaggaggagctggagaggaaggcgaggcaggcactggtcgaccactacagcaagctctctgcagaggcagctcgtcgggagcagaaggcactgtggagaatccagaggcaccgactggagagtgcacggcttcgttttctcttagaagatgagaaacacattcaggagatgctgaaagcagtgtctgaggctcaccagccccaggagccgccagacgtcctcttgagcgtgcacccccaggtcacgtctccgggccctgagcacccagagggaggccaaggctgtgattctgggtctgcagagcaacactcgcctgcctgggatggctggaacaggccaggcctgctgaccccacagccccttaagcctctagcagtgggggctggtggcagggggctgcagcaggcggagggggccagacccttctctgacagcctcagcattggagacttcctacctgtgggcccaggggctgagccgtccgtgcagactggcatggtccctctcctggaggtggcgctgcagaccattaacttggacctgcccccctcagctcctggggaggcacccgcagcagccagcactcagccctccaggccacaggagtacgactttagtactgtcctgaggccagctgtggccacctcacctgcaccagggcccctgcaggctgcagagtgcagcttgggcagctcagggctacagctgtgggaggacagttgtgggaagatggatgcctgtggctccgcctcgcgggagactctgctcccctcacacccacccaggcgtgctgctctggaggaggggagcagccagcccacagagcggctctttgggcaggtgtcagggggtggtcttcccacaggggactacgcttctgaaatagctcccacccggccacggtggaacacccacgggcacgtgtctgacgccagcatcagggtcggggagaatgtgtcagatgtggctcccacccagccacggtggaacacccacggacacgtatccaatgccagcatcagcttaggggagtctgtgtcagatgtggctcccactcggccacggtggaacatccatggacatgtgtccaacgccagcatcagggtcggggagaatgtgtcagatgtggctcccaccaggccacggtggaatacccacgggcacgtgtccaacgccagcatcagggttggggagaacgtgtcggacgtggctcccacccggccacggtggaacacccatggacacgtgtccgatgccagcatcagcttgggggagtctgtgtcagacatggctcccgcccggccacggtggaacacccatggacacgtgtctgatgccagcatcagcttgggggagtctgtgtcagacatggctcccacccggccacggtggaacacccacggacatgtgtctgacaccagcatcagggttggggagaacgtatcggacgtggctcccatccggtcacggtgcaacacccatggacacgtgtccgacgccagcatcagcttgggggagcctgtgtcggatgtggtttccacccggccacggtggaacacccatgtacccatccctccgccccacatggtgctgggggctctctcaccagaagctgagcccaacacacccaggccccaacagagcccccctggccacacgtcccagtcagcgctcagcctgggagcacagagcactgtgctggactgtgggccacggctgcctgtagaagtggggccatctctgtcctcccccagctcgggctgcggggaggggagcatcagcgtgggggagaacgtgtcagacgtggctcccacccaaccatggtggcccaacaccccgggagacagtgtctctgaagaactaggtcagagtagggtggctggtggtcaggagtgggactgtgggacgcacagagcctgggaggccctgggaggagcggggacactgaggacctctctccaaattggcctctcaactcacaggaagacacagctgcccagagcagcccaggccgtggtgaggaggcggaggcatcggcggcggaggctcagggtggggagcaggcctacctggcaggcctggcagggcagtaccacttggagcggtacccggacagttacgagtccatgtccgagccgcccattgctcatcttttgcgccccgtgcttccccgggccttcgccttccccgtggacccccaggtccagtctgccgctgatgagactgctgtgcagctgagcgagttgctgacgctgcccgtgctcatgaagcgctccatcacggcaccgctggccgcccacatctccttggtgaacaaggccgctgtcgactacttcttcgtggagctgcacctggaggcgcactatgaggcactgcggcacttcctgctgatggaggacggcgagttcgcccagtccctcagcgacctgctctttgagaagcttggagctgggcaaacgcccggagagctgctcaacccgctggtgctgaactctgtgctgagcaaggccctgcagtgcagcctgcatggggacaccccgcacgcctccaacctctccctcgctctcaagtacctgcccgaggtgtttgcccccaacgccccggatgtgctgagctgcctggagctcaggtacaaggtggactggcctctcaacattgtcatcaccgagggctgcgtgagcaagtacagcggcgtcttctccttcctgctgcagctgaagctcatgatgtgggcgctcaaggacgtctgcttccacctcaagcgcacagccctgctgagccacatggccggctctgtgcagttccgtcagctgcagctgttcaagcacgagatgcagcatttcgtgaaggtcatccagggctacatcgccaaccagatcctgcacgtcacctggtgcgagttcagggccaggttggccaccgtgggcgacctggaggagatccagcgtgcgcacgcagagtacctgcacaaggccgtcttcaggggcctgctcacggagaaggcggcgcccgtcatgaacgtcatccacagcatcttcagcctcgtgctcaagttccgcagccagctcatctcccaggcctgggggccccctgggggcccgcggggtgcagagcaccccaactttgcactcatgcagcagtcctacaacaccttcaagtactactcccactttctcttcaaagtggtgaccaagctggtgaaccgcggctaccagccccacctggaggactttctgctgcgcatcaacttcaacaactactaccaggacgcctgaggctgctctgcgggggacgtgcacaataaaggtgttctcggaccctg

SEQ ID NO: 196170 - DNA, 1509 bp, Homo sapiens
  Payload ID: 18696
  Gene Name: tubulin, gamma complex associated protein 6
  ENST ID: ENST00000425018
  CDS Start-End: 1-1467
ctggactgtgggccacggctgcctgtagaagtggggccatctctgtcctcccccagctcgggctgcggggaggggagcatcagcgtgggggagaacgtgtcagacgtggctcccacccaaccatggtggcccaacaccccgggagacagtgtctctgaagaactaggccctgggaggagcggggacactgaggacctctctccaaattggcctctcaactcacaggaagacacagctgcccagagcagcccaggccgtggtgaggaggcggaggcatcggcggcggaggctcagggtggggagcaggcctacctggcaggcctggcagggcagtaccacttggagcggtacccggacagttacgagtccatgtccgagccgcccattgctcatcttttgcgccccgtgcttccccgggccttcgccttccccgtggacccccaggtccagtctgccgctgatgagactgctgtgcagctgagcgagttgctgacgctgcccgtgctcatgaagcgctccatcacggcaccgctggccgcccacatctccttggtgaacaaggccgctgtcgactacttcttcgtggagctgcacctggaggcgcactatgaggcactgcggcacttcctgctgatggaggacggcgagttcgcccagtccctcagcgacctgctctttgagaagcttggagctgggcaaacgcccggagagctgctcaacccgctggtgctgaactctgtgctgagcaaggccctgcagtgcagcctgcatggggacaccccgcacgcctccaacctctccctcgctctcaagtacctgcccgaggtgtttgcccccaacgccccggatgtgctgagctgcctggagctcaggtacaaggtggactggcctctcaacattgtcatcaccgagggctgcgtgagcaagtacagcggcgtcttctccttcctgctgcagctgaagctcatgatgtgggcgctcaaggacgtctgcttccacctcaagcgcacagttccgtcagctgcagctgttcaagcacgagatgcagcatttcgtgaaggtcatccagggctacatcgccaaccagatcctgcacgtcacctggtgcgagttcagggccaggttggccaccgtgggcgacctggaggagatccagcgtgcgcacgcagagtacctgcacaaggccgtcttcaggcggcgcccgtcatgaacgtcatccacagcatcttcagcctcgtgctcaagttccgcagccagctcatctcccaggcctgggggccccctgggggcccgcggggtgcagagcaccccaactttgcactcatgcagcagtcctacaacaccttcaagtactactcccactttctcttcaaagtggtgaccaagctggtgaaccgcggctaccagccccacctggaggactttctgctgcgcatcaacttcaacaactactaccaggacgcctgaggctgctctgcgggggacgtgcacaataaaggtgttctcgga

SEQ ID NO: 196171 - DNA, 830 bp, Homo sapiens
  Payload ID: 18696
  Gene Name: tubulin, gamma complex associated protein 6
  ENST ID: ENST00000434349
  CDS Start-End: 1-830
cgagtgtggatcagtgggaagacgaaggattccagtcagcgtccaacttgactcctgattcccagtctgagcccagcgtgaccccagacgtggacctgtgggaagccgcacttacctatgaggccagcaagcggagcccccctggccacagagaggagccttacctgacggaggcgggaagggacgctttcgacaagttctgcaggctccaccaaggggagctccagctgcttgctgggggcgtcctacaggccccgcagcccgtgctggtgaaggagtgcgagctggtgaaagacgtgctgaacgtcttgattggggtcgtgtctgccacgttttcgctctgccagccggcccaggcctttgtggtgaagcggggcgtccacgtgtcaggagcgtctcccgagagcatcagcagcctgctctcggaagtggccgagtatgggacctgctacacgcgcctgagtcatttctctctgcagcccgtcctggactctttgtacagcaagggcctcgtgttccaggccttcaccagtggcctgaggaggtacctgcagtattaccgggcctgcgtcctttccactccgcccaccctgagcctcctcaccattggttttctcttcaagaaacttggccggcagctcaggtacctggccgagctctgtggcgttggcgctgtgctcccgggcacctgtggaggaggccccagggccgcgtttcccaccggcgtgaagctgctgtcctacctctaccaggaggctctgcacaactgcagcaacgagcactaccctgtactgctgtccctgctgaagaccagctgcgagccctacacc

SEQ ID NO: 196172 - DNA, 1754 bp, Homo sapiens
  Payload ID: 18697
  Gene Name: tubulointerstitial nephritis antigen
  Uniprot ID: Q9UJW2
  ENST ID: ENST00000259782
  CDS Start-End: 97-1527
gtcttaatgactagaattcaggttccaaggagaagcccacaaggctaagggtattggatataacggaaagtggaagctatacctgacttccagagaatgtggaccggatataagatcttaatcttctcttatcttactacagaaatctggatggagaagcagtatttatctcaaagagaagtggacctagaggcttatttcactaggaatcacaccgttttgcaaggtactcgattcaaaagagccattttccaagggcaatactgtagaaattttggctgttgtgaagacagagatgatggctgtgtcactgagttctatgcggcgaatgcgttgtgctactgtgataaattctgtgacagagaaaattctgattgctgtcctgactacaagtccttttgccgtgaagagaaagaatggcctcctcacacacagccttggtatccagaaggttgcttcaaagatggtcaacattatgaagagggatcagtaattaaagaaaactgcaactcctgcacatgctcaggacagcaatggaaatgttcccagcatgtatgccttgttcgttcagaattaattgaacaggtcaataaaggagactatggatggacagcacagaattacagccaattttggggaatgactttagaagatggttttaaatttcgccttggcactttgccacctagtcccatgctcctgagcatgaatgaaatgacagcttctttacctgcaacaactgatcttccagagttttttgttgcttcttataaatggcctggatggactcatggcccattggatcaaaaaaattgtgctgcatcctgggcattttccactgcaagtgtggctgctgaccgaatagcaattcagtctaagggtcgatacacggccaatctatcccctcagaatttgatctcttgctgtgccaagaaccgtcatggatgcaatagtggaagcatcgatagggcttggtggtacctgagaaaacgtggactggtatcccacgcatgctacccacttttcaaagaccaaaatgctaccaacaatggatgtgccatggcaagcaggtctgatgggcgaggaaaacggcatgccacgaagccatgtcccaacaacgtagaaaaatctaacaggatctatcaatgttctcctccatacagagtctcttccaacgaaactgagataatgaaagaaatcatgcaaaatggaccagttcaagccataatgcaagtccgtgaagatttcttccattataagacagggatatacagacatgttaccagcacaaataaagaatcagaaaaatatcgaaagcttcagacacatgcagtcaaactcactggatggggcacactgagaggagcacaagggcagaaagaaaaattttggattgctgccaattcctggggaaagtcatggggagagaatggctatttcaggattcttcgaggagtaaatgagtccgacattgaaaagttgattatcgcagcttggggccaactgacgagttctgatgaaccataacatatcattaaatttccataaggtcatgcctttaagtaaccccctaaattgaagtttagcaatatgacattcttggtgacagtggaatctttgtctcttcaccgtgttaacataatctatctattttcttattttcccctctggtctatgcttctgcttccttcatattactgagcattaacaacaccaataaaggacagcagagtccctaaatgtctttaaagttc

SEQ ID NO: 196173 - DNA, 692 bp, Homo sapiens
  Payload ID: 18697
  Gene Name: tubulointerstitial nephritis antigen
  ENST ID: ENST00000370864
  CDS Start-End: 33-644
taatcttctcttatcttactacagaaatctggatggagaagcagtatttatctcaaagagaagtggacctagaggcttatttcactaggaatcacaccgttttgcaaggtactcgattcaaaagagccattttccaagggcaatactgtagaaattttggctgttgtgaagacagagatgatggctgtgtcactgagttctatgcggcgaatgcgttgtgctactgtgataaattctgtgacagagaaaattctgattgctgtcctgactacaagtccttttgccgtgaagagaaagaatggcctcctcacacacagccttggtatccagaaggttgcttcaaagatggtcaacattatgaagagggatcagtaattaaagaaaactgcaactcctgcacatgctcaggacagcaatggaaatgttcccagcatgtatgccttgttcgttcagaattaattgaacaggtcaataaaggagactatggatggacagcacagaattacagccaattttggggaatgactttagaagatggttttaaatttcgccttggcactttgccacctagtcccatgctcctgagcatgaatgaaatgacagtaagtgttccttctgattcacgtatgtgcatgtatttgtaaaagtgtgtttgtgtgtgcattaaaagcaattataaatcactaaaataa

SEQ ID NO: 196174 - DNA, 782 bp, Homo sapiens
  Payload ID: 18697
  Gene Name: tubulointerstitial nephritis antigen
  ENST ID: ENST00000370869
  CDS Start-End: 101-718
ggtaggtaaatggagtacagatgggaaatcaaaccagtgtgtgactgggcatgatttagagcaactgttattgatatgacagatcctagcaggcaacctcatgagagcctggatgttcgtttcaatgcaggcagaaatctggatggagaagcagtatttatctcaaagagaagtggacctagaggcttatttcactaggaatcacaccgttttgcaaggtactcgattcaaaagagccattttccaagggcaatactgtagaaattttggctgttgtgaagacagagatgatggctgtgtcactgagttctatgcggcgaatgcgttgtgctactgtgataaattctgtgacagagaaaattctgattgctgtcctgactacaagtccttttgccgtgaagagaaagaatggcctcctcacacacagccttggtatccagaaggttgcttcaaagatggtcaacattatgaagagggatcagtaattaaagaaaactgcaactcctgcacatgctcaggacagcaatggaaatgttcccagcatgtatgccttgttcgttcagaattaattgaacaggtcaataaaggagactatggatggacagcacagaattacagccaattttggggaatgactttagaagatggttttaaatttcgccttggcactttgccacctagtcccatgctcctgagcatgaatgaaatgacagaatgattgaatgggctggcaagatggccgatcaagaacagctctggttggcagctcccagcgagaccaa

SEQ ID NO: 196175 - DNA, 2187 bp, Homo sapiens
  Payload ID: 18698
  Gene Name: tubulointerstitial nephritis antigen-like 1
  Uniprot ID: Q9GZM7
  ENST ID: ENST00000271064
  CDS Start-End: 77-1480
cgcagagccaggaggcggaggcgcgcgggccagcctgggccccagcccacaccttcaccagggcccaggagccaccatgtggcgatgtccactggggctactgctgttgctgccgctggctggccacttggctctgggtgcccagcagggtcgtgggcgccgggagctagcaccgggtctgcacctgcggggcatccgggacgcgggaggccggtactgccaggagcaggacctgtgctgccgcggccgtgccgacgactgtgccctgccctacctgggcgccatctgttactgtgacctcttctgcaaccgcacggtctccgactgctgccctgacttctgggacttctgcctcggcgtgccacccccttttcccccgatccaaggatgtatgcatggaggtcgtatctatccagtcttgggaacgtactgggacaactgtaaccgttgcacctgccaggagaacaggcagtggcagtgtgaccaagaaccatgcctggtggatccagacatgatcaaagccatcaaccagggcaactatggctggcaggctgggaaccacagcgccttctggggcatgaccctggatgagggcattcgctaccgcctgggcaccatccgcccatcttcctcggtcatgaacatgcatgaaatttatacagtgctgaacccaggggaggtgcttcccacagccttcgaggcctctgagaagtggcccaacctgattcatgagcctcttgaccaaggcaactgtgcaggctcctgggccttctccacagcagctgtggcatccgatcgtgtctcaatccattctctgggacacatgacgcctgtcctgtcgccccagaacctgctgtcttgtgacacccaccagcagcagggctgccgcggtgggcgtctcgatggtgcctggtggttcctgcgtcgccgaggggtggtgtctgaccactgctaccccttctcgggccgtgaacgagacgaggctggccctgcgcccccctgtatgatgcacagccgagccatgggtcggggcaagcgccaggccactgcccactgccccaacagctatgttaataacaatgacatctaccaggtcactcctgtctaccgcctcggctccaacgacaaggagatcatgaaggagctgatggagaatggccctgtccaagccctcatggaggtgcatgaggacttcttcctatacaagggaggcatctacagccacacgccagtgagccttgggaggccagagagataccgccggcatgggacccactcagtcaagatcacaggatggggagaggagacgctgccagatggaaggacgctcaaatactggactgcggccaactcctggggcccagcctggggcgagaggggccacttccgcatcgtgcgcggcgtcaatgagtgcgacatcgagagcttcgtgctgggcgtctggggccgcgtgggcatggaggacatgggtcatcactgaggctgcgggcaccacgcggggtccggcctgggatccaggctaagggccggcggaagaggccccaatggggcggtgaccccagcctcgcccgacagagcccggggcgcaggcgggcgccagggcgctaatcccggcgcgggttccgctgacgcagcgccccgcctgggagccgcgggcaggcgagactggcggagcccccagacctcccagtggggacggggcagggcctggcctgggaagagcacagctgcagatcccaggcctctggcgcccccactcaagactaccaaagccaggacacctcaagtctccagccccactaccccaccccactcctgtattcttttttttttttttttagacagggtcttgctccgttgcccaggttggagtgcagtggcccatcagggctcactgtaacctccgactcctgggttcaagtgaccctcccacctcagcctctcaagtagctgggactacaggtgcaccaccacacctggctaatttttgtattttttgtaaagaggggggtctcactgtgttgcccaggctggtctcgaactcctgggctcaagcggtccacctgcctccgcctcccaaagtgctgggattgcaggcatgagccactgcacccagccctgtattcttattcttcagatatttatttttcttttcactgttttaaaataaaaccaaagtattgataa

SEQ ID NO: 196176 - DNA, 2140 bp, Homo sapiens
  Payload ID: 18698
  Gene Name: tubulointerstitial nephritis antigen-like 1
  Uniprot ID: Q9GZM7
  ENST ID: ENST00000457433
  CDS Start-End: 127-1437
aaaaagcgccccgccccgcgctcctctcttgactttgagcgtccggcggtcgcagagccaggaggcggaggcgcgcgggccagcctgggccccagcccacaccttcaccagggcccaggagccaccatgtggcgatgtccactggggctactgctgttgctgccgctggctggccacttggctctgggtgcccagcagggtcgtgggcgccgggagctagcaccgggtctgcacctgcggggcatccgggacgcgggaggccggtactgccaggagcaggacctgtgctgccgcggccgtgccgacgactgtgccctgccctacctgggcgccatctgttactgtgacctcttctgcaaccgcacggtctccgactgctgccctgacttctgggacttctgcctcggcgtgccacccccttttcccccgatccaaggatgtatgcatggaggtcgtatctatccagtcttgggaacgtactgggacaactgtaaccgttgctggcaggctgggaaccacagcgccttctggggcatgaccctggatgagggcattcgctaccgcctgggcaccatccgcccatcttcctcggtcatgaacatgcatgaaatttatacagtgctgaacccaggggaggtgcttcccacagccttcgaggcctctgagaagtggcccaacctgattcatgagcctcttgaccaaggcaactgtgcaggctcctgggccttctccacagcagctgtggcatccgatcgtgtctcaatccattctctgggacacatgacgcctgtcctgtcgccccagaacctgctgtcttgtgacacccaccagcagcagggctgccgcggtgggcgtctcgatggtgcctggtggttcctgcgtcgccgaggggtggtgtctgaccactgctaccccttctcgggccgtgaacgagacgaggctggccctgcgcccccctgtatgatgcacagccgagccatgggtcggggcaagcgccaggccactgcccactgccccaacagctatgttaataacaatgacatctaccaggtcactcctgtctaccgcctcggctccaacgacaaggagatcatgaaggagctgatggagaatggccctgtccaagccctcatggaggtgcatgaggacttcttcctatacaagggaggcatctacagccacacgccagtgagccttgggaggccagagagataccgccggcatgggacccactcagtcaagatcacaggatggggagaggagacgctgccagatggaaggacgctcaaatactggactgcggccaactcctggggcccagcctggggcgagaggggccacttccgcatcgtgcgcggcgtcaatgagtgcgacatcgagagcttcgtgctgggcgtctggggccgcgtgggcatggaggacatgggtcatcactgaggctgcgggcaccacgcggggtccggcctgggatccaggctaagggccggcggaagaggccccaatggggcggtgaccccagcctcgcccgacagagcccggggcgcaggcgggcgccagggcgctaatcccggcgcgggttccgctgacgcagcgccccgcctgggagccgcgggcaggcgagactggcggagcccccagacctcccagtggggacggggcagggcctggcctgggaagagcacagctgcagatcccaggcctctggcgcccccactcaagactaccaaagccaggacacctcaagtctccagccccactaccccaccccactcctgtattcttttttttttttttttagacagggtcttgctccgttgcccaggttggagtgcagtggcccatcagggctcactgtaacctccgactcctgggttcaagtgaccctcccacctcagcctctcaagtagctgggactacaggtgcaccaccacacctggctaatttttgtattttttgtaaagaggggggtctcactgtgttgcccaggctggtctcgaactcctgggctcaagcggtccacctgcctccgcctcccaaagtgctgggattgcaggcatgagccactgcacccagccctgtattcttattcttcagatatttatttttcttttcactgttttaaaataaaaccaaagtattg

SEQ ID NO: 196177 - DNA, 1841 bp, Homo sapiens
  Payload ID: 18698
  Gene Name: tubulointerstitial nephritis antigen-like 1
  ENST ID: ENST00000537531
  CDS Start-End: 50-1138
gaatccaggttggaatcattgaagaacttcccaaacagcagttggatgtatgcatggaggtcgtatctatccagtcttgggaacgtactgggacaactgtaaccgttgcacctgccaggagaacaggcagtggcagtgtgaccaagaaccatgcctggtggatccagacatgatcaaagccatcaaccagggcaactatggctggcaggctgggaaccacagcgccttctggggcatgaccctggatgagggcattcgctaccgcctgggcaccatccgcccatcttcctcggtcatgaacatgcatgaaatttatacagtgctgaacccaggggaggtgcttcccacagccttcgaggcctctgagaagtggcccaacctgattcatgagcctcttgaccaaggcaactgtgcaggctcctgggccttctccacagcagctgtggcatccgatcgtgtctcaatccattctctgggacacatgacgcctgtcctgtcgccccagaacctgctgtcttgtgacacccaccagcagcagggctgccgcggtgggcgtctcgatggtgcctggtggttcctgcgtcgccgaggggtggtgtctgaccactgctaccccttctcgggccgtgaacgagacgaggctggccctgcgcccccctgtatgatgcacagccgagccatgggtcggggcaagcgccaggccactgcccactgccccaacagctatgttaataacaatgacatctaccaggtcactcctgtctaccgcctcggctccaacgacaaggagatcatgaaggagctgatggagaatggccctgtccaagccctcatggaggtgcatgaggacttcttcctatacaagggaggcatctacagccacacgccagtgagccttgggaggccagagagataccgccggcatgggacccactcagtcaagatcacaggatggggagaggagacgctgccagatggaaggacgctcaaatactggactgcggccaactcctggggcccagcctggggcgagaggggccacttccgcatcgtgcgcggcgtcaatgagtgcgacatcgagagcttcgtgctgggcgtctggggccgcgtgggcatggaggacatgggtcatcactgaggctgcgggcaccacgcggggtccggcctgggatccaggctaagggccggcggaagaggccccaatggggcggtgaccccagcctcgcccgacagagcccggggcgcaggcgggcgccagggcgctaatcccggcgcgggttccgctgacgcagcgccccgcctgggagccgcgggcaggcgagactggcggagcccccagacctcccagtggggacggggcagggcctggcctgggaagagcacagctgcagatcccaggcctctggcgcccccactcaagactaccaaagccaggacacctcaagtctccagccccactaccccaccccactcctgtattcttttttttttttttttagacagggtcttgctccgttgcccaggttggagtgcagtggcccatcagggctcactgtaacctccgactcctgggttcaagtgaccctcccacctcagcctctcaagtagctgggactacaggtgcaccaccacacctggctaatttttgtattttttgtaaagaggggggtctcactgtgttgcccaggctggtctcgaactcctgggctcaagcggtccacctgcctccgcctcccaaagtgctgggattgcaggcatgagccactgcacccagccctgtattcttattcttcagatatttatttttcttttcactgttttaaaataaaaccaaagtattg

SEQ ID NO: 196178 - DNA, 3093 bp, Homo sapiens
  Payload ID: 18699
  Gene Name: tudor and KH domain containing
  Uniprot ID: Q9Y2W6
  ENST ID: ENST00000368822
  CDS Start-End: 635-2320
aagcaaacttccgcctgcggagacccgctcccttcctcgcccccacagaaacgccccccgccaccaccccctcccccggcgtaggccttcacgctgtcgcctcgacccgtttcctcgaatccccagggaagggtgggcccctggcgcccctatggcccgccgcccccttaccaccgcggtcggagcccgggtctcactctcctgccgctgtttcgggccacaccgtgtgtccgtgcctccgcaaaggaatagaagagtgggtcctcgctctctgcggcgcaccgcttgtcccttgacttcctgtccatctacaaagcctatttcatgttttccagaaagaaaacgttttccgtgtctcttgagtcctcatcgccatatgcggggcgggaccgatctatgcaaaagatcgcaagagaaaactgatggagcatcgcccatcatgaggctgctctcccgatggtcactgagttgtgttgtggcactgtctttgtacaaagacaccaatttttgcgaacggtgccactcatgattcaacgctctcatgcctcggtcccagctgctggagcgcagattttcctccaagggttagaagatagaaaactcctcggatataagtcaaagagtacagcagaaaatgtctactgaacggacttcttggacaagcctgtccaccattcagaaaatagccctgggccttgggatcccagccagtgcaacagttgcctatatcctataccgcaggtatagggaaagcagagaagagcggctgacatttgttggggaagatgacattgagatagagatgcgggttccccaggaggctgtgaaactcatcattggccggcaaggagccaatattaaacagctgcggaaacagacaggtgctcggattgatgtggacacagaggatgtaggcgatgagcgagtgctgcttatcagtggttttcctgttcaggtgtgcaaggccaaagcagcaatccatcagatcctgacagagaataccccagtgtctgagcagctttcagttccccagagatctgtgggcagaatcatagggagaggcggcgagacaattcgttctatctgtaaggcatctggagccaaaattacctgtgacaaagaatcagaagggacattactactatcaagacttataaaaatctcaggaacacagaaggaagtggcagcagccaagcatttgatactggagaaagtttcagaagatgaagaacttcggaagagaattgctcattctgcagaaaccagggtcccacgcaaacagccaatcagtgtgagaagagaagacatgacagagccaggtggagctggagagccagcattatggaaaaacaccagttctagcatggagccgactgcacccctggtgactcctccacccaaaggaggaggcgacatggctgtggtagtgtcaaaggaaggttcctgggagaaacctagtgatgacagctttcagaagtctgaagcccaggccatcccagagatgcccatgtttgaaatccccagtcctgacttcagttttcatgctgatgagtacctagaagtctacgtttctgcttctgagcaccctaaccacttctggatccagatcgttggctcccgcagcctgcaattggataagcttgtcaatgagatgacccagcactatgagaatagtgtgcctgaagacttgactgtgcatgtaggagacattgtagcagcacctttacctacaaatggttcctggtatcgagcccgggtcctcggcaccttggagaatgggaacttggacctctattttgttgactttggagataatggagattgcccactgaaggacctcagggctctcaggagtgacttcctaagccttccatttcaagcaatagaatgtagtctggcacggattgctccctcaggtgaccagtgggaagaggaagctttggatgagtttgatagactcactcattgtgctgactggaagcctctggtagccaagatctctagctatgtccagactgggatctcaacttggccaaagatctacttatatgatactagcaatgggaagaaacttgatattgggctagaattagtacacaaaggatacgcaattgagcttcctgaagacatagaagaaaacagagctgtcccagacatgttgaaggacatggccacagaaacagatgcctctctcagcacgttgctcactgagaccaaaaagagctctggagagataacacataccctgtcctgcctcagcttatcagaagctgcttccatgtctggtgatgataaccttgaagatgactacttactctgaagtctgggcttcagtttgctcagccatctgctttgctgtgatttggcataggaattggtgcatggaggagaggagtgtatgataaaggatccatgcagtccttcctttattacacatatagtctggcttgctgtggaccaaattaatattctcctcccatcagactacaaaaaaattggactaccacgctacaagtgtgtctcccccattccacctccggatccctccccaaccctccagtgtttgaatactgctgtgttacttccaggccgttcaacgtcaggctcagtcccctctaccagtcatgattcacattactactaggctgtatcctttttgaggctgggaaacagtcaggctttcgtcattggaagtgattctgcagacttctgactcaccttatcaggtgactctggttaaggaaagcttttgagtggtgaactcaaagactccagttgaatcaggaggcaaaggcaaaaattagcataattatatttaaaagcctcaggaagtgggaagagaatactgcctcccagcctcaattgctgatatgttattggagacaggcttttgaaactgctccagctatttctctgtaacctttagttaaaatataagtagaaaggagacaggaggctcaggaaattttctaaattgctagtataatatctatatgtatacacacatatacacccgtggagagagaggaagagtatacagtcctgtttgaatcatttggaggatttttttgctgaataaagttctcaagaaaa

SEQ ID NO: 196179 - DNA, 2751 bp, Homo sapiens
  Payload ID: 18699
  Gene Name: tudor and KH domain containing
  ENST ID: ENST00000368823
  CDS Start-End: 118-1791
ggtgtgagtgggaggcggcggcgctggtggctgcagctggggtgaggcgcgaggcggcgcactcgacggctgactggagcagcggtaaaggatataagtcaaagagtacagcagaaaatgtctactgaacggacttcttggacaagcctgtccaccattcagaaaatagccctgggccttgggatcccagccagtgcaacagttgcctatatcctataccgcaggtatagggaaagcagagaagagcggctgacatttgttggggaagatgacattgagatagagatgcgggttccccaggaggctgtgaaactcatcattggccggcaaggagccaatattaaacagacaggtgctcggattgatgtggacacagaggatgtaggcgatgagcgagtgctgcttatcagtggttttcctgttcaggtgtgcaaggccaaagcagcaatccatcagatcctgacagagaataccccagtgtctgagcagctttcagttccccagagatctgtgggcagaatcatagggagaggcggcgagacaattcgttctatctgtaaggcatctggagccaaaattacctgtgacaaagaatcagaagggacattactactatcaagacttataaaaatctcaggaacacagaaggaagtggcagcagccaagcatttgatactggagaaagtttcagaagatgaagaacttcggaagagaattgctcattctgcagaaaccagggtcccacgcaaacagccaatcagtgtgagaagagaagacatgacagagccaggtggagctggagagccagcattatggaaaaacaccagttctagcatggagccgactgcacccctggtgactcctccacccaaaggaggaggcgacatggctgtggtagtgtcaaaggaaggttcctgggagaaacctagtgatgacagctttcagaagtctgaagcccaggccatcccagagatgcccatgtttgaaatccccagtcctgacttcagttttcatgctgatgagtacctagaagtctacgtttctgcttctgagcaccctaaccacttctggatccagatcgttggctcccgcagcctgcaattggataagcttgtcaatgagatgacccagcactatgagaatagtgtgcctgaagacttgactgtgcatgtaggagacattgtagcagcacctttacctacaaatggttcctggtatcgagcccgggtcctcggcaccttggagaatgggaacttggacctctattttgttgactttggagataatggagattgcccactgaaggacctcagggctctcaggagtgacttcctaagccttccatttcaagcaatagaatgtagtctggcacggattgctccctcaggtgaccagtgggaagaggaagctttggatgagtttgatagactcactcattgtgctgactggaagcctctggtagccaagatctctagctatgtccagactgggatctcaacttggccaaagatctacttatatgatactagcaatgggaagaaacttgatattgggctagaattagtacacaaaggatacgcaattgagcttcctgaagacatagaagaaaacagagctgtcccagacatgttgaaggacatggccacagaaacagatgcctctctcagcacgttgctcactgagaccaaaaagagctctggagagataacacataccctgtcctgcctcagcttatcagaagctgcttccatgtctggtgatgataaccttgaagatgactacttactctgaagtctgggcttcagtttgctcagccatctgctttgctgtgtgagtgcagctatcatctatctgtagcaacaggaaagtaatgagggcgacagtggggcacttgctttgattccctctttcccatgccctgtcttaatatacttctctgcagctgctttcctgcagcttaacttgctctcagattgagcactttcaagctttttgtgtatttctgtctttggcaggatttggcataggaattggtgcatggaggagaggagtgtatgataaaggatccatgcagtccttcctttattacacatatagtctggcttgctgtggaccaaattaatattctcctcccatcagactacaaaaaaattggactaccacgctacaagtgtgtctcccccattccacctccggatccctccccaaccctccagtgtttgaatactgctgtgttacttccaggccgttcaacgtcaggctcagtcccctctaccagtcatgattcacattactactaggctgtatcctttttgaggctgggaaacagtcaggctttcgtcattggaagtgattctgcagacttctgactcaccttatcaggtgactctggttaaggaaagcttttgagtggtgaactcaaagactccagttgaatcaggaggcaaaggcaaaaattagcataattatatttaaaagcctcaggaagtgggaagagaatactgcctcccagcctcaattgctgatatgttattggagacaggcttttgaaactgctccagctatttctctgtaacctttagttaaaatataagtagaaaggagacaggaggctcaggaaattttctaaattgctagtataatatctatatgtatacacacatatacacccgtggagagagaggaagagtatacagtcctgtttgaatcatttggaggatttttttgctgaataaagttctcaagaaaatt

SEQ ID NO: 196180 - DNA, 2824 bp, Homo sapiens
  Payload ID: 18699
  Gene Name: tudor and KH domain containing
  Uniprot ID: Q9Y2W6
  ENST ID: ENST00000368824
  CDS Start-End: 171-1856
cggctgaagcgccgccggcggggctcactgtggtggtgtgagtgggaggcggcggcgctggtggctgcagctggggtgaggcgcgaggcggcgcactcgacggctgactggagcagcggtaaaggcgaggatggagaccgaaggatataagtcaaagagtacagcagaaaatgtctactgaacggacttcttggacaagcctgtccaccattcagaaaatagccctgggccttgggatcccagccagtgcaacagttgcctatatcctataccgcaggtatagggaaagcagagaagagcggctgacatttgttggggaagatgacattgagatagagatgcgggttccccaggaggctgtgaaactcatcattggccggcaaggagccaatattaaacagctgcggaaacagacaggtgctcggattgatgtggacacagaggatgtaggcgatgagcgagtgctgcttatcagtggttttcctgttcaggtgtgcaaggccaaagcagcaatccatcagatcctgacagagaataccccagtgtctgagcagctttcagttccccagagatctgtgggcagaatcatagggagaggcggcgagacaattcgttctatctgtaaggcatctggagccaaaattacctgtgacaaagaatcagaagggacattactactatcaagacttataaaaatctcaggaacacagaaggaagtggcagcagccaagcatttgatactggagaaagtttcagaagatgaagaacttcggaagagaattgctcattctgcagaaaccagggtcccacgcaaacagccaatcagtgtgagaagagaagacatgacagagccaggtggagctggagagccagcattatggaaaaacaccagttctagcatggagccgactgcacccctggtgactcctccacccaaaggaggaggcgacatggctgtggtagtgtcaaaggaaggttcctgggagaaacctagtgatgacagctttcagaagtctgaagcccaggccatcccagagatgcccatgtttgaaatccccagtcctgacttcagttttcatgctgatgagtacctagaagtctacgtttctgcttctgagcaccctaaccacttctggatccagatcgttggctcccgcagcctgcaattggataagcttgtcaatgagatgacccagcactatgagaatagtgtgcctgaagacttgactgtgcatgtaggagacattgtagcagcacctttacctacaaatggttcctggtatcgagcccgggtcctcggcaccttggagaatgggaacttggacctctattttgttgactttggagataatggagattgcccactgaaggacctcagggctctcaggagtgacttcctaagccttccatttcaagcaatagaatgtagtctggcacggattgctccctcaggtgaccagtgggaagaggaagctttggatgagtttgatagactcactcattgtgctgactggaagcctctggtagccaagatctctagctatgtccagactgggatctcaacttggccaaagatctacttatatgatactagcaatgggaagaaacttgatattgggctagaattagtacacaaaggatacgcaattgagcttcctgaagacatagaagaaaacagagctgtcccagacatgttgaaggacatggccacagaaacagatgcctctctcagcacgttgctcactgagaccaaaaagagctctggagagataacacataccctgtcctgcctcagcttatcagaagctgcttccatgtctggtgatgataaccttgaagatgactacttactctgaagtctgggcttcagtttgctcagccatctgctttgctgtgtgagtgcagctatcatctatctgtagcaacaggaaagtaatgagggcgacagtggggcacttgctttgattccctctttcccatgccctgtcttaatatacttctctgcagctgctttcctgcagcttaacttgctctcagattgagcactttcaagctttttgtgtatttctgtctttggcaggatttggcataggaattggtgcatggaggagaggagtgtatgataaaggatccatgcagtccttcctttattacacatatagtctggcttgctgtggaccaaattaatattctcctcccatcagactacaaaaaaattggactaccacgctacaagtgtgtctcccccattccacctccggatccctccccaaccctccagtgtttgaatactgctgtgttacttccaggccgttcaacgtcaggctcagtcccctctaccagtcatgattcacattactactaggctgtatcctttttgaggctgggaaacagtcaggctttcgtcattggaagtgattctgcagacttctgactcaccttatcaggtgactctggttaaggaaagcttttgagtggtgaactcaaagactccagttgaatcaggaggcaaaggcaaaaattagcataattatatttaaaagcctcaggaagtgggaagagaatactgcctcccagcctcaattgctgatatgttattggagacaggcttttgaaactgctccagctatttctctgtaacctttagttaaaatataagtagaaaggagacaggaggctcaggaaattttctaaattgctagtataatatctatatgtatacacacatatacacccgtggagagagaggaagagtatacagtcctgtttgaatcatttggaggatttttttgctgaataaagttctcaagaaaattttctaaaa

SEQ ID NO: 196181 - DNA, 2651 bp, Homo sapiens
  Payload ID: 18699
  Gene Name: tudor and KH domain containing
  Uniprot ID: Q9Y2W6
  ENST ID: ENST00000368825
  CDS Start-End: 128-1678
gggaggcggcggcgctggtggctgcagctggggtgaggcgcgaggcggcgcactcgacggctgactggagcagcggtaaaggcgaggatggagaccgaaggatataagtcaaagagtacagcagaaaatgtctactgaacggacttcttggacaagcctgtccaccattcagaaaatagccctgggccttgggatcccagccagtgcaacagttgcctatatcctataccgcaggtatagggaaagcagagaagagcggctgacatttgttggggaagatgacattgagatagagatgcgggttccccaggaggctgtgaaactcatcattggccggcaaggagccaatattaaacagctgcggaaacagacaggtgctcggattgatgtggacacagaggatgtaggcgatgagcgagtgctgcttatcagtggttttcctgttcaggcatctggagccaaaattacctgtgacaaagaatcagaagggacattactactatcaagacttataaaaatctcaggaacacagaaggaagtggcagcagccaagcatttgatactggagaaagtttcagaagatgaagaacttcggaagagaattgctcattctgcagaaaccagggtcccacgcaaacagccaatcagtgtgagaagagaagacatgacagagccaggtggagctggagagccagcattatggaaaaacaccagttctagcatggagccgactgcacccctggtgactcctccacccaaaggaggaggcgacatggctgtggtagtgtcaaaggaaggttcctgggagaaacctagtgatgacagctttcagaagtctgaagcccaggccatcccagagatgcccatgtttgaaatccccagtcctgacttcagttttcatgctgatgagtacctagaagtctacgtttctgcttctgagcaccctaaccacttctggatccagatcgttggctcccgcagcctgcaattggataagcttgtcaatgagatgacccagcactatgagaatagtgtgcctgaagacttgactgtgcatgtaggagacattgtagcagcacctttacctacaaatggttcctggtatcgagcccgggtcctcggcaccttggagaatgggaacttggacctctattttgttgactttggagataatggagattgcccactgaaggacctcagggctctcaggagtgacttcctaagccttccatttcaagcaatagaatgtagtctggcacggattgctccctcaggtgaccagtgggaagaggaagctttggatgagtttgatagactcactcattgtgctgactggaagcctctggtagccaagatctctagctatgtccagactgggatctcaacttggccaaagatctacttatatgatactagcaatgggaagaaacttgatattgggctagaattagtacacaaaggatacgcaattgagcttcctgaagacatagaagaaaacagagctgtcccagacatgttgaaggacatggccacagaaacagatgcctctctcagcacgttgctcactgagaccaaaaagagctctggagagataacacataccctgtcctgcctcagcttatcagaagctgcttccatgtctggtgatgataaccttgaagatgactacttactctgaagtctgggcttcagtttgctcagccatctgctttgctgtgtgagtgcagctatcatctatctgtagcaacaggaaagtaatgagggcgacagtggggcacttgctttgattccctctttcccatgccctgtcttaatatacttctctgcagctgctttcctgcagcttaacttgctctcagattgagcactttcaagctttttgtgtatttctgtctttggcaggatttggcataggaattggtgcatggaggagaggagtgtatgataaaggatccatgcagtccttcctttattacacatatagtctggcttgctgtggaccaaattaatattctcctcccatcagactacaaaaaaattggactaccacgctacaagtgtgtctcccccattccacctccggatccctccccaaccctccagtgtttgaatactgctgtgttacttccaggccgttcaacgtcaggctcagtcccctctaccagtcatgattcacattactactaggctgtatcctttttgaggctgggaaacagtcaggctttcgtcattggaagtgattctgcagacttctgactcaccttatcaggtgactctggttaaggaaagcttttgagtggtgaactcaaagactccagttgaatcaggaggcaaaggcaaaaattagcataattatatttaaaagcctcaggaagtgggaagagaatactgcctcccagcctcaattgctgatatgttattggagacaggcttttgaaactgctccagctatttctctgtaacctttagttaaaatataagtagaaaggagacaggaggctcaggaaattttctaaattgctagtataatatctatatgtatacacacatatacacccgtggagagagaggaagagtatacagtcctgtttgaatcatttggaggatttttttgctgaataaagttctcaagaaaattttctaaaaccaaa

SEQ ID NO: 196182 - DNA, 2318 bp, Homo sapiens
  Payload ID: 18699
  Gene Name: tudor and KH domain containing
  Uniprot ID: Q9Y2W6
  ENST ID: ENST00000368827
  CDS Start-End: 171-1856
cggctgaagcgccgccggcggggctcactgtggtggtgtgagtgggaggcggcggcgctggtggctgcagctggggtgaggcgcgaggcggcgcactcgacggctgactggagcagcggtaaaggcgaggatggagaccgaaggatataagtcaaagagtacagcagaaaatgtctactgaacggacttcttggacaagcctgtccaccattcagaaaatagccctgggccttgggatcccagccagtgcaacagttgcctatatcctataccgcaggtatagggaaagcagagaagagcggctgacatttgttggggaagatgacattgagatagagatgcgggttccccaggaggctgtgaaactcatcattggccggcaaggagccaatattaaacagctgcggaaacagacaggtgctcggattgatgtggacacagaggatgtaggcgatgagcgagtgctgcttatcagtggttttcctgttcaggtgtgcaaggccaaagcagcaatccatcagatcctgacagagaataccccagtgtctgagcagctttcagttccccagagatctgtgggcagaatcatagggagaggcggcgagacaattcgttctatctgtaaggcatctggagccaaaattacctgtgacaaagaatcagaagggacattactactatcaagacttataaaaatctcaggaacacagaaggaagtggcagcagccaagcatttgatactggagaaagtttcagaagatgaagaacttcggaagagaattgctcattctgcagaaaccagggtcccacgcaaacagccaatcagtgtgagaagagaagacatgacagagccaggtggagctggagagccagcattatggaaaaacaccagttctagcatggagccgactgcacccctggtgactcctccacccaaaggaggaggcgacatggctgtggtagtgtcaaaggaaggttcctgggagaaacctagtgatgacagctttcagaagtctgaagcccaggccatcccagagatgcccatgtttgaaatccccagtcctgacttcagttttcatgctgatgagtacctagaagtctacgtttctgcttctgagcaccctaaccacttctggatccagatcgttggctcccgcagcctgcaattggataagcttgtcaatgagatgacccagcactatgagaatagtgtgcctgaagacttgactgtgcatgtaggagacattgtagcagcacctttacctacaaatggttcctggtatcgagcccgggtcctcggcaccttggagaatgggaacttggacctctattttgttgactttggagataatggagattgcccactgaaggacctcagggctctcaggagtgacttcctaagccttccatttcaagcaatagaatgtagtctggcacggattgctccctcaggtgaccagtgggaagaggaagctttggatgagtttgatagactcactcattgtgctgactggaagcctctggtagccaagatctctagctatgtccagactgggatctcaacttggccaaagatctacttatatgatactagcaatgggaagaaacttgatattgggctagaattagtacacaaaggatacgcaattgagcttcctgaagacatagaagaaaacagagctgtcccagacatgttgaaggacatggccacagaaacagatgcctctctcagcacgttgctcactgagaccaaaaagagctctggagagataacacataccctgtcctgcctcagcttatcagaagctgcttccatgtctggtgatgataaccttgaagatgactacttactctgaagtctgggcttcagtttgctcagccatctgctttgctgtatgttgcctgcaatgaactcgctgaagcatgctcagccctggaactggtgctaccagagttccgtagggaacctttactctttagaggttccctgatataaatcattcataagacttcctaccctggaaaatgagtaatgtctcattcttacctgcagtttgttactatgtataaaagtctttttctttaatatgcctttaagtcttacctgtttacagcccattctgatgggttctttgtcattctgttagtataacccagtacttttcctgctgcctggaatgccctcttctatgttacctattctgtccgttgagatcccccaacttgggccaaagccaagagatctatgtgccttctctggttttctccacatctatagcacctcaactgaaatatatggataaaaacagcctaacaaa

SEQ ID NO: 196183 - DNA, 2768 bp, Homo sapiens
  Payload ID: 18699
  Gene Name: tudor and KH domain containing
  Uniprot ID: Q9Y2W6
  ENST ID: ENST00000458431
  CDS Start-End: 129-1814
gcggggctcactgtggtggtgtgagtgggaggcggcggcgctggtggctgcagctggggtgaggcgcgaggcggcgcactcgacggctgactggagcagcggatataagtcaaagagtacagcagaaaatgtctactgaacggacttcttggacaagcctgtccaccattcagaaaatagccctgggccttgggatcccagccagtgcaacagttgcctatatcctataccgcaggtatagggaaagcagagaagagcggctgacatttgttggggaagatgacattgagatagagatgcgggttccccaggaggctgtgaaactcatcattggccggcaaggagccaatattaaacagctgcggaaacagacaggtgctcggattgatgtggacacagaggatgtaggcgatgagcgagtgctgcttatcagtggttttcctgttcaggtgtgcaaggccaaagcagcaatccatcagatcctgacagagaataccccagtgtctgagcagctttcagttccccagagatctgtgggcagaatcatagggagaggcggcgagacaattcgttctatctgtaaggcatctggagccaaaattacctgtgacaaagaatcagaagggacattactactatcaagacttataaaaatctcaggaacacagaaggaagtggcagcagccaagcatttgatactggagaaagtttcagaagatgaagaacttcggaagagaattgctcattctgcagaaaccagggtcccacgcaaacagccaatcagtgtgagaagagaagacatgacagagccaggtggagctggagagccagcattatggaaaaacaccagttctagcatggagccgactgcacccctggtgactcctccacccaaaggaggaggcgacatggctgtggtagtgtcaaaggaaggttcctgggagaaacctagtgatgacagctttcagaagtctgaagcccaggccatcccagagatgcccatgtttgaaatccccagtcctgacttcagttttcatgctgatgagtacctagaagtctacgtttctgcttctgagcaccctaaccacttctggatccagatcgttggctcccgcagcctgcaattggataagcttgtcaatgagatgacccagcactatgagaatagtgtgcctgaagacttgactgtgcatgtaggagacattgtagcagcacctttacctacaaatggttcctggtatcgagcccgggtcctcggcaccttggagaatgggaacttggacctctattttgttgactttggagataatggagattgcccactgaaggacctcagggctctcaggagtgacttcctaagccttccatttcaagcaatagaatgtagtctggcacggattgctccctcaggtgaccagtgggaagaggaagctttggatgagtttgatagactcactcattgtgctgactggaagcctctggtagccaagatctctagctatgtccagactgggatctcaacttggccaaagatctacttatatgatactagcaatgggaagaaacttgatattgggctagaattagtacacaaaggatacgcaattgagcttcctgaagacatagaagaaaacagagctgtcccagacatgttgaaggacatggccacagaaacagatgcctctctcagcacgttgctcactgagaccaaaaagagctctggagagataacacataccctgtcctgcctcagcttatcagaagctgcttccatgtctggtgatgataaccttgaagatgactacttactctgaagtctgggcttcagtttgctcagccatctgctttgctgtgtgagtgcagctatcatctatctgtagcaacaggaaagtaatgagggcgacagtggggcacttgctttgattccctctttcccatgccctgtcttaatatacttctctgcagctgctttcctgcagcttaacttgctctcagattgagcactttcaagctttttgtgtatttctgtctttggcaggatttggcataggaattggtgcatggaggagaggagtgtatgataaaggatccatgcagtccttcctttattacacatatagtctggcttgctgtggaccaaattaatattctcctcccatcagactacaaaaaaattggactaccacgctacaagtgtgtctcccccattccacctccggatccctccccaaccctccagtgtttgaatactgctgtgttacttccaggccgttcaacgtcaggctcagtcccctctaccagtcatgattcacattactactaggctgtatcctttttgaggctgggaaacagtcaggctttcgtcattggaagtgattctgcagacttctgactcaccttatcaggtgactctggttaaggaaagcttttgagtggtgaactcaaagactccagttgaatcaggaggcaaaggcaaaaattagcataattatatttaaaagcctcaggaagtgggaagagaatactgcctcccagcctcaattgctgatatgttattggagacaggcttttgaaactgctccagctatttctctgtaacctttagttaaaatataagtagaaaggagacaggaggctcaggaaattttctaaattgctagtataatatctatatgtatacacacatatacacccgtggagagagaggaagagtatacagtcctgtttgaatcatttggaggatttttttgctgaataaagttctcaag

SEQ ID NO: 196184 - DNA, 2296 bp, Homo sapiens
  Payload ID: 18699
  Gene Name: tudor and KH domain containing
  ENST ID: ENST00000440583
  CDS Start-End: 171-1988
cggctgaagcgccgccggcggggctcactgtggtggtgtgagtgggaggcggcggcgctggtggctgcagctggggtgaggcgcgaggcggcgcactcgacggctgactggagcagcggtaaaggcgaggatggagaccgaaggatataagtcaaagagtacagcagaaaatgtctactgaacggacttcttggacaagcctgtccaccattcagaaaatagccctgggccttgggatcccagccagtgcaacagttgcctatatcctataccgcaggtatagggaaagcagagaagagcggctgacatttgttggggaagatgacattgagatagagatgcgggttccccaggaggctgtgaaactcatcattggccggcaaggagccaatattaaacagctgcggaaacagacaggtgctcggattgatgtggacacagaggatgtaggcgatgagcgagtgctgcttatcagtggttttcctgttcaggtgtgcaaggccaaagcagcaatccatcagatcctgacagagaataccccagtgtctgagcagctttcagttccccagagatctgtgggcagaatcatagggagaggcggcgagacaattcgttctatctgtaaggcatctggagccaaaattacctgtgacaaagaatcagaagggacattactactatcaagacttataaaaatctcaggaacacagaaggaagtggcagcagccaagcatttgatactggagaaagtttcagaagatgaagaacttcggaagagaattgctcattctgcagaaaccagggtcccacgcaaacagccaatcagtgtgagaagagaagacatgacagagccaggtggagctggagagccagcattatggaaaaacaccagttctagcatggagccgactgcacccctggtgactcctccacccaaaggaggaggcgacatggctgtggtagtgtcaaaggaaggttcctgggagaaacctagtgatgacagctttcagaagtctgaagcccaggccatcccagagatgcccatgtttgaaatccccagtcctgacttcagttttcatgctgatgagtacctagaagtctacgtttctgcttctgagcaccctaaccacttctggatccagatcgttggctcccgcagcctgcaattggataagcttgtcaatgagatgacccagcactatgagaatagtgtgcctgaagacttgactgtgcatgtaggagacattgtagcagcacctttacctacaaatggttcctggtatcgagcccgggtcctcggcaccttggagaatgggaacttggacctctattttgttgactttggagataatggagattgcccactgaaggacctcagggctctcaggagtgacttcctaagccttccatttcaagcaatagaatgtagtctggcacggattgctccctcaggtgaccagtgggaagaggaagctttggatgagtttgatagactcactcattgtgctgactggaagcctctggtagccaagatctctagctatgtccagactgggatctcaacttggccaaagatctacttatatgatactagcaatgggaagaaacttgatattgggctagaattagtacacaaaggatacgcaattgagcttcctgaagacatagaagaaaacagagctgtcccagacatgttgaaggacatggccacagaaacagatgcctctctcagcacgttgctcactgagaccaaaaagagctctggagagataacacataccctgtcctgcctcagcttatcagaagctgcttccatgtctggtgatgataaccttgaagatgactacttactcagtctgggcttcagtttgctcagccatctgctttgctgtatgttgcctgcaatgaactcgctgaagcatgctcagccctggaactggtgctaccagagttccgtagggaacctttactctttagaggttccctgatataaatcattcataagacttcctaccctggaaaatgagtaatgtctcattcttacctgcagtttgttactatgtataaaagtctttttctttaatatgcctttaagtcttacctgtttacagcccattctgatgggttctttgtcattctgttagtataacccagtacttttcctgctgcctggaatgccctcttctatgttacctattctgtccgttgagatcccccaacttgggccaaagccaagagatctatgtgccttctctggttttctccacatctatagcacctcaactgaaatatatgg

SEQ ID NO: 196185 - DNA, 568 bp, Homo sapiens
  Payload ID: 18699
  Gene Name: tudor and KH domain containing
  ENST ID: ENST00000526378
  CDS Start-End: 176-568
attaacaattgatggcacaggatgagaagcccaaacttggaaggaccctccagggaaataagaggaaaccaagagaaagagggcacagaaaccaaggaaagagttttgtggagggagtggccaccttcctgctaccgcagagagatgggatataagtcaaagagtacagcagaaaatgtctactgaacggacttcttggacaagcctgtccaccattcagaaaatagccctgggccttgggatcccagccagtgcaacagttgcctatatcctataccgcaggtatagggaaagcagagaagagcggctgacatttgttggggaagatgacattgagatagagatgcgggttccccaggaggctgtgaaactcatcattggccggcaaggagccaatattaaacagctgcggaaacagacaggtgctcggattgatgtggacacagaggatgtaggcgatgagcgagtgctgcttatcagtggttttcctgttcaggtgtgcaaggccaaagcagcaatccatcagatcctgacagagaataccccagtgtctgagcagctttcagtt

SEQ ID NO: 196186 - DNA, 477 bp, Homo sapiens
  Payload ID: 18699
  Gene Name: tudor and KH domain containing
  ENST ID: ENST00000530202
  CDS Start-End: 82-258
ggcgcactcgacggctgactggagcagcggtaaaggcgaggatggagaccgaaggatataagtcaaagagtacagcagaaaatgtctactgaacggacttcttggacaagcctgtccaccattcagaaaatagccctgggccttgggatcccagccagtgcaacagttgcctatatcctataccgcaggtatagggaaagcagagttgttagtagaaggcacttacctcaaaggctggatctagagaataggacctagagaaatgacttatgtacctatcagtcaggagaagttctgagcctaatggacccctcagaagagcggctgacatttgttggggaagatgacattgagatagagatgcgggttccccaggaggctgtgaaactcatcattggccggcaaggagccaatattaaacagctgcggaaacagacaggtgctcggattgatgtggacacagaggatgtaggcgat

SEQ ID NO: 196187 - DNA, 1807 bp, Homo sapiens
  Payload ID: 18699
  Gene Name: tudor and KH domain containing
  ENST ID: ENST00000526413
  CDS Start-End: 54-476
gcactcgacggctgactggagcagcggatataagtcaaagagtacagcagaaaatgtctactgaacggacttcttggacaagcctgtccaccattcagaaaatagccctgggccttgggatcccagccagtgcaacagttgcctatatcctataccgcaggtatagggaaagcagagaagagcggctgacatttgttggggaagatgacattgagatagagatgcgggttccccaggaggctgtgaaactcatcattggccggcaaggagccaatattaaacagctgcggaaacagacaggtgctcggattgatgtggacacagaggatgtaggcgatgagcgagtgctgcttatcagtggttttcctgttcagggagaggcggcgagacaattcgttctatctgtaaggcatctggagccaaaattacctgtgacaaagaatcagaagggacattactactatcaagacttataaaaatctcaggaacacagaaggaagtggcagcagccaagcatttgatactggagaaagtttcagaagatgaagaacttcggaagagaattgctcattctgcagaaaccagggtcccacgcaaacagccaatcagtgtgagaagagaagacatgacagagccaggtggagctggagagccagcattatggaaaaacaccagttctagcatggagccgactgcacccctggtgactcctccacccaaaggaggaggcgacatggctgtggtagtgtcaaaggaaggttcctgggagaaacctagtgatgacagctttcagaagtctgaagcccaggccatcccagagatgcccatgtttgaaatccccagtcctgacttcagttttcatgctgatgagtacctagaagtctacgtttctgcttctgagcaccctaaccacttctggatccagatcgttggctcccgcagcctgcaattggataagcttgtcaatgagatgacccagcactatgagaatagtgtgcctgaagacttgactgtgcatgtaggagacattgtagcagcacctttacctacaaatggttcctggtatcgagcccgggtcctcggcaccttggagaatgggaacttggacctctattttgttgactttggagataatggagattgcccactgaaggacctcagggctctcaggagtgacttcctaagccttccatttcaagcaatagaatgtagtctggcacggattgctccctcaggtgaccagtgggaagaggaagctttggatgagtttgatagactcactcattgtgctgactggaagcctctggtagccaagatctctagctatgtccagactgggatctcaacttggccaaagatctacttatatgatactagcaatgggaagaaacttgatattgggctagaattagtacacaaaggatacgcaattgagcttcctgaagacatagaagaaaacagagctgtcccagacatgttgaaggacatggccacagaaacagatgcctctctcagcacgttgctcactgagaccaaaaagagctctggagagataacacataccctgtcctgcctcagcttatcagaagctgcttccatgtctggtgatgataaccttgaagatgactacttactctgaagtctgggcttcagtttgctcagccatctgctttgctgtgatttggcataggaattggtgcatggaggagaggagtgtatgataaaggatccatgcagtccttcctttattacacatatagtctggcttgctgtggaccaaattaatattctcctcccatcagactac

SEQ ID NO: 196188 - DNA, 2217 bp, Homo sapiens
  Payload ID: 18699
  Gene Name: tudor and KH domain containing
  ENST ID: ENST00000525790
  CDS Start-End: 137-559
ggtgtgagtgggaggcggcggcgctggtggctgcagctggggtgaggcgcgaggcggcgcactcgacggctgactggagcagcggtaaaggcgaggatggagaccgaaggatataagtcaaagagtacagcagaaaatgtctactgaacggacttcttggacaagcctgtccaccattcagaaaatagccctgggccttgggatcccagccagtgcaacagttgcctatatcctataccgcaggtatagggaaagcagagaagagcggctgacatttgttggggaagatgacattgagatagagatgcgggttccccaggaggctgtgaaactcatcattggccggcaaggagccaatattaaacagctgcggaaacagacaggtgctcggattgatgtggacacagaggatgtaggcgatgagcgagtgctgcttatcagtggttttcctgttcagggagaggcggcgagacaattcgttctatctgtaaggcatctggagccaaaattacctgtgacaaagaatcagaagggacattactactatcaagacttataaaaatctcaggaacacagaaggaagtggcagcagccaagcatttgatactggagaaagtttcagaagatgaagaacttcggaagagaattgctcattctgcagaaaccagggtcccacgcaaacagccaatcagtgtgagaagagaagacatgacagagccaggtggagctggagagccagcattatggaaaaacaccagttctagcatggagccgactgcacccctggtgactcctccacccaaaggaggaggcgacatggctgtggtagtgtcaaaggaaggttcctgggagaaacctagtgatgacagctttcagaagtctgaagcccaggccatcccagagatgcccatgtttgaaatccccagtcctgacttcagttttcatgctgatgagtacctagaagtctacgtttctgcttctgagcaccctaaccacttctggatccagatcgttggctcccgcagcctgcaattggataagcttgtcaatgagatgacccagcactatgagaatagtgtgcctgaagacttgactgtgcatgtaggagacattgtagcagcacctttacctacaaatggttcctggtatcgagcccgggtcctcggcaccttggagaatgggaacttggacctctattttgttgactttggagataatggagattgcccactgaaggacctcagggctctcaggagtgacttcctaagccttccatttcaagcaatagaatgtagtctggcacggattgctccctcaggtgaccagtgggaagaggaagctttggatgagtttgatagactcactcattgtgctgactggaagcctctggtagccaagatctctagctatgtccagactgggatctcaacttggccaaagatctacttatatgatactagcaatgggaagaaacttgatattgggctagaattagtacacaaaggatacgcaattgagcttcctgaagacatagaagaaaacagagctgtcccagacatgttgaaggacatggccacagaaacagatgcctctctcagcacgttgctcactgagaccaaaaagagctctggagagataacacataccctgtcctgcctcagcttatcagaagctgcttccatgtctggtgatgataaccttgaagatgactacttactctgaagtctgggcttcagtttgctcagccatctgctttgctgtgtgctccatatgtttgagatccattttgtcctgctggccacatcccttgaatggattctgtgtaatttcaccagtgctccttcagtctggcccctaacaccacctgcaggggcttcctcagagtccagttgtaacttgatggaacaagttacaacttcccaccttcgtggtaggtgggaagaaaagaatccctgaaatgcctgagggtgcatttttaaagacaggggaagagggtctcctataaaggaaaaggagttatccagctgcctcagcgcgaaaagcaaggaagaacagcagatccccacctctgtcgttccgatcattctggaagttcacaaacacagagtccacatttgtcttctcttccacgtactccagggttgcagtcaaactaggagccacagaaaaacagttaaaatgtttggccgctccctctccctctccctctccgtctcc

SEQ ID NO: 196189 - DNA, 4510 bp, Homo sapiens
  Payload ID: 18700
  Gene Name: tudor domain containing 1
  Uniprot ID: Q9BXT4
  ENST ID: ENST00000251864
  CDS Start-End: 154-3723
gctgaggccaggagggcgcactggggattggaggcgagggaagtgcagggcgcatcccaggcggcagggctcccagcatcggcagtcgccatcaccgccagaccgcagagacaggttcggatccgcggtcctcttgcctctttccaggcctcgatgagtgttaaatcgccatttaatgtgatgtcaagaaataatttggaagcacctccttgtaagatgacagagccatttaattttgagaaaaatgaaaacaagcttccaccacatgagtctttaagaagtcctggaacacttcctaaccaccctaatttcaggctgaaaagctcagagaatggaaataaaaagaacaattttttgctttgtgagcaaaccaaacaatatttggctagtcaggaagacaattcagtttcttcaaacccgaatggcatcaacggagaagtagttggctccaaaggagacaggaaaaaattgccagcaggaaactcagtgtcaccaccaagtgctgaaagtaattcaccacccaaagaagtgaatattaagcctggaaataatgtacgtcctgcaaaatcaaaaaaactaaacaagttggtcgagaattccttgtccataagtaatccagggctcttcacctccttaggacctcctcttcggtccacaacttgccatcgctgtggcctatttggatcgctgaggtgctctcagtgcaagcagacctactattgctccacagcatgtcaaagaagagactggtctgcacacagcatcgtgtgcaggcctgttcagccaaatttccacaaacttgaaaataaatcatctattgaaacaaaggatgtggaggtaaacaataagagtgactgtccacttggagttactaaggaaatagccatttgggctgagagaataatgttttctgatttgagaagtctacaactcaagaaaaccatggaaataaagggtacggttaccgaattcaaacacccaggggacttctacgtgcagttatattcttcagaagttttagaatacatgaaccaactctctgccagcttaaaagaaacatatgcaaatgtgcatgaaaaagactatattcctgttaagggggaagtttgtattgccaagtacactgttgatcagacctggaacagagcaatcatacaaaacgttgatgtgcagcaaaagaaggcacatgtcttatatattgattatggaaatgaagaaataattccattaaacagaatttaccacctcaacaggaacattgacttgtttcctccttgtgccataaagtgctttgtagccaatgttatcccagcagaagggaattggagcagtgattgtatcaaagctactaaaccactgttaatggagcagtactgctccataaagattgtcgacatcttggaagaggaagtggttacctttgctgtagaagttgagctgccaaattcaggaaaacttttagaccatgtgcttatagaaatgggatatggcttgaaacccagtggacaagattctaagaaggaaaatgcagatcaaagtgatcctgaagatgttggaaaaatgacaactgaaaacaacattgtcgtagacaaaagtgacctaatcccaaaagtgttaactttgaatgtaggtgatgagttttgtggtgtggttgcccacattcaaacaccagaagacttcttttgtcaacaactgcaaagtggccgaaagcttgctgaacttcaggcatcccttagcaagtactgtgatcagttgcctccacgctctgatttttatccagccattggtgatatatgttgtgctcagttctcagaggatgatcagtggtaccgtgcctctgttttggcttacgcttctgaagaatctgtactggtcggatatgtagattatggaaactttgaaatccttagtttgatgagactttgtcccataatcccaaagttgttggaattgccaatgcaagctataaagtgtgtactagcaggagtaaagccatcattaggaatttggactccagaagctatttgtctcatgaaaaaacttgtacagaacaaaataatcacagtgaaagtggtggacaagttggaaaacagttccctggtggagcttattgataaatccgagacgcctcatgtcagtgttagcaaagttctcctagatgcaggctttgctgtgggagaacagagtatggtgacagataaacccagtgacgtgaaagaaaccagtgttcccttgggtgtggaaggaaaagtaaatccattggagtggacatgggttgaacttggtgttgaccaaacagtagatgttgtggtctgtgtgatatatagtcctggagaattttattgccatgtgcttaaagaggatgctttaaagaaactcaatgatttgaacaagtcattagcagaacactgccagcagaagttacctaatggtttcaaggcagagataggacaaccttgttgtgctttttttgcaggtgatggtagttggtatcgtgctttagtcaaggaaatcttaccaaatggacatgttaaagtacattttgtggattatggaaacatcgaagaagttactgcagatgaactccgaatgatatcatcaacatttttaaaccttccctttcagggaatacggtgccagttagcagatatacagtctagaaacaaacattggtctgaagaagccataacaagattccagatgtgtgttgctgggataaaattgcaagccagagtggttgaagtcactgaaaatgggataggagttgaactcaccgatctctccacttgttatcccagaataattagtgatgttctgattgatgaacatctggttttaaaatctgcttcaccacataaagacttaccaaatgacagacttgttaataaacatgagcttcaagttcatgtacagggacttcaagctacctcttcagctgagcaatggaagacgatagaattgccagtggataaaactatacaagcaaatgtattagaaatcataagcccaaacttgttttatgctctaccaaaagggatgccagaaaatcaggaaaagctgtgcatgttgacagctgaattattagaatactgcaatgctccgaaaagtcgaccaccctatagaccaagaattggagacgcatgctgtgccaaatacacaagtgatgatttttggtatcgtgcagttgttctggggacatcagacactgatgtggaagtgctctatgcagactatggaaacattgaaaccctgcctctttgcagagtgcaaccaatcacctctagccacctggcgcttcctttccaaattattagatgttcacttgaaggattaatggaattgaatggaagctcttctcaattaataataatgctattaaaaaatttcatgttgaatcagaatgtaatgctttctgtgaaaggaattacaaagaatgtccatacagtgtcagttgagaaatgttctgagaatgggactgtcgatgtagctgataagctagtgacatttggtctggcaaaaaacatcacacctcaaaggcagagtgctttaaatacagaaaagatgtataggatgaattgctgctgcacagagttacagaaacaagttgaaaaacatgaacatattcttctcttcctcttaaacaattcaaccaatcaaaataaatttattgaaatgaaaaaactgttaaaaaaaacagcatctcttggaggtaaacccttatgagacaggaaacagcaaaggctagctttaggagagaaagtacagcacctggtgtttttatttatgagaaccttttctttgtccactttctctgtaatgaccttctatccctccgtttttgcctgcctgccattctcctattaggttggtggtttttattttcctctaagttccttccaccaaataaatattacgtaaaaaattcataccaaatcaatgagaatactggcaaggaatacatagggactttctgctatatatgtaactttttattacttaaaggtaccgaaggaaggccaggtgcagtggctcacgcccagcactttgggaggctgaggtgggaggatcccttgaggccaggagttcaaggttacagtgagctatgatagtgccactgcactccagcctgggtgacagattttgtcttaaaaaaaaaaaaaaaaaagttgatatgagttttattttctgtccgtttgaaatattttgtaatattccctgcattctctgtcgtctgcctcttccacataatgtcctttgctttcatgtttgttatcttctttttctgttcactcagaggtcatcaatttctttctctccgtccttaattggattatttttcttttggcctttgggcacagagtctgacctctggaccactctaactggagaaggaactttatgttccctctcctgctgtgtccacaaccttagaaatctgtagctagatttttgttgttatagatagaatttactgtttctgaaacccaaatacagttatcagtttaaggtt

SEQ ID NO: 196190 - DNA, 4062 bp, Homo sapiens
  Payload ID: 18700
  Gene Name: tudor domain containing 1
  ENST ID: ENST00000369280
  CDS Start-End: 461-3775
ggtgtgggaggattctctgagtttggaaatagcgcttccaggcatcactccttcaaatgcaaacgttcaccttctctctaagagaaacttgcatgtggattcagtgccttcgtttgactaaaaattacgatacaaacaatattaacatttactagacttttttttccctactttcctcctataggaaaggaagatgtgctagggcatttacttagatgtgggtcagctggcgctagtttgtttaaggagttcctgctgtgtgccagtagcttttccgggccctagggtccttgctataaatacgttagccctgctgggcttctgaactaagggagctaaatgcttccagcttccttagtgaggcagcacggtgctgtatgcttaaatccaaggccgtggagtctgacctgcgtttttatctaaactgtgtaaggtgctggccctgggtggtttggcctcgatgagtgttaaatcgccatttaatgtgatgtcaagaaataatttggaagcacctccttgtaagatgacagagccatttaattttgagaaaaatgaaaacaagcttccaccacatgagtctttaagaagtcctggaacacttcctaaccaccctaatttcaggctgaaaagctcagagaatggaaataaaaagaacaattttttgctttgtgagcaaaccaaacaatatttggctagtcaggaagacaattcagtttcttcaaacccgaatggcatcaacggagaagtagttggctccaaaggagacaggaaaaaattgccagcaggaaactcagtgtcaccaccaagtgctgaaagtaattcaccacccaaagaagtgaatattaagcctggaaataatgtacgtcctgcaaaatcaaaaaaactaaacaagttggtcgagaattccttgtccataagtaatccagggctcttcacctccttaggacctcctcttcggtccacaacttgccatcgctgtggcctatttggatcgctgaggtgctctcagtgcaagcagacctactattgctccacagcatgtcaaagaagagactggtctgcacacagcatcgtgtgcaggcctgttcagccaaatttccacaaacttgaaaataaatcatctattgaaacaaaggatgtggaggtaaacaataagagtgactgtccacttggagttactaaggaaatagccatttgggctgagagaataatgttttctgatttgagaagtctacaactcaagaaaaccatggaaataaagggtacggttaccgaattcaaacacccaggggacttctacgtgcagttatattcttcagaagttttagaatacatgaaccaactctctgccagcttaaaagaaacatatgcaaatgtgcatgaaaaagactatattcctgttaagggggaagtttgtattgccaagtacactgttgatcagacctggaacagagcaatcatacaaaacgttgatgtgcagcaaaagaaggcacatgtcttatatattgattatggaaatgaagaaataattccattaaacagaatttaccacctcaacaggaacattgacttgtttcctccttgtgccataaagtgctttgtagccaatgttatcccagcagaagggaattggagcagtgattgtatcaaagctactaaaccactgttaatggagcagtactgctccataaagattgtcgacatcttggaagaggaagtggttacctttgctgtagaagttgagctgccaaattcaggaaaacttttagaccatgtgcttatagaaatgggatatggcttgaaacccagtggacaagattctaagaaggaaaatgcagatcaaagtgatcctgaagatgttggaaaaatgacaactgaaaacaacattgtcgtagacaaaagtgacctaatcccaaaagtgttaactttgaatgtaggtgatgagttttgtggtgtggttgcccacattcaaacaccagaagacttcttttgtcaacaactgcaaagtggccgaaagcttgctgaacttcaggcatcccttagcaagtactgtgatcagttgcctccacgctctgatttttatccagccattggtgatatatgttgtgctcagttctcagaggatgatcagtggtaccgtgcctctgttttggcttacgcttctgaagaatctgtactggtcggatatgtagattatggaaactttgaaatccttagtttgatgagactttgtcccataatcccaaagttgttggaattgccaatgcaagctataaagtgtgtactagcaggagtaaagccatcattaggaatttggactccagaagctatttgtctcatgaaaaaacttgtacagaacaaaataatcacagtgaaagtggtggacaagttggaaaacagttccctggtggagcttattgataaatccgagacgcctcatgtcagtgttagcaaagttctcctagatgcaggctttgctgtgggagaacagagtatggtgacagataaacccagtgacgtgaaagaaaccagtgttcccttgggtgtggaaggaaaagtaaatccattggagtggacatgggttgaacttggtgttgaccaaacagtagatgttgtggtctgtgtgatatatagtcctggagaattttattgccatgtgcttaaagaggatgctttaaagaaactcaatgatttgaacaagtcattagcagaacactgccagcagaagttacctaatggtttcaaggcagagataggacaaccttgttgtgctttttttgcaggtgatggtagttggtatcgtgctttagtcaaggaaatcttaccaaatggacatgttaaagtacattttgtggattatggaaacatcgaagaagttactgcagatgaactccgaatgatatcatcaacatttttaaaccttccctttcagggaatacggtgccagttagcagatatacagtctagaaacaaacattggtctgaagaagccataacaagattccagatgtgtgttgctgggataaaattgcaagccagagtggttgaagtcactgaaaatgggataggagttgaactcaccgatctctccacttgttatcccagaataattagtgatgttctgattgatgaacatctggttttaaaatctgcttcaccacataaagacttaccaaatgacagacttgttaataaacatgagcttcaagttcatgtacagggacttcaagctacctcttcagctgagcaatggaagacgatagaattgccagtggataaaactatacaagcaaatgtattagaaatcataagcccaaacttgttttatgctctaccaaaagggatgccagaaaatcaggaaaagctgtgcatgttgacagctgaattattagaatactgcaatgctccgaaaagtcgaccaccctatagaccaagaattggagacgcatgctgtgccaaatacacaagtgatgatttttggtatcgtgcagttgttctggggacatcagacactgatgtggaagtgctctatgcagactatggaaacattgaaaccctgcctctttgcagagtgcaaccaatcacctctagccacctggcgcttcctttccaaattattagatgttcacttgaagaaaagatgtataggatgaattgctgctgcacagagttacagaaacaagttgaaaaacatgaacatattcttctcttcctcttaaacaattcaaccaatcaaaataaatttattgaaatgaaaaaactgttaaaaagttaagtaagttaaatcgtatgttttcgcctcttctgtgatcaccaataggacatcttcaggcatattggcaggatagagctaatggagtgaaacctattgtaaggctgtactttcgtgatttaatgacctgaggtttggtcataatgcttctgctgtttttgtaggtttatctgatcgttttcctttgctactgctaatggaactgaacccccaggggtattccagttgtaatagcctttccttactgttgtttggttctgtgaatgcctatgttattgatatgtggaggg

SEQ ID NO: 196191 - DNA, 3705 bp, Homo sapiens
  Payload ID: 18700
  Gene Name: tudor domain containing 1
  ENST ID: ENST00000369282
  CDS Start-End: 154-3495
gctgaggccaggagggcgcactggggattggaggcgagggaagtgcagggcgcatcccaggcggcagggctcccagcatcggcagtcgccatcaccgccagaccgcagagacaggttcggatccgcggtcctcttgcctctttccaggcctcgatgagtgttaaatcgccatttaatgtgatgtcaagaaataatttggaagcacctccttgtaagatgacagagccatttaattttgagaaaaatgaaaacaagcttccaccacatgagtctttaagaagtcctggaacacttcctaaccaccctaatttcaggctgaaaagctcagagaatggaaataaaaagaacaattttttgctttgtgagcaaaccaaacaatatttggctagtcaggaagacaattcagtttcttcaaacccgaatggcatcaacggagaagtagttggctccaaaggagacaggaaaaaattgccagcaggaaactcagtgtcaccaccaagtgctgaaagtaattcaccacccaaagaagtgaatattaagcctggaaataatgtacgtcctgcaaaatcaaaaaaactaaacaagttggtcgagaattccttgtccataagtaatccagggctcttcacctccttaggacctcctcttcggtccacaacttgccatcgctgtggcctatttggatcgctgaggtgctctcagtgcaagcagacctactattgctccacagcatgtcaaagaagagactggtctgcacacagcatcgtgtgcaggcctgttcagccaaatttccacaaacttgaaaataaatcatctattgaaacaaaggatgtggaggtaaacaataagagtgactgtccacttggagttactaaggaaatagccatttgggctgagagaataatgttttctgatttgagaagtctacaactcaagaaaaccatggaaataaagggtacggttaccgaattcaaacacccaggggacttctacgtgcagttatattcttcagaagttttagaatacatgaaccaactctctgccagcttaaaagaaacatatgcaaatgtgcatgaaaaagactatattcctgttaagggggaagtttgtattgccaagtacactgttgatcagacctggaacagagcaatcatacaaaacgttgatgtgcagcaaaagaaggcacatgtcttatatattgattatggaaatgaagaaataattccattaaacagaatttaccacctcaacaggaacattgacttgtttcctccttgtgccataaagtgctttgtagccaatgttatcccagcagaagggaattggagcagtgattgtatcaaagctactaaaccactgttaatggagcagtactgctccataaagattgtcgacatcttggaagaggaagtggttacctttgctgtagaagttgagctgccaaattcaggaaaacttttagaccatgtgcttatagaaatgggatatggcttgaaacccagtggacaagattctaagaaggaaaatgcagatcaaagtgatcctgaagatgttggaaaaatgacaactgaaaacaacattgtcgtagacaaaagtgacctaatcccaaaagtgttaactttgaatgtaggtgatgagttttgtggtgtggttgcccacattcaaacaccagaagacttcttttgtcaacaactgcaaagtggccgaaagcttgctgaacttcaggcatcccttagcaagtactgtgatcagttgcctccacgctctgatttttatccagccattggtgatatatgttgtgctcagttctcagaggatgatcagtggtaccgtgcctctgttttggcttacgcttctgaagaatctgtactggtcggatatgtagattatggaaactttgaaatccttagtttgatgagactttgtcccataatcccaaagttgttggaattgccaatgcaagctataaagtgtgtactagcaggagtaaagccatcattaggaatttggactccagaagctatttgtctcatgaaaaaacttgtacagaacaaaataatcacagtgaaagtggtggacaagttggaaaacagttccctggtggagcttattgataaatccgagacgcctcatgtcagtgttagcaaagttctcctagatgcaggctttgctgtgggagaacagagtatggtgacagataaacccagtgacgtgaaagaaaccagtgttcccttgggtgtggaaggaaaagtaaatccattggagtggacatgggttgaacttggtgttgaccaaacagtagatgttgtggtctgtgtgatatatagtcctggagaattttattgccatgtgcttaaagaggatgctttaaagaaactcaatgatttgaacaagtcattagcagaacactgccagcagaagttacctaatggtttcaaggcagagataggacaaccttgttgtgctttttttgcaggtgatggtagttggtatcgtgctttagtcaaggaaatcttaccaaatggacatgttaaagtacattttgtggattatggaaacatcgaagaagttactgcagatgaactccgaatgatatcatcaacatttttaaaccttccctttcagggaatacggtgccagttagcagatatacagtctagaaacaaacattggtctgaagaagccataacaagattccagatgtgtgttgctgggataaaattgcaagccagagtggttgaagtcactgaaaatgggataggagttgaactcaccgatctctccacttgttatcccagaataattagtgatgttctgattgatgaacatctggttttaaaatctgcttcaccacataaagacttaccaaatgacagacttgttaataaacatgagcttcaagttcatgtacagggacttcaagctacctcttcagctgagcaatggaagacgatagaattgccagtggataaaactatacaagcaaatgtattagaaatcataagcccaaacttgttttatgctctaccaaaagggatgccagaaaatcaggaaaagctgtgcatgttgacagctgaattattagaatactgcaatgctccgaaaagtcgaccaccctatagaccaagaattggagacgcatgctgtgccaaatacacaagtgatgatttttggtatcgtgcagttgttctggggacatcagacactgatgtggaagtgctctatgcagactatggaaacattgaaaccctgcctctttgcagagtgcaaccaatcacctctagccacctggcgcttcctttccaaattattagatgttcacttgaagaaaagatgtataggatgaattgctgctgcacagagttacagaaacaagttgaaaaacatgaacatattcttctcttcctcttaaacaattcaaccaatcaaaataaatttattgaaatgaaaaaactgttaaaaaaaacagcatctcttggaggtaaacccttatgagacaggaaacagcaaaggctagctttaggagagaaagtacagcacctggtgtttttatttatgagaaccttttctttgtccactttctctgtaatgaccttctatccctccgtttttgcctgcctgccattctcctattaggttggtggtttttattttcctctaagttccttccaccaaataaatattacgtaaaaaattcataccaaa

SEQ ID NO: 196192 - DNA, 1776 bp, Homo sapiens
  Payload ID: 18701
  Gene Name: tudor domain containing 10
  Uniprot ID: Q5VZ19
  ENST ID: ENST00000368480
  CDS Start-End: 86-1186
aaggcgcgaaggctgggcgtcgcgatcgcaggtgcacgcgcgtggcccgcgagacgaggagatcctgttggaaagcaactgcagcatgtcctggaacattagtcacccccaactctctgataaactgtttgggaagaatggagtgttggaggagcagaaatctccaggattcaagaaaagagagacagaggtgtatgttggcaatcttccactggatatttctaaggaggaaattctgtaccttctaaaggacttcaaccctcttgatgtccacaaaatccagaatggctgcaaatgctttgcatttgtagatctgggctccatgcagaaagtgacacttgcaatccaggagctgaatggtaaactcttccacaagcgaaaactgttcgtgaatacaagcaaaaggccccccaagaggacccctgatatgatccagcagcctcgggccccgctggtgttggagaaggcttctggtgaaggatttggcaaaaccgccgctattatacagctcgctcctaaagctcctgttgacctgtgtgagacagagaaactgagggcagccttctttgcagtcccgttggaaatgagagggtccttcctggtgctgctcctgagggaatgcttccgagacctgagctggctggcactcatccatagcgtccgtggggaggcggggctgctggtgacgagtatcgtcccgaagaccccgtttttctgggctatgcacgtcactgaggctctgcaccagaacatgcaggctctgtttagcaccctggctcaggcggaggagcagcagccctacctggagggctccaccgttatgcgcgggactcgctgtctggcagagtaccacctgggggattatggacacgcctggaacaggtgttgggtgctggacagggtggacacctgggctgtggtcatgttcattgattttggacagttggccaccatccctgtgcagtctctgcgcagcctagacagcgacgacttctggaccatcccacccctgactcagccattcatgctggagaaagacattttgagttcgtatgaggttgtccatcgaatcctcaaagggaaaatcactggtgctttgaactcggcggtaactgctcctgcatctaacttggctgttgtccctccactcctgcccttggggtgtctgcagcaggctgctgcctaggcctggacacagtatttacctggcattcttttagatcaaacgaactggttatctgaggggttgggtgaactggctcgggtgggccttccttcccaccaaggctttgtctttctcttccagttgcacatcctaaagtttgaagagtctaaataacggggcttccctcagcatgttccctctcctgtttgccacggatccagaggccacctgccctgtcttctcgtacccctttcactcttgaggcctgggaggtgaaaaaggccagactgtgcccaggattgattcaattttgcttttactcccagcttccctctcaaaagagagtgaagtctcatttgtcatgtgtcttcagttccccaacttggcatgaacatttgaaccaaacataggaaactaccattaggttgaaagcctgaggcagctgggatggtctttcttgtgtctcttctttgcaccccagagcatgatataagtggtcctaacagattctggataatggagaagccctctgctggttttcctggcattccatgtagaataggtagagaatatttaaccaatgagcaaataaatgttggcatgtttcatga

SEQ ID NO: 196193 - DNA, 2331 bp, Homo sapiens
  Payload ID: 18701
  Gene Name: tudor domain containing 10
  Uniprot ID: Q5VZ19
  ENST ID: ENST00000368482
  CDS Start-End: 839-1894
gtcttcaacgcctgcccggcccgaggacaccgtggctctcggaggcggcgggcgccgggggcttccccctgctctttcctcctgcggtgggagaggccaggcccacggaagccccctgcggcccagcccacgctcccagggaccagagaggaccgagcggaggcggcgggagtatccccggcgcagcgacagacggtggacggacggcgagcggcccatcaactccgcgcgcccctcccctccgcggctggcgcctcccagccccgccacctcctgcccagagctgggggcggcggggtgagcgccatggcagaggcgggtcgggctgcgagctctggagaaaggggcggcggccgcacgtgcggatcggccgcgccccactgagcagagagcccccttctgccgccgacagcccgcgtctgcaccgagccggtctcggccgggcgctgccttcacacgcgcccaggagtgtcacgtgcgccgctcacccccgggaaggaagcccctcgcccacccactccgctctactccactctttctgcagacgttatttttggcggtagggcagaggttgcggcccgaggtccgggcgcagggacaacggtcgccagctcctgcgctagttccgttactcttcggtggcacacggtcctgggcagcgcgaggctcttcccgccgtggccgccggggattggctgccggcaagccccgccccgtgcccccgggctcagagggggcggagcgcggagggagaaggcgcgaaggctgggcgtcgcgatcgcaggtgcacgcgcgtggcccgcgagacgaggagatcctgttggaaagcaactgcagcatgtcctggaacattagtcacccccaactctctgataaactgtttgggaagaatggagtgttggaggagcagaaatctccaggattcaagaaaagagagacagaggtgtatgttggcaatcttccactggatatttctaaggaggaaattctgtaccttctaaaggacttcaaccctcttgatgtccacaaaatccagaatggctgcaaatgctttgcatttgtagatctgggctccatgcagaaagtgacacttgcaatccaggagctgaatggtaaactcttccacaagcgaaaactgttcgtgaatacaagcaaaaggccccccaagaggacccctgatatgatccagcagcctcgggccccgctggtgttggagaaggcttctggtgaaggatttggcaaaaccgccgctattatacagctcgctcctaaagctcctgttgacctgtgtgagacagagaaactgagggcagccttctttgcagtcccgttggaaatgagagggtccttcctggtgctgctcctgagggaatgcttccgagacctgagctggctggcactcatccatagcgtccgtggggaggcggggctgctggtgacgagtatcgtcccgaagaccccgtttttctgggctatgcacgtcactgaggctctgcaccagaacatgcaggctctgtttagcaccctggctcaggcggaggagcagcagccctacctggagggctccaccgttatgcgcgggactcgctgtctggcagagtaccacctgggggattatggacacgcctggaacaggtgttgggtgctggacagggtggacacctgggctgtggtcatgttcattgattttggacagttggccaccatccctgtgcagtctctgcgcagcctagacagcgacgacttctggaccatcccacccctgactcagccattcatgctggagaaagacattttgagttcgtatgaggttgtccatcgaatcctcaaagggaaaatcactggtgctttgaactcggcgttgcacatcctaaagtttgaagagtctaaataacggggcttccctcagcatgttccctctcctgtttgccacggatccagaggccacctgccctgtcttctcgtacccctttcactcttgaggcctgggaggtgaaaaaggccagactgtgcccaggattgattcaattttgcttttactcccagcttccctctcaaaagagagtgaagtctcatttgtcatgtgtcttcagttccccaacttggcatgaacatttgaaccaaacataggaaactaccattaggttgaaagcctgaggcagctgggatggtctttcttgtgtctcttctttgcaccccagagcatgatataagtggtcctaacagattctggataatggagaagccctctgctggttttcctggcattccatgtagaataggtagagaatatttaaccaatgagcaaataaatgttggcatgtttcatga

SEQ ID NO: 196194 - DNA, 1317 bp, Homo sapiens
  Payload ID: 18702
  Gene Name: tudor domain containing 12
  Uniprot ID: Q587J7
  ENST ID: ENST00000421545
  CDS Start-End: 1-1188
atgctccagctcctggtgctgaagattgaagatccaggttgcttctgggttattataaaagggtgtagtccctttttagatcatgatgtcgattatcaaaaattaaatagtgccatgaatgacttctacaacagcacgtgtcaagatatagaaataaaacccttaacattggaagaaggacaggtgtgtgtggtctattgtgaggagctaaagtgctggtgcagggccattgtcaaatcaattacgtcttccgcagaccagtacctggcagaatgtttccttgtggactttgccaagaacattccagtcaaatctaaaaacatccgagttgtagtagaatcgtttatgcagcttccctatagagcaaaaaaattcagcctgtactgcacaaagcctgtcacattacacattgacttctgccgagacagtactgacattgtacctgccaagaagtgggacaatgcagctattcagtactttcagaaccttctgaaagcaactacccaggtggaagccagattatgtgctgtggaagaagatacatttgaggtttacctttatgtaactataaaagatgaaaaagtttgtgttaatgatgatcttgttgcaaagaactatgcttgttatatgtcacctacaaagaataaaaaccttgattatttagaaaaaccaagattgaatataaaatcagcaccctccttcaataaactcaatccagcacttacactctggccaatgtttttgcaaggaaaagatgttcaaggaatggaagattcacatggtgtaaattttccggcacaatctctgcaacatacatggtgcaagggtattgtcggtgacctcaggccaacagccacagcacaggacaaagctgtaaaatgtaatatggattcattgagagattcacctaaagacaaatctgaaaagaaacaccattgcatctctttaaaagatacaaataagcgtgttgaatcctcagtgtactggccagcaaaaagaggcataaccatatatgctgatccagatgtaccagaagcaagtgctttaagtcagaagtcaaatgagaaacctcttagattgactgagaagaaagaatatgatgagaagaatagctgtgtgaaattactgcagtttttaaatcctgatcctttgagagctgacggaatctctgatctccagcagacttgagattagaagagaaactccttagatgggggacttaacctgaagacatccttttagaaacgatcgaatggattgttgcttctgagaaattgttccttgttttttggataataaacgatcttccttttggta

SEQ ID NO: 196195 - DNA, 3934 bp, Homo sapiens
  Payload ID: 18702
  Gene Name: tudor domain containing 12
  Uniprot ID: Q587J7
  ENST ID: ENST00000444215
  CDS Start-End: 321-3854
cgacgcctcaaggcctgctcagcgtgcgcgggcatccggtgggtgcgggaggcccgaggccaggcaggcagggatcccgcagcgaggggctggttactgccaggacggagcgcattgcctcgagccgaccccggggtccgcgagggctcctggggacgaggagtgtggggcacctgccgcggggggcccaggcgctaaaggtggagggaaggaacgcactcgcggcgggggcctggccggggcggacgcagccagcctcacccgcgacggtaggggacttccagggcgagggggcccatctgccctcgggcgccaggaggatgctccagctcctggtgctgaagattgaagatccaggttgcttctgggttattataaaagggtgtagtccctttttagatcatgatgtcgattatcaaaaattaaatagtgccatgaatgacttctacaacagcacgtgtcaagatatagaaataaaacccttaacattggaagaaggacaggtgtgtgtggtctattgtgaggagctaaagtgctggtgcagggccattgtcaaatcaattacgtcttccgcagaccagtacctggcagaatgtttccttgtggactttgccaagaacattccagtcaaatctaaaaacatccgagttgtagtagaatcgtttatgcagcttccctatagagcaaaaaaattcagcctgtactgcacaaagcctgtcacattacacattgacttctgccgagacagtactgacattgtacctgccaagaagtgggacaatgcagctattcagtactttcagaaccttctgaaagcaactacccaggtggaagccagattatgtgctgtggaagaagatacatttgaggtttacctttatgtaactataaaagatgaaaaagtttgtgttaatgatgatcttgttgcaaagaactatgcttgttatatgtcacctacaaagaataaaaaccttgattatttagaaaaaccaagattgaatataaaatcagcaccctccttcaataaactcaatccagcacttacactctggccaatgtttttgcaaggaaaagatgttcaaggaatggaagattcacatggtgtaaattttccggcacaatctctgcaacatacatggtgcaagggtattgtcggtgacctcaggccaacagccacagcacaggacaaagctgtaaaatgtaatatggattcattgagagattcacctaaagacaaatctgaaaagaaacaccattgcatctctttaaaagatacaaataagcgtgttgaatcctcagtgtactggccagcaaaaagaggcataaccatatatgctgatccagatgtaccagaagcaagtgctttaagtcagaagtcaaatgagaaacctcttagattgactgagaagaaagaatatgatgagaagaatagctgtgtgaaattactgcagtttttaaatcctgatcctttgagagctgacggaatctctgatctccagcagttgcagaagctgaagggcctgcagccgcccgtggtagtgctccggaacaagatcaagccctgcttaaccattgactcgtcgccgctgtcagcagacctgaagaaggctcttcaaagaaataagtttccgggccccagccacactgaatcttactcttggcctcccatagcgcgtggctgtgatgtggttgtcatttctcactgtgaaagcaaccctttgctctacctcctaccagtgttgacagttttgcaaacaggagcctgctacaagtcattaccaagtagaaatggacctctcgcagtcatcgtgtgccctgggtggaagaaggcccaatttatttttgaattattgggagaatatagcatgtcctccaggcctcttcatcctgtgctattaacaattgggctccataaagaggaagccaaaaatacaaagcttccaaggggctgtgatgtgattgttacgaccccatacagcctgctgaggcttctcgcctgtcagagcctgctgttcctcaggctctgccacctgatcctggatgaggtagaggtgctattcttggaagccaatgaacagatgtttgctatattagataactttaaaaaaaatattgaagttgaagaaagggaatctgcaccacatcagattgttgcagttggagttcattggaacaaacatatagaacatctcatcaaagagttcatgaatgatccctacattgtgatcacagccatggaagaggctgctctctatggcaatgtccaacaggtagtacatctttgcctagaatgtgaaaaaacttcttctttactccaagctcttgattttattccaagtcaggcacaaaagaccttgatcttcacctgctctgtagctgaaacagaaatagtgtgtaaggtagtagaaagcagttcaatattttgcttgaagatgcataaagaaatgatttttaacttacaaaatgttttagaacagtggaagaagaagttaagttctggctctcaaattatattagccctcacagacgactgcgtcccactcttggccatcaccgatgccacgtgtgtgattcacttcagtttccctgcctcaccaaaagtttttggtggacgcctgtattgcatgtctgatcattttcacgctgaacagggttctcctgcagaacagggagataagaaagccaaatctgtcttgctgctgacggagaaagatgcgagccatgcggtgggcgtcctgcgctacttggagcgagcggacgccaaggtccccgcagagctgtacgagttcaccgcaggagttctggaagccaaagaagataagaaagccggaaggcctctttgtccatatctgaaggcttttggtttttgcaaagacaaaaggatctgtcctgaccgacaccgtattaatccagaaacggacttgcccaggaaactgtccagccaagccctaccttcatttggatacattaaaataatacctttttatattttgaatgcaacaaattactttggccgtatagttgataaacacatggatctttatgcaactctcaatgctgaaatgaatgagtattttaaggattctaataaaacaactgtggaaaaggtggagaagtttggattgtatggattagcagaaaaaacgctttttcacagggttcaggtgttggaagtgaaccaaaaagaagacgcctgggccctggatgacatccttgtagagttcatcgatgaaggcaggacggggctcgtcacaagggaccagctgctgcatctcccagaacatttccacacacttcccccgcaggctgtggagtttattgtctgtagggtgaaacctgctgacaacgaaatagaatggaatccgaaggttactaggtacattcatcataaaattgttggaaaattgcatgatgcaaaagtgatcctggctttgggaaatacagtttggattgatccaatggtgcacattacaaacctttccagtttaaaaacctctgtcattgattataatgttcgagctgaaattttgtccatgggcatgggcattgataatccagaacacatagaacaactgaaaaaattacgcgaagatgctaagataccagcttgtgaagaaagcctaagccagaccccgccgagggtgacagggaccagtcctgctcaagaccaggatcatccatccgaggagcagggggggcaggggacgcctccagcagaagatgctgcttgcctgcagagcccccagcctgaggacacgggtgcagaaggaggggctgagtccaagacgagctcagaaaaccagaagcctggtgggtacttggtattcaaaagatggttaagttcaaatcgttaatgtctggaaaattgctaatgtttagactttctactttgagatgaaatgtagagaagatgacataaactgatatcacctaa

SEQ ID NO: 196196 - DNA, 3176 bp, Homo sapiens
  Payload ID: 18702
  Gene Name: tudor domain containing 12
  ENST ID: ENST00000564769
  CDS Start-End: 1-338
aaaaattacgcgaagatgctaagataccagcttgtgaagaaagcctaagccagaccccgccgagggtgacagggaccagtcctgctcaagaccaggatcatccatccgaggagcagggggggcagggttcctgtagagagccaggtgttaacccctgcctctcccgtctaggacgcctccagcagaagatgctgcttgcctgcagagcccccagcctgaggacacgggtgcagaaggaggggctgagtccaagacgagctcagaaaaccagaagcctgaaactttatctggaaacactgaaggtgccttcattagcagaactgcacagccgcctctgaaaaggtacgtccactcggcatggaggagtcggcgtcccttacccagttaataagatcaatgaatgcgcaggtctttcttcttctagcttccacccacaaataaaatggttccaaaaagaagatgtcgtcatcttaaagataagaataaggaatgtaaaggactacaagtgtcagtatttaagggatagagtcgttttcagtgcttgggtgggagacaaattttacctggctgatctggagctgcggggcaacataaggaaagatgactgccaatgtgtgattagaaacgatgaacctgtaatcactctggccaaagagagaagggaggcatggtgtcacctactcagacagaggaaccccaacgtggcttttgattttgatcactgggaagactgtgaagaggacagccacttccccaaggtagtgaattctaaaaacctgccgtacacagtgacagaggtggttgaagacagtagcagcacttcagaggatgacgacagtgagagtgaaagagaaggtgaatgacgtcctcaagagcggctggaagatgttgaacaaaaatggatattgccatgtgaccgacagttaagaaaacagtcagtcataaccaaatctttttcttttcttttctttttttttttttttttttttttttgagacagagtcttgctctgtcggccaggctggagtgcagtggcatgatcttggctcactgcaacctctgcctcacaggctcaagcaattctcctgcctcagcctcccgagtagctgggattacaggcatgtgccaccatgcctgaccaatttttgtatttttagtagagacagggtttcaccatgttggacaggctggtctcgaactcctgacctcaggtaatcctcccacctcagcctcccaaagtgctgggattacaggtgtgagccaccacacccggccaaccaaatctttctttacctcaaggataaatgattactgtcaccttgtggtgctggacttgataacggtgagaaattcttcattgacttaaaaataggctgatgataagaccatcaaaggagggtggacacagagaaacagcaggtgtggtctgattccgccggcttgtctgtcctgtctggcgcctctcgccactcaccctggcagagcagacatgcatctgggtgatgaaatgcactgtctggagtcagtccattcattttttttcacctagacctttgctacattgctacaaacctgatcttacacatataaattgaggtttctaatgtacacacttagactcagcaactgttgaaccagccctttcaaccatgagatagtgggatttaacataaccatctatgtgaattgatagtgttagcattcttggatagtgatagctcctcagagtaagttgacttctgatgaagagatagtccagggatagaaattggattgctcagtaagacccaggcctttccggggtgaagctgctggttctaaacaatcccttggacctgcagagtcctgagcaaatggcacaaaggttgctttttagtggaaattcacaagggcctgtggggtgcctggaggtgatctttgaatgcctacatgtcgtgagccctgcagacattcgccaccccatctgcattgtggctgcagcactggggggggtcaccaggtttaggggaggagtgtatgtagtcatggccacacccagaggctggcttttgtgctttgggtttctttgttgactgaaaaagcgagaaaggtgagctattgggaaattaaaagtcctgtgcactctgtgtcttgtttatcagctttgcctcggaatggaaaagaatttggatagaacatgagtgttgtgtgacggccccaagatctttattatttttttgtatcagaaagcgccaatgcccaggcttatgtatgtcccagcagaagccaccgcttgaactagaggtgaactttgtcatcaagctgtcctgtgagcaggtctggatcacactctggctcagttttctcatctgtaaaatgagacatcccctcattgtgtggcctggccttgtctcagggagcgcccgccgagtgctgctgggttgggcagtttttctgcccagtggctctgatgggggctcagagccctggcctcccctgggaggacacgctgtgcagccaggacagctgccgggagtgtgcccaggtcactgctatggccttcgcagggtgactggcaggtatcaaatcagcccatgaaggaagatggtgattttccttttttgtagctaaattgggcaggctcttgggaagtagaaagttctggtgtttttgctggtgaaggttttgactgtggagctcttctaacacccatatcagtgtctgtttctctgcatgtggctgctgccctgttggtggagctctgggggcagagaccaggccgccgtccagtggcgccccgtgcgcaccagctgcctgctgtttacacccaggtgcgccgagtctctttcatacagcacagcaaatgataatagctagtgacaatgtgtttcctgtgcactcgtgaaaatgcagggaggacaactgcatgcttagatctgtttcttttttcagacattcaaatgttctaatatctgaagctaacattttgtaggatataggatgctgattatgtgaacaattagtcattggttttctgtactgctatgaatatgtctgatttcaagttttggtcaaatatctaaaatgcaaggtgaaagtgcctttgtctctatgcttctaaaatcgctcatgcttagttgtggtatggatgtcttccgcagtgtatcatcaataaaatttcactgttttcacagaaa

SEQ ID NO: 196197 - DNA, 6135 bp, Homo sapiens
  Payload ID: 18703
  Gene Name: tudor domain containing 15
  Uniprot ID: B5MCY1
  ENST ID: ENST00000405799
  CDS Start-End: 331-6135
acatgctccctggggcccctgcgggattacgagggggtgggaacagggcccgagtctcccgccatcttgggccctagcggtatttttccagctctgggaagagcggcctgacccgcagcagagattcttggtcttatttctgcattctgatctgttccagtgaattatatttccacaccagtactacaccagtaccacagtgtcttgagtgctgtaactttataattagtcttaaactcagatttagagtctgattctaaggaaaaatagtttcccaaatttcacacaattaattgagtactgatatctgaatcctgtgtatacagtaaaatggattctacatctttcttaccaacatttttagatgtggatctgacaatatcacatattaaatgtcttcccaaggatattctggtgaaatttcaaggcataaagagtaatgaatgtgagtttgactaccatgtattgcagagagaaatacaacatactccaaaagtgaaaaataatgtggaaattgatgaattttgtttggtggaagaaagagtatctggagaatggcagagaggaagagtcatggaaaagaaaaatgaactctatacagtgctcctcatagatcgcggagaagaactaagagttgctggtccacagattgcttcagcctgtggcaatttatttgagctaccgccacgggtagtatttggtatttttgcgaatatactaccagttggggaaaaatggtcccctaaagctttgaattatttcaagtcattagtaggaatacaagtgaaaggttatgtgcaagctattttacctctgcaaatgtttctttttgaagtgccaaaaattatatctcaggctctcgagttacaattaggaagacttgttgatggagattcatttcgtcttattgtggaaatgttagaagaattccctcaacaaatgccagatttattacaacataaaaggcctgaattgtcattaggtaataaagatacttcacttgatattcagcatgttctggataagttgcagccatctttgtcagtaggaagtactgaaagtgtaaaggtatcatctgcattgagcccaagtaaattttattgtcagttaattaaatggactccagagctagaaaacttgacagcacatatgactttgcattatgataccgtctgtcaagaaactagtcccacgtgtgataattttggactgctttgtgttgccagaaggcgaaatggacagtggcatagaggaattcttcagcagctcttgcccccaaatcaagtaaaaatttggtttatggattatggcagtagcgaggctataccctcaatttatgtaaagaaacttaaacaggattttattttagtaccattattttcatttccatgttctctgacatgtttgcacagtccagatagagatgcaagaatatttcaactgagtatatttaaacaggccttattaggacaagtggtatatgcacacattgattggttcaataaggatgagtgtttgtattatgtgacattacaaactcaagagtctacagttaattctaagtgtctactgaagactgtaggcacacaagtactttgtccgatgtctgattcaaaaatctccaatatcttgagtgagacaagtgtgtctgatgtaaacagctttgcagttgagagttttatgggaaatattgaatggtcaatagactctctaaataaaaaaggcattttaaaagtaggttttcccattaaaacagtacaaatggagatagaggctgcctacatagcttttatagcatatgtattaaacccatcaaatttctgggtacgcactaatgaccatcggaatgaatttcaagaaataatgaaaaacataaacaaattttatgatttgtgtgaaaacgatgaaatgattctaagaaaacctgaacctggattattttgttgtgctagatatagcaaggacagacgtttttacagagctgtcatcactgaaattaatggttataagattaatgtttattttttggattatggtaatactgattccataccattttttgatgtaaaaattttgcttccagaattttgtgagttgcctgccttagcgatgtgctgttcacttgcacatatatttcctgttgaagatttatggactaaggctgcaattgattattttaaaaaattagttttgaacaaagcaattttgcttcaggttatagcaaaaaaagatgacaagtacactgtaaatattcaaagtgttgaagcctcagaaaatattgatgttatctctcttatgttacaagctggatatgcagaatattttcaagtagaactagaatattttccaaaatctgtaagtgaatattcaatgctaaattcagaatctaaaaacaaagttaatattaaaaaagtcatatctgcccttcttgaaggacctaaatctaaaaagtaccattcaaataacctggtggaaaataacttgtctttgccaaagtccctagctgttaatatctcagaatttaaaaatcctttcaccttgtctgtgggacctgagtcatcctggccttataaagaatatatttttagaccaggaacagttcttgaagttaaatgttcctgttattatggcccaggtgacttttcatgccagctccaatgtaagtcagaagacctaaaattactaatggagcaaattcagaattactatagtattcattctgatccttatgagattgggcagactgcttgtgttgctaagtattctgggaagtggtgtagagctgctgttttgactcaagtatcaaaagaagttgacatagtgtttgttgattatggttaccaaaaaagggttttaattgaagatctttgtgcaattaacccacgttttctcttgttagaaagccaagccttcagatgttgtcttaaccattttattgagcctgttagttgtaaattattcagttggacaagaaaagcattcagagacttgtggaattttatctcttcatctagagggttattgacttgtatcatctatgccttagttattatacatccaaaccatttatataacttagtggatttacagtcctcatttactagtgcaaaagaatttcttatgaatcgtggctctgctcagtatatcacattatcagagacattcccatctttatttagtctttacagttactgttattcttcctttaatatacaaattggaagtgaagaagaagtatatatatctcacatatatagtccccaaaagttttattgccagcttggcagaaataataaagatctagagatgatagaaacaaaaatcacagagagtgttaacctccaaaattttccaaaatatgattctaataaaatgagagtgtgcatatctaagtatgtagaggatggtctctcatacagagctttagcaataccaacagattcatcatctgagtttcaagtctattttgtagactttggaaataagcaattagtaggagaaaatatgttgagggccatttcagctcagtttccagagttgttgtttacacctatgcaagctattaagtgttttttgtcagatcttagggatgtagatattccagcagaaatcagtagttggtttaaagacaatttcttgggaagatcattaaaggcgataatattgtcccaggagtcagatggacagcttggtatagaattgtatgatggatctcaatatataaatgagaaaattaaagtgttgcttcatgcttatggaaaaagacattgtgaccaagcatgctgcatggaaaagagtaataaaataaatgagaataagagatttactacttctttgaaaggcaaaacaggaaacaactatcgccataatgtgataaataaacctagtccagtaacatattccgaaagaaaaatagaccaattgatgcatcccaaaaatatacatgccaggtttttgaagccatcagtttgttataaaatggaacctgtgtcaaaaaacaaaatgaagacttctttgaatgatgggcttaaaggtataaaaattgtccctggagctgcacatattcttgagaacaggcgtgtgggccaaaaatcagtaaaggttgtatcacagtcttttatcagagcattaaatcaaacaacctcacaaaacccatatgaccttattaggccacagatcaaagaccttcctcaaccgcaaatttatttgaatgccaaagttaaagggtatgtatctaatatcagtaatccagcgaatttccatattcagcttgctgagaatgaaagtgtaattatcagacttgctgatgctctaaatgcaacagcaaggagattgagagagagaaaatcagttaaacctctagtgggagatcttgtagttgcagaatattctggtgacaatgccatttacagggcagttattaagaaaattttgccaggaaattcttttgaagtagaatttattgactatggtaactctgcaatagtaaacacatctaaaatttacgaacttcagagggaatttttaactgttcctcagctaggaatccatgcttttcttagtggagtaaaatggaatgagcctgatgaaatatgggatgacaaaactgtggattattttacttcgaaagtacataacaaaacagtttattgtgaatttttgaaaaagcatgatcagaaatgggaagtaaatatgatttgtgatgaaaaatgtgtcattaatgaactactgaaatggaaagcatgttcaaaactgcagaagtcagcattgcagatgcctcaggttctctctcaaaaggtgaggccaggtgataatgaaatgaagaaaggaaaatcaaatgagtctgaaggttctatgaattcaaaccaacagctgtttaaaattcctttggaagaattcaaacttggacaacttgaaaaagctgaaatgcttaatgtttcaaaaagtggaagattttatgtgaagttatccaaaaataaaaaaattttatcagatttaatagtattaattacgaaagaagaaaaaaaatccccttttttatcaatggaaagtattgaaaaaggtttagaatgcttggcaaaatctaaaaataccttgaaatggcatcgatcaaaagtagaagaaaagtatgttgatgataaagtacttgtttttttagtagattgtggtatctatgaaatagtacctgtatgtaataccaagctgcttagtaatgaaataagaaacattcctagacaagctgtaccttgtaaatggatttggtttgaaaattctaagaacatatcatttgagtgcttatttgctgatttggaaataaatattcttttcctgaaatatttagatgctgtttgggaagtagaaattttggtagatgacctgttacttttggaatacttaaatttgaatacagttcctgttgaagaaaacaaacttagacttgcagaaattgtttacaacattgaatctaagactcctgtatcatcatgcacaataaaatcatttacttgggttcaattccaaaatgataggcagtattctggtattgcaactgctgtttctgatccatcagacttcagtattcagttagaagatttctttgacataatgaaatacctttttatgttgctttctgatctaccagagaccttacaaacattgcctcaggagttcataattcccggttctagttgtttgttcaaatataaatcggaagatcagtggaatagagtagaaatttctgaagtctcacctcagtctttatgtcttgtgttggttgactatggattttctttttatatacgttattcagaaattataaatcttaaagttgttcctgaggaacttttgaatttgccaaggctgagttatccatgtattttatatggtatcttacctgctaaaggaaaacattggagtgaagaagccaaaatcttttttcgagatttcctaagtaaaccagacttagtttttcagtttagggaatatcattctgaaacaaaactgaaagtagatgtcattcatgagaaaaacaatttggcagatatattagttgcatctggtctcgcaacttattctaaagattcacctcatcttgatgcaattactgctactgaatctgctaaaaatccaatataa

SEQ ID NO: 196198 - DNA, 5805 bp, Homo sapiens
  Payload ID: 18703
  Gene Name: tudor domain containing 15
  Uniprot ID: B5MCY1
  ENST ID: ENST00000622654
  CDS Start-End: 1-5805
atggattctacatctttcttaccaacatttttagatgtggatctgacaatatcacatattaaatgtcttcccaaggatattctggtgaaatttcaaggcataaagagtaatgaatgtgagtttgactaccatgtattgcagagagaaatacaacatactccaaaagtgaaaaataatgtggaaattgatgaattttgtttggtggaagaaagagtatctggagaatggcagagaggaagagtcatggaaaagaaaaatgaactctatacagtgctcctcatagatcgcggagaagaactaagagttgctggtccacagattgcttcagcctgtggcaatttatttgagctaccgccacgggtagtatttggtatttttgcgaatatactaccagttggggaaaaatggtcccctaaagctttgaattatttcaagtcattagtaggaatacaagtgaaaggttatgtgcaagctattttacctctgcaaatgtttctttttgaagtgccaaaaattatatctcaggctctcgagttacaattaggaagacttgttgatggagattcatttcgtcttattgtggaaatgttagaagaattccctcaacaaatgccagatttattacaacataaaaggcctgaattgtcattaggtaataaagatacttcacttgatattcagcatgttctggataagttgcagccatctttgtcagtaggaagtactgaaagtgtaaaggtatcatctgcattgagcccaagtaaattttattgtcagttaattaaatggactccagagctagaaaacttgacagcacatatgactttgcattatgataccgtctgtcaagaaactagtcccacgtgtgataattttggactgctttgtgttgccagaaggcgaaatggacagtggcatagaggaattcttcagcagctcttgcccccaaatcaagtaaaaatttggtttatggattatggcagtagcgaggctataccctcaatttatgtaaagaaacttaaacaggattttattttagtaccattattttcatttccatgttctctgacatgtttgcacagtccagatagagatgcaagaatatttcaactgagtatatttaaacaggccttattaggacaagtggtatatgcacacattgattggttcaataaggatgagtgtttgtattatgtgacattacaaactcaagagtctacagttaattctaagtgtctactgaagactgtaggcacacaagtactttgtccgatgtctgattcaaaaatctccaatatcttgagtgagacaagtgtgtctgatgtaaacagctttgcagttgagagttttatgggaaatattgaatggtcaatagactctctaaataaaaaaggcattttaaaagtaggttttcccattaaaacagtacaaatggagatagaggctgcctacatagcttttatagcatatgtattaaacccatcaaatttctgggtacgcactaatgaccatcggaatgaatttcaagaaataatgaaaaacataaacaaattttatgatttgtgtgaaaacgatgaaatgattctaagaaaacctgaacctggattattttgttgtgctagatatagcaaggacagacgtttttacagagctgtcatcactgaaattaatggttataagattaatgtttattttttggattatggtaatactgattccataccattttttgatgtaaaaattttgcttccagaattttgtgagttgcctgccttagcgatgtgctgttcacttgcacatatatttcctgttgaagatttatggactaaggctgcaattgattattttaaaaaattagttttgaacaaagcaattttgcttcaggttatagcaaaaaaagatgacaagtacactgtaaatattcaaagtgttgaagcctcagaaaatattgatgttatctctcttatgttacaagctggatatgcagaatattttcaagtagaactagaatattttccaaaatctgtaagtgaatattcaatgctaaattcagaatctaaaaacaaagttaatattaaaaaagtcatatctgcccttcttgaaggacctaaatctaaaaagtaccattcaaataacctggtggaaaataacttgtctttgccaaagtccctagctgttaatatctcagaatttaaaaatcctttcaccttgtctgtgggacctgagtcatcctggccttataaagaatatatttttagaccaggaacagttcttgaagttaaatgttcctgttattatggcccaggtgacttttcatgccagctccaatgtaagtcagaagacctaaaattactaatggagcaaattcagaattactatagtattcattctgatccttatgagattgggcagactgcttgtgttgctaagtattctgggaagtggtgtagagctgctgttttgactcaagtatcaaaagaagttgacatagtgtttgttgattatggttaccaaaaaagggttttaattgaagatctttgtgcaattaacccacgttttctcttgttagaaagccaagccttcagatgttgtcttaaccattttattgagcctgttagttgtaaattattcagttggacaagaaaagcattcagagacttgtggaattttatctcttcatctagagggttattgacttgtatcatctatgccttagttattatacatccaaaccatttatataacttagtggatttacagtcctcatttactagtgcaaaagaatttcttatgaatcgtggctctgctcagtatatcacattatcagagacattcccatctttatttagtctttacagttactgttattcttcctttaatatacaaattggaagtgaagaagaagtatatatatctcacatatatagtccccaaaagttttattgccagcttggcagaaataataaagatctagagatgatagaaacaaaaatcacagagagtgttaacctccaaaattttccaaaatatgattctaataaaatgagagtgtgcatatctaagtatgtagaggatggtctctcatacagagctttagcaataccaacagattcatcatctgagtttcaagtctattttgtagactttggaaataagcaattagtaggagaaaatatgttgagggccatttcagctcagtttccagagttgttgtttacacctatgcaagctattaagtgttttttgtcagatcttagggatgtagatattccagcagaaatcagtagttggtttaaagacaatttcttgggaagatcattaaaggcgataatattgtcccaggagtcagatggacagcttggtatagaattgtatgatggatctcaatatataaatgagaaaattaaagtgttgcttcatgcttatggaaaaagacattgtgaccaagcatgctgcatggaaaagagtaataaaataaatgagaataagagatttactacttctttgaaaggcaaaacaggaaacaactatcgccataatgtgataaataaacctagtccagtaacatattccgaaagaaaaatagaccaattgatgcatcccaaaaatatacatgccaggtttttgaagccatcagtttgttataaaatggaacctgtgtcaaaaaacaaaatgaagacttctttgaatgatgggcttaaaggtataaaaattgtccctggagctgcacatattcttgagaacaggcgtgtgggccaaaaatcagtaaaggttgtatcacagtcttttatcagagcattaaatcaaacaacctcacaaaacccatatgaccttattaggccacagatcaaagaccttcctcaaccgcaaatttatttgaatgccaaagttaaagggtatgtatctaatatcagtaatccagcgaatttccatattcagcttgctgagaatgaaagtgtaattatcagacttgctgatgctctaaatgcaacagcaaggagattgagagagagaaaatcagttaaacctctagtgggagatcttgtagttgcagaatattctggtgacaatgccatttacagggcagttattaagaaaattttgccaggaaattcttttgaagtagaatttattgactatggtaactctgcaatagtaaacacatctaaaatttacgaacttcagagggaatttttaactgttcctcagctaggaatccatgcttttcttagtggagtaaaatggaatgagcctgatgaaatatgggatgacaaaactgtggattattttacttcgaaagtacataacaaaacagtttattgtgaatttttgaaaaagcatgatcagaaatgggaagtaaatatgatttgtgatgaaaaatgtgtcattaatgaactactgaaatggaaagcatgttcaaaactgcagaagtcagcattgcagatgcctcaggttctctctcaaaaggtgaggccaggtgataatgaaatgaagaaaggaaaatcaaatgagtctgaaggttctatgaattcaaaccaacagctgtttaaaattcctttggaagaattcaaacttggacaacttgaaaaagctgaaatgcttaatgtttcaaaaagtggaagattttatgtgaagttatccaaaaataaaaaaattttatcagatttaatagtattaattacgaaagaagaaaaaaaatccccttttttatcaatggaaagtattgaaaaaggtttagaatgcttggcaaaatctaaaaataccttgaaatggcatcgatcaaaagtagaagaaaagtatgttgatgataaagtacttgtttttttagtagattgtggtatctatgaaatagtacctgtatgtaataccaagctgcttagtaatgaaataagaaacattcctagacaagctgtaccttgtaaatggatttggtttgaaaattctaagaacatatcatttgagtgcttatttgctgatttggaaataaatattcttttcctgaaatatttagatgctgtttgggaagtagaaattttggtagatgacctgttacttttggaatacttaaatttgaatacagttcctgttgaagaaaacaaacttagacttgcagaaattgtttacaacattgaatctaagactcctgtatcatcatgcacaataaaatcatttacttgggttcaattccaaaatgataggcagtattctggtattgcaactgctgtttctgatccatcagacttcagtattcagttagaagatttctttgacataatgaaatacctttttatgttgctttctgatctaccagagaccttacaaacattgcctcaggagttcataattcccggttctagttgtttgttcaaatataaatcggaagatcagtggaatagagtagaaatttctgaagtctcacctcagtctttatgtcttgtgttggttgactatggattttctttttatatacgttattcagaaattataaatcttaaagttgttcctgaggaacttttgaatttgccaaggctgagttatccatgtattttatatggtatcttacctgctaaaggaaaacattggagtgaagaagccaaaatcttttttcgagatttcctaagtaaaccagacttagtttttcagtttagggaatatcattctgaaacaaaactgaaagtagatgtcattcatgagaaaaacaatttggcagatatattagttgcatctggtctcgcaacttattctaaagattcacctcatcttgatgcaattactgctactgaatctgctaaaaatccaatataa

SEQ ID NO: 196199 - DNA, 3019 bp, Homo sapiens
  Payload ID: 18704
  Gene Name: tudor domain containing 3
  Uniprot ID: Q9H7E2
  ENST ID: ENST00000196169
  CDS Start-End: 789-2744
acccaccctgcgccccagccctctacagcgcgggcgaagggcatcggcggggaagcggctgtggttgccagatctggcagtacagagccaaggtggcagggccgcgctaggacacggatggtcccagggggagggcaacaggaaaaacaagcactgacacaactgccccatttccccatgtcccctaaaagcaggttttcttgggctgaccagggcattttcactgtggtgtccgactggggcaactcgatctgcccgcggggactcaaaaaagcttgagctgcattttttctttgcgtccgggcggaccaaaaggcgaggtgaagggaacgagtgtttataagaaagtaaacttttgtgcagaatgggctggggacacctctgagttttgctgcccgcaacgtgacctttttagcgcggtcctggacgcgttccctcgcagccaacccgtcagtctcctcaggccttatcctgccctctctgaggtggccgcctgtgggcgctgcaaacgccacacttttgctctacgaagaacctcctcgcgactttccaaggtatctttcagatgaaggcattgaagcttgcacaagctctccagacaaagtcaatgtaaatgacatcatcctgattgctctcaatatctgagaacaattggcaagaaattcctccccagtgacatcaatagtggaaaggtagaaaagctcgaaggtccatgtgttttgcaaattcaaaaaattcgcaatgttgctgcaccaaaggataatgaagaatctcaggctgcaccaaggatgctgcgattacagatgactgatggtcatataagttgcacagcagtagaatttagttatatgtcaaaaataagcctgaacacaccacctggaactaaagttaagctctcaggcattgttgacataaaaaatggattcctgctcttgaatgactctaacaccacagttcttggtggtgaagtggaacaccttattgagaaatgggagttacagagaagcttatcaaaacacaatagaagcaatattggaactgaaggtggaccaccgccttttgtgccttttggacagaagtgtgtatctcatgtccaagtggatagcagagaacttgatcgaagaaaaacattgcaagttacaatgcctgtcaaacctacaaatgataatgatgaatttgaaaagcaaaggacggctgctattgctgaagttgcaaagagcaaggaaaccaagacatttggaggaggtggtggtggtgctagaagtaatctcaatatgaatgctgctggtaaccgaaatagggaagttttacagaaagaaaagtcaaccaaatcagagggaaaacatgaaggtgtctatagagaactggttgatgagaaagctctgaagcacataacggaaatgggcttcagtaaggaagcatcgaggcaagctcttatggataatggcaacaacttagaagcagcactgaacgtacttcttacaagcaataaacagaaacctgttatgggtcctcctctgagaggtagaggaaaaggcagggggcgaataagatctgaagatgaagaggacctgggaaatgcaaggccatcagcaccaagcacattatttgatttcttggaatctaaaatgggaactttgaatgtggaagaacctaaatcacagccacagcagcttcatcagggacaatacagatcatcaaatactgagcaaaatggagtaaaagataataatcatctgagacatcctcctcgaaatgataccaggcagccaagaaatgaaaaaccgcctcgttttcaaagagactcccaaaattcaaagtcagttttagaaggcagtggattacctagaaatagaggttctgaaagaccaagtacttcttcagtatctgaagtatgggctgaagacagaatcaaatgtgatagaccgtattctagatatgacagaactaaagatacttcatatcctttaggttctcagcatagtgatggtgcttttaaaaaaagagataactctatgcaaagcagatcaggaaaaggtccctcctttgcagaggcaaaagaaaatccacttcctcaaggatctgtagattataataatcaaaaacgtggaaaaagagaaagccaaacatctattcctgattatttttatgacaggaaatcacaaacaataaataatgaagctttcagtggtataaaaattgaaaaacattttaatgtaaatactgattatcagaatccagttcgaagtaatagtttcattggtgttccaaatggagaagtagaaatgccactgaaaggaagacgaataggacctattaagccagcaggacctgtcacagctgtaccctgtgatgataaaatattttacaatagtgggcccaaacgaagatctgggccaattaagccagaaaaaatactagaatcatctattcctatggagtatgcaaaaatgtggaaacctggagatgaatgttttgcactttattgggaagacaacaagttttaccgggcagaagttgaagccctccattcttcgggtatgacagcagttgttaaattcattgactacggaaactatgaagaggtgctactgagcaatatcaagcccattcaaacagaggcatgggaggaagaaggcacctacgatcaaactctggagttccgtaggggaggtgatggccagccaagacgatccactcggccaacccaacagttttaccaaccaccccgggctcggaactaataggaaaagtagactctttgtgaagaaacgagccagtgactgaaacaccctggtggaaacctgttgacagaccttccactttctcttcagaataagtagctgtggtggatattattatttgaagaaagaaaaaacagattttagggtggaaaaaacagtcaactcacacaaagaatggaaaaaaatactgagttaaattaagcaaataccttttacaagtgaaaggaagaatttttcttctgccgtcaataaaaccattgtgctattattgtttt

SEQ ID NO: 196200 - DNA, 2532 bp, Homo sapiens
  Payload ID: 18704
  Gene Name: tudor domain containing 3
  Uniprot ID: Q9H7E2
  ENST ID: ENST00000377881
  CDS Start-End: 311-2266
ccccccaccacccccggcctaagcagctaccatggcccaggtggccggcgcggcgttgtcccaggcgggttggtatctttcagatgaaggcattgaagcttgcacaagctctccagacaaagtcaatgtaaatgacatcatcctgattgctctcaatacagatctgagaacaattggcaagaaattcctccccagtgacatcaatagtggaaaggtagaaaagctcgaaggtccatgtgttttgcaaattcaaaaaattcgcaatgttgctgcaccaaaggataatgaagaatctcaggctgcaccaaggatgctgcgattacagatgactgatggtcatataagttgcacagcagtagaatttagttatatgtcaaaaataagcctgaacacaccacctggaactaaagttaagctctcaggcattgttgacataaaaaatggattcctgctcttgaatgactctaacaccacagttcttggtggtgaagtggaacaccttattgagaaatgggagttacagagaagcttatcaaaacacaatagaagcaatattggaactgaaggtggaccaccgccttttgtgccttttggacagaagtgtgtatctcatgtccaagtggatagcagagaacttgatcgaagaaaaacattgcaagttacaatgcctgtcaaacctacaaatgataatgatgaatttgaaaagcaaaggacggctgctattgctgaagttgcaaagagcaaggaaaccaagacatttggaggaggtggtggtggtgctagaagtaatctcaatatgaatgctgctggtaaccgaaatagggaagttttacagaaagaaaagtcaaccaaatcagagggaaaacatgaaggtgtctatagagaactggttgatgagaaagctctgaagcacataacggaaatgggcttcagtaaggaagcatcgaggcaagctcttatggataatggcaacaacttagaagcagcactgaacgtacttcttacaagcaataaacagaaacctgttatgggtcctcctctgagaggtagaggaaaaggcagggggcgaataagatctgaagatgaagaggacctgggaaatgcaaggccatcagcaccaagcacattatttgatttcttggaatctaaaatgggaactttgaatgtggaagaacctaaatcacagccacagcagcttcatcagggacaatacagatcatcaaatactgagcaaaatggagtaaaagataataatcatctgagacatcctcctcgaaatgataccaggcagccaagaaatgaaaaaccgcctcgttttcaaagagactcccaaaattcaaagtcagttttagaaggcagtggattacctagaaatagaggttctgaaagaccaagtacttcttcagtatctgaagtatgggctgaagacagaatcaaatgtgatagaccgtattctagatatgacagaactaaagatacttcatatcctttaggttctcagcatagtgatggtgcttttaaaaaaagagataactctatgcaaagcagatcaggaaaaggtccctcctttgcagaggcaaaagaaaatccacttcctcaaggatctgtagattataataatcaaaaacgtggaaaaagagaaagccaaacatctattcctgattatttttatgacaggaaatcacaaacaataaataatgaagctttcagtggtataaaaattgaaaaacattttaatgtaaatactgattatcagaatccagttcgaagtaatagtttcattggtgttccaaatggagaagtagaaatgccactgaaaggaagacgaataggacctattaagccagcaggacctgtcacagctgtaccctgtgatgataaaatattttacaatagtgggcccaaacgaagatctgggccaattaagccagaaaaaatactagaatcatctattcctatggagtatgcaaaaatgtggaaacctggagatgaatgttttgcactttattgggaagacaacaagttttaccgggcagaagttgaagccctccattcttcgggtatgacagcagttgttaaattcattgactacggaaactatgaagaggtgctactgagcaatatcaagcccattcaaacagaggcatgggaggaagaaggcacctacgatcaaactctggagttccgtaggggaggtgatggccagccaagacgatccactcggccaacccaacagttttaccaaccaccccgggctcggaactaataggaaaagactctttgtgaagaaacgagccagtgactgaaacaccctggtggaaacctgttgacagaccttccactttctcttcagaataagtagctgtggtggatattattatttgaagaaagaaaaaacagattttagggtggaaaaaacagtcaactcacacaaagaatggaaaaaaatactgagttaaattaagcaaataccttttacaagtgaaaggaagaatttttcttctgccgtcaataaaaccattgtgctattat

SEQ ID NO: 196201 - DNA, 660 bp, Homo sapiens
  Payload ID: 18704
  Gene Name: tudor domain containing 3
  ENST ID: ENST00000377882
  CDS Start-End: 272-660
tatatgccaagtgacttctgaacacgacgtgaagacagtatctttcagatgaaggcattgaagcttgcacaagctctccagacaaagtcaatgtaaatgacatcatcctgattgctctcaatatctgagaacaattggcaagaaattcctccccagtgacatcaatagtggaaaggtagaaaagctcgaaggtccatgtgttttgcaaattcaaaaaattcgcaatgttgctgcaccaaaggataatgaagaatctcaggctgcaccaaggatgctgcgattacagatgactgatggtcatataagttgcacagcagtagaatttagttatatgtcaaaaataagcctgaacacaccacctggaactaaagttaagctctcaggcattgttgacataaaaaatggattcctgctcttgaatgactctaacaccacagttcttggtggtgaagtggaacaccttattgagaaatgggagttacagagaagcttatcaaaacacaatagaagcaatattggaactgaaggtggaccaccgccttttgtgccttttggacagaagtgtgtatctcatgtccaagtggatagcagagaacttgatcgaagaaaaacattgcaagttacaatgcctgtcaaacctacaaatgataatgatgaatt

SEQ ID NO: 196202 - DNA, 2484 bp, Homo sapiens
  Payload ID: 18704
  Gene Name: tudor domain containing 3
  Uniprot ID: Q9H7E2
  ENST ID: ENST00000377894
  CDS Start-End: 258-2213
gaacctcctcgcgactttccaaggtatctttcagatgaaggcattgaagcttgcacaagctctccagacaaagtcaatgtaaatgacatcatcctgattgctctcaatatctgagaacaattggcaagaaattcctccccagtgacatcaatagtggaaaggtagaaaagctcgaaggtccatgtgttttgcaaattcaaaaaattcgcaatgttgctgcaccaaaggataatgaagaatctcaggctgcaccaaggatgctgcgattacagatgactgatggtcatataagttgcacagcagtagaatttagttatatgtcaaaaataagcctgaacacaccacctggaactaaagttaagctctcaggcattgttgacataaaaaatggattcctgctcttgaatgactctaacaccacagttcttggtggtgaagtggaacaccttattgagaaatgggagttacagagaagcttatcaaaacacaatagaagcaatattggaactgaaggtggaccaccgccttttgtgccttttggacagaagtgtgtatctcatgtccaagtggatagcagagaacttgatcgaagaaaaacattgcaagttacaatgcctgtcaaacctacaaatgataatgatgaatttgaaaagcaaaggacggctgctattgctgaagttgcaaagagcaaggaaaccaagacatttggaggaggtggtggtggtgctagaagtaatctcaatatgaatgctgctggtaaccgaaatagggaagttttacagaaagaaaagtcaaccaaatcagagggaaaacatgaaggtgtctatagagaactggttgatgagaaagctctgaagcacataacggaaatgggcttcagtaaggaagcatcgaggcaagctcttatggataatggcaacaacttagaagcagcactgaacgtacttcttacaagcaataaacagaaacctgttatgggtcctcctctgagaggtagaggaaaaggcagggggcgaataagatctgaagatgaagaggacctgggaaatgcaaggccatcagcaccaagcacattatttgatttcttggaatctaaaatgggaactttgaatgtggaagaacctaaatcacagccacagcagcttcatcagggacaatacagatcatcaaatactgagcaaaatggagtaaaagataataatcatctgagacatcctcctcgaaatgataccaggcagccaagaaatgaaaaaccgcctcgttttcaaagagactcccaaaattcaaagtcagttttagaaggcagtggattacctagaaatagaggttctgaaagaccaagtacttcttcagtatctgaagtatgggctgaagacagaatcaaatgtgatagaccgtattctagatatgacagaactaaagatacttcatatcctttaggttctcagcatagtgatggtgcttttaaaaaaagagataactctatgcaaagcagatcaggaaaaggtccctcctttgcagaggcaaaagaaaatccacttcctcaaggatctgtagattataataatcaaaaacgtggaaaaagagaaagccaaacatctattcctgattatttttatgacaggaaatcacaaacaataaataatgaagctttcagtggtataaaaattgaaaaacattttaatgtaaatactgattatcagaatccagttcgaagtaatagtttcattggtgttccaaatggagaagtagaaatgccactgaaaggaagacgaataggacctattaagccagcaggacctgtcacagctgtaccctgtgatgataaaatattttacaatagtgggcccaaacgaagatctgggccaattaagccagaaaaaatactagaatcatctattcctatggagtatgcaaaaatgtggaaacctggagatgaatgttttgcactttattgggaagacaacaagttttaccgggcagaagttgaagccctccattcttcgggtatgacagcagttgttaaattcattgactacggaaactatgaagaggtgctactgagcaatatcaagcccattcaaacagaggcatgggaggaagaaggcacctacgatcaaactctggagttccgtaggggaggtgatggccagccaagacgatccactcggccaacccaacagttttaccaaccaccccgggctcggaactaataggaaaagactctttgtgaagaaacgagccagtgactgaaacaccctggtggaaacctgttgacagaccttccactttctcttcagaataagtagctgtggtggatattattatttgaagaaagaaaaaacagattttagggtggaaaaaacagtcaactcacacaaagaatggaaaaaaatactgagttaaattaagcaaataccttttacaagtgaaaggaagaatttttcttctgccgtcaataaaaccattgtgctattattgttt

SEQ ID NO: 196203 - DNA, 1863 bp, Homo sapiens
  Payload ID: 18704
  Gene Name: tudor domain containing 3
  ENST ID: ENST00000484389
  CDS Start-End: 245-595
gaggtggccgcctgtgggcgctgcaaacgccacacttttgctctacgaagaacctcctcgcgactttccaaggtatctttcagatgaaggcattgaagcttgcacaagctctccagacaaagtcaatgtaaatgacatcatcctgattgctctcaatctcgaaggtccatgtgttttgcaaattcaaaaaattcgcaatgttgctgcaccaaaggataatgaagaatctcaggctgcaccaaggatgctgcgattacagatgactgatggtcatataagttgcacagcagtagaatttagttatatgtcaaaaataagcctgaacacaccacctggaactaaagttaagctctcaggcattgttgacataaaaaatggattcctgctcttgaatgactctaacaccacagttcttggtggtgaagtggaacaccttattgagaaatgggagttacagagaagcttatcaaaacacaatagaagcaatattggaactgaaggtggaccaccgccttttgtgccttttggacagtttggaagaagaaatagccaagataaaagaaagtgtgaagtcctatggtgtgatccatgttgatgaagtgtgtatctcatgtccaagtggatagcagagaacttgatcgaagaaaaacattgcaagttacaatgcctgtcaaacctacaaatgataatgatgaatttgaaaagcaaaggacggctgctattgctgaagttgcaaagagcaaggaaaccaagacatttggaggaggtggtggtggtgctagaagtaatctcaatatgaatgctgctggtaaccgaaatagggaagttttacagaaagaaaagtcaaccaaatcagagggaaaacatgaaggtgtctatagagaactgtgttacttgtgaggtcagagaatactcaaggcacaaccccacatatcatacagattcttccttgcctcttgtaaaaaatcagcaagagaatgttgtattagaatgacatttttacataagtatgggatgtaatttttagttaaaagacagtaagtagttaaaagtttatgccttgccttatctgtgggctatcagccagcttttctctttattccttccaggttgatgagaaagctctgaagcacataacggaaatgggcttcagtaaggaagcatcgaggcaagctcttatggataatggcaacaacttagaagcagcactgaacgtacttcttacaagcaataaacagaaacctgttatgggtcctcctctgagaggtagaggaaaaggcagggggcgaataagatctgaagatgaagaggacctgggaaatgcaaggccatcagcaccaagcacattatttgatttcttggaatctaaaatgggaactttgaatgtggaagaacctaaatcacagccacagcagcttcatcagggacaatacagatcatcaaatactgagcaaaatggagtaaaagataataatcatctgagacatcctcctcgaaatgataccaggcagccaagaaatgaaaaaccgcctcgttttcaaagagactcccaaaattcaaagtcagttttagaaggcagtggattacctagaaatagaggttctgaaagaccaagtacttcttcagtatctgaagtatgggctgaagacagaatcaaatgtgatagaccgtattctagatatgacagaactaaagatacttcatatcctttaggttctcagcatagtgatggtgcttttaaaaaaagagataactctatgcaaagcagatcaggaaaaggtccctcctttgcagaggcaaaagaaaatccacttcctcaaggatctgtagattataataatcaaaaacgtggaaaaagagaaa

SEQ ID NO: 196204 - DNA, 2579 bp, Homo sapiens
  Payload ID: 18704
  Gene Name: tudor domain containing 3
  Uniprot ID: Q9H7E2
  ENST ID: ENST00000535286
  CDS Start-End: 73-2307
ggggtctcaagtaggaggcctccccatcacccccaccccagccccccaccacccccggcctaagcagctaccatggcccaggtggccggcgcggcgttgtcccaggcgggttggtatctttcagatgaaggcattgaagcttgcacaagctctccagacaaagtcaatgtaaatgacatcatcctgattgctctcaatacagatctgagaacaattggcaagaaattcctccccagtgacatcaatagtggaaaggtagaaaagctcgaaggtccatgtgttttgcaaattcaaaaaattcgcaatgttgctgcaccaaaggataatgaagaatctcaggctgcaccaaggatgctgcgattacagatgactgatggtcatataagttgcacagcagtagaatttagttatatgtcaaaaataagcctgaacacaccacctggaactaaagttaagctctcaggcattgttgacataaaaaatggattcctgctcttgaatgactctaacaccacagttcttggtggtgaagtggaacaccttattgagaaatgggagttacagagaagcttatcaaaacacaatagaagcaatattggaactgaaggtggaccaccgccttttgtgccttttggacagaagtgtgtatctcatgtccaagtggatagcagagaacttgatcgaagaaaaacattgcaagttacaatgcctgtcaaacctacaaatgataatgatgaatttgaaaagcaaaggacggctgctattgctgaagttgcaaagagcaaggaaaccaagacatttggaggaggtggtggtggtgctagaagtaatctcaatatgaatgctgctggtaaccgaaatagggaagttttacagaaagaaaagtcaaccaaatcagagggaaaacatgaaggtgtctatagagaactggttgatgagaaagctctgaagcacataacggaaatgggcttcagtaaggaagcatcgaggcaagctcttatggataatggcaacaacttagaagcagcactgaacgtacttcttacaagcaataaacagaaacctgttatgggtcctcctctgagaggtagaggaaaaggcagggggcgaataagatctgaagatgaagaggacctgggaaatgcaaggccatcagcaccaagcacattatttgatttcttggaatctaaaatgggaactttgaatgtggaagaacctaaatcacagccacagcagcttcatcagggacaatacagatcatcaaatactgagcaaaatggagtaaaagataataatcatctgagacatcctcctcgaaatgataccaggcagccaagaaatgaaaaaccgcctcgttttcaaagagactcccaaaattcaaagtcagttttagaaggcagtggattacctagaaatagaggttctgaaagaccaagtacttcttcagtatctgaagtatgggctgaagacagaatcaaatgtgatagaccgtattctagatatgacagaactaaagatacttcatatcctttaggttctcagcatagtgatggtgcttttaaaaaaagagataactctatgcaaagcagatcaggaaaaggtccctcctttgcagaggcaaaagaaaatccacttcctcaaggatctgtagattataataatcaaaaacgtggaaaaagagaaagccaaacatctattcctgattatttttatgacaggaaatcacaaacaataaataatgaagctttcagtggtataaaaattgaaaaacattttaatgtaaatactgattatcagaatccagttcgaagtaatagtttcattggtgttccaaatggagaagtagaaatgccactgaaaggaagacgaataggacctattaagccagcaggacctgtcacagctgtaccctgtgatgataaaatattttacaatagtgggcccaaacgaagatctgggccaattaagccagaaaaaatactagaatcatctattcctatggagtatgcaaaaatgtggaaacctggagatgaatgttttgcactttattgggaagacaacaagttttaccgggcagaagttgaagccctccattcttcgggtatgacagcagttgttaaattcattgactacggaaactatgaagaggtgctactgagcaatatcaagcccattcaaacagaggcatgggaggaagaaggcacctacgatcaaactctggagttccgtaggggaggtgatggccagccaagacgatccactcggccaacccaacagttttaccaaccaccccgggctcggaactaataggaaaagactctttgtgaagaaacgagccagtgactgaaacaccctggtggaaacctgttgacagaccttccactttctcttcagaataagtagctgtggtggatattattatttgaagaaagaaaaaacagattttagggtggaaaaaacagtcaactcacacaaagaatggaaaaaaatactgagttaaattaagcaaataccttttacaagtgaaaggaagaatttttcttctgccgtcaataaaaccattgtgctattattgtttt

SEQ ID NO: 196205 - DNA, 2497 bp, Homo sapiens
  Payload ID: 18704
  Gene Name: tudor domain containing 3
  Uniprot ID: Q9H7E2
  ENST ID: ENST00000621840
  CDS Start-End: 278-2230
tttatatgccaagtgacttctgaacacgacgtgaagacagtatctttcagatgaaggcattgaagcttgcacaagctctccagacaaagtcaatgtaaatgacatcatcctgattgctctcaatacagatctgagaacaattggcaagaaattcctccccagtgacatcaatagtggaaaggtagaaaagctcgaaggtccatgtgttttgcaaattcaaaaaattcgcaatgttgctgcaccaaaggataatgaagaatctcaggctgcaccaaggatgctgcgattacagatgactgatggtcatataagttgcacagcagtagaatttagttatatgtcaaaaataagcctgaacacaccacctggaactaaagttaagctctcaggcattgttgacataaaaaatggattcctgctcttgaatgactctaacaccacagttcttggtggtgaagtggaacaccttattgagaaatgggagttacagagaagcttatcaaaacacaatagaagcaatattggaactgaaggtggaccaccgccttttgtgccttttggacagtgtgtatctcatgtccaagtggatagcagagaacttgatcgaagaaaaacattgcaagttacaatgcctgtcaaacctacaaatgataatgatgaatttgaaaagcaaaggacggctgctattgctgaagttgcaaagagcaaggaaaccaagacatttggaggaggtggtggtggtgctagaagtaatctcaatatgaatgctgctggtaaccgaaatagggaagttttacagaaagaaaagtcaaccaaatcagagggaaaacatgaaggtgtctatagagaactggttgatgagaaagctctgaagcacataacggaaatgggcttcagtaaggaagcatcgaggcaagctcttatggataatggcaacaacttagaagcagcactgaacgtacttcttacaagcaataaacagaaacctgttatgggtcctcctctgagaggtagaggaaaaggcagggggcgaataagatctgaagatgaagaggacctgggaaatgcaaggccatcagcaccaagcacattatttgatttcttggaatctaaaatgggaactttgaatgtggaagaacctaaatcacagccacagcagcttcatcagggacaatacagatcatcaaatactgagcaaaatggagtaaaagataataatcatctgagacatcctcctcgaaatgataccaggcagccaagaaatgaaaaaccgcctcgttttcaaagagactcccaaaattcaaagtcagttttagaaggcagtggattacctagaaatagaggttctgaaagaccaagtacttcttcagtatctgaagtatgggctgaagacagaatcaaatgtgatagaccgtattctagatatgacagaactaaagatacttcatatcctttaggttctcagcatagtgatggtgcttttaaaaaaagagataactctatgcaaagcagatcaggaaaaggtccctcctttgcagaggcaaaagaaaatccacttcctcaaggatctgtagattataataatcaaaaacgtggaaaaagagaaagccaaacatctattcctgattatttttatgacaggaaatcacaaacaataaataatgaagctttcagtggtataaaaattgaaaaacattttaatgtaaatactgattatcagaatccagttcgaagtaatagtttcattggtgttccaaatggagaagtagaaatgccactgaaaggaagacgaataggacctattaagccagcaggacctgtcacagctgtaccctgtgatgataaaatattttacaatagtgggcccaaacgaagatctgggccaattaagccagaaaaaatactagaatcatctattcctatggagtatgcaaaaatgtggaaacctggagatgaatgttttgcactttattgggaagacaacaagttttaccgggcagaagttgaagccctccattcttcgggtatgacagcagttgttaaattcattgactacggaaactatgaagaggtgctactgagcaatatcaagcccattcaaacagaggcatgggaggaagaaggcacctacgatcaaactctggagttccgtaggggaggtgatggccagccaagacgatccactcggccaacccaacagttttaccaaccaccccgggctcggaactaataggaaaagtagactctttgtgaagaaacgagccagtgactgaaacaccctggtggaaacctgttgacagaccttccactttctcttcagaataagtagctgtggtggatattattatttgaagaaagaaaaaacagattttagggtggaaaaaacagtcaactcacacaaagaatggaaaaaaatactgagttaaattaagcaaataccttttacaagtgaaaggaagaatttttcttctgccgtcaataaaaccattgtgctatt

SEQ ID NO: 196206 - DNA, 3525 bp, Homo sapiens
  Payload ID: 18705
  Gene Name: tudor domain containing 5
  Uniprot ID: Q8NAT2
  ENST ID: ENST00000294848
  CDS Start-End: 251-3196
aatctctactcggcccgcaccagcagcgctggcgtcagggcgcggtgggggcaagacgggtgactggcagcagggcggtgccgggccgagaagggcgcctcacctggcgcctcctgccttcctttccacctcaggttgcagagagccgccagggcaggtggaagggccacgccccgctcccgtgagggtcaccgagagacgttgggggtggggcagggaccccaaccctagaccagtcctgtagggcacaatgtctgaacaagagcgtatacaggaatgtctgcggaaggaaataaggtcacttctcatttccaccaaagatggtttgagcccacaggagttggagaaggagtaccttttgatggttggcaaccatctaccactccgaatccttgggtatcggtccactatggagctggtattggacatgcctgatgttgttcgtgtctgccccggtgcaggtggtactgtaatactgaaagccattccagatgaatctaccaaaggaatagcaagcttagttgcaaaacagaggagcagccataagcttcgaaactcaatgcataagggaagacctagtatttattctggaccgagatctcatcggcgagtaccttaccgaggaagggttgcccctattcttccagctgttgtgaagagtgagttgaaggacctgttggcgttatctcctgttcttctttctgattttgaaaaggcatttgccaaaagatttggacgatcattccaatacatgcaatatggatttctctctatgtttgaagtgcttaatgcggcttcagatgtcatttctgtagagcagaccagagcaggttctttgttgatgctaaagaagagtgtaacagaggaaaagccgagaggatgtccagcaggtaaaatttttacccagccatttagaatgaaacaagggtcatactccacaggctttccggtagcaaagccatgcttttcacaacccacttcaaacatggaaccaccgaagcaaataatgagcatggaaaagacttccaagttaaatgtagtggagacttcaagactgaatcacactgaaaaattaaaccagctggagaacacattcaaatcagttattgcacagattggacctggaggaactatcagttcagaactaaaacataagataaaatttgttgtatctaagttcccagagggtttgtttatttctaaactgcttggagagtatgaggtaatttttaaagagcaactatcaccaaaaaaattaggcttcttaaatgtgacagaacttgttggagctcttagtgacattctccatgttgagttcaggaaaggacaccaagacttactagtgtttgatgcggataagaagcctctaccacctgttcagtcagataagaaaatagaagccaaagcttgtgtctccagtccacctagaaattcattgtctactgctgctgtcaaagagactgtatggaattgcccttcaaaaaaacaaaaagagccacaacagaagatttgcaagaagcctaatctggtggtaaagcctttacagctgcaagtagaaacaaacaaatcagagctcaacttggcaatggcaaatcatgacatcccgccagacgctgtgccgaacaagaaattatgcagactcccaccattagacaccagttccctcataggggtctttgtggagtatatcatctctcctagtcaattctacatccggatctatagcagggattcgtcagagttactcgaagacatgatgattgaaatgcggcgctgttattctaatcagctggtttctgatcgatatgtcatgccagaatgttttattcagccgggacatctctgttgtgtaaggatttctgaggataagtggtggtatcgggtcattatccatcgagtccttgagaaacaggaagttgaagtgttctacccagactttggaaatattggaattgttcagaagtcctccctgaggttcctcaagtgctgctacacaaagcttccagctcaggctatcccttgttctttggcttgggtgagaccagtagaggaacactggacatcgaaagctattttgcagttccagaagttgtgcggtttgaagccattagtgggggtagtggatgaatatgtagatggaatccttaacatttttttgtgtgacacatcctcaaacgaagatgtctatttccatcatgtcttgagaacagagggccatgctattgtatgccgagaaaatatctcttctaagggtttcagtgagctcaaccctttagctttatacacgacatccagtggagggccagaggacattgtcttgacagaactgggttatccttcccagcagcactattttaatgaagaccgaaagataagtccacagtcaaaagagagtgagttacgtatcttggatgagatccccactggaatgccatgcctggagtcagtgaccataggtgatgatatttgggatgagaactggttacctctacaggctaagatgggaaaaggaggtgatgctgcctcccatctatttactgcaagccttggtggaaagaatcagtattcatcatgtaaagaaatgccacagaaggactggtgtttttctacccctaaagatacatgggatgattcttggcagccttcaggccttgtaaatggaacgaaagtagaagttcataagccagaagtactgggtgctcaggaaaaaaatactggcacaaacaggactcaaaagcaactagacataaatggttcttcagattcttccacactgcccaaattggaagaattctgtacctctcttacccagtcagagcagtcagcagacgggagccagtctgaacccaacaacagtcagactcagccaaagcaaattcagctttccacagcagcaccctgttcaacaactgcagtggatgattccgcagaaaagccctctggttctgtggaaagctcaccagagatcctaaagaatgaagatttttctagcagccgtgctattacattgtacaaagacaagcgtcaagaatctgtagaccagctgtctttgattttgtcttatgagtgccagatttctcagaagctctacattcctcgaagtacagccactgctgccttaggtgctgccgcacggttagctacatccaggagcctcctacactggtaccccagtgtgaaaaggatggaagcatgagggagggagggaggagggagaaaaacagaatccagccgcttaggctttgatgaactcccaggccaaaatgaggagttattgaagcaaaatagtatcttgatcattgatacttttgtctttctgtgactatatgttagctttattatgctaacagtctactttgatgtgtaagtaagtattgatatttactgttaatcttgatttttcttgattttattctgtgtcattttgttcacctttgtttttaatgtagtttaaaggaatttgtttttttgtgtttgtttttcttgtacattatcatgactgataaatgaaaattgaaaaactaa

SEQ ID NO: 196207 - DNA, 3632 bp, Homo sapiens
  Payload ID: 18705
  Gene Name: tudor domain containing 5
  Uniprot ID: Q8NAT2
  ENST ID: ENST00000367614
  CDS Start-End: 360-3305
acctcgcgtcttcccaccgcgtcggaggacgtaggcgcctgggatcctggaaggcttcggatgggaagtttgcgttggagtccaacacccgacaggaaccccagttaacgcctccgcatggccaggggcagagttcttgacacctgtagcttaatcaacgcaggtggagattcagggcttgaatcgcccggccacgcgcaagccgcagggcaccctcatactactacttctgccttattacccttaaaactggagtctcagttatttgtatcccactattggtttttttttaaatcttttttcgtgggtttgcccccttttcctcagctgcgtttctgtcttcagtcctgtagggcacaatgtctgaacaagagcgtatacaggaatgtctgcggaaggaaataaggtcacttctcatttccaccaaagatggtttgagcccacaggagttggagaaggagtaccttttgatggttggcaaccatctaccactccgaatccttgggtatcggtccactatggagctggtattggacatgcctgatgttgttcgtgtctgccccggtgcaggtggtactgtaatactgaaagccattccagatgaatctaccaaaggaatagcaagcttagttgcaaaacagaggagcagccataagcttcgaaactcaatgcataagggaagacctagtatttattctggaccgagatctcatcggcgagtaccttaccgaggaagggttgcccctattcttccagctgttgtgaagagtgagttgaaggacctgttggcgttatctcctgttcttctttctgattttgaaaaggcatttgccaaaagatttggacgatcattccaatacatgcaatatggatttctctctatgtttgaagtgcttaatgcggcttcagatgtcatttctgtagagcagaccagagcaggttctttgttgatgctaaagaagagtgtaacagaggaaaagccgagaggatgtccagcaggtaaaatttttacccagccatttagaatgaaacaagggtcatactccacaggctttccggtagcaaagccatgcttttcacaacccacttcaaacatggaaccaccgaagcaaataatgagcatggaaaagacttccaagttaaatgtagtggagacttcaagactgaatcacactgaaaaattaaaccagctggagaacacattcaaatcagttattgcacagattggacctggaggaactatcagttcagaactaaaacataagataaaatttgttgtatctaagttcccagagggtttgtttatttctaaactgcttggagagtatgaggtaatttttaaagagcaactatcaccaaaaaaattaggcttcttaaatgtgacagaacttgttggagctcttagtgacattctccatgttgagttcaggaaaggacaccaagacttactagtgtttgatgcggataagaagcctctaccacctgttcagtcagataagaaaatagaagccaaagcttgtgtctccagtccacctagaaattcattgtctactgctgctgtcaaagagactgtatggaattgcccttcaaaaaaacaaaaagagccacaacagaagatttgcaagaagcctaatctggtggtaaagcctttacagctgcaagtagaaacaaacaaatcagagctcaacttggcaatggcaaatcatgacatcccgccagacgctgtgccgaacaagaaattatgcagactcccaccattagacaccagttccctcataggggtctttgtggagtatatcatctctcctagtcaattctacatccggatctatagcagggattcgtcagagttactcgaagacatgatgattgaaatgcggcgctgttattctaatcagctggtttctgatcgatatgtcatgccagaatgttttattcagccgggacatctctgttgtgtaaggatttctgaggataagtggtggtatcgggtcattatccatcgagtccttgagaaacaggaagttgaagtgttctacccagactttggaaatattggaattgttcagaagtcctccctgaggttcctcaagtgctgctacacaaagcttccagctcaggctatcccttgttctttggcttgggtgagaccagtagaggaacactggacatcgaaagctattttgcagttccagaagttgtgcggtttgaagccattagtgggggtagtggatgaatatgtagatggaatccttaacatttttttgtgtgacacatcctcaaacgaagatgtctatttccatcatgtcttgagaacagagggccatgctattgtatgccgagaaaatatctcttctaagggtttcagtgagctcaaccctttagctttatacacgacatccagtggagggccagaggacattgtcttgacagaactgggttatccttcccagcagcactattttaatgaagaccgaaagataagtccacagtcaaaagagagtgagttacgtatcttggatgagatccccactggaatgccatgcctggagtcagtgaccataggtgatgatatttgggatgagaactggttacctctacaggctaagatgggaaaaggaggtgatgctgcctcccatctatttactgcaagccttggtggaaagaatcagtattcatcatgtaaagaaatgccacagaaggactggtgtttttctacccctaaagatacatgggatgattcttggcagccttcaggccttgtaaatggaacgaaagtagaagttcataagccagaagtactgggtgctcaggaaaaaaatactggcacaaacaggactcaaaagcaactagacataaatggttcttcagattcttccacactgcccaaattggaagaattctgtacctctcttacccagtcagagcagtcagcagacgggagccagtctgaacccaacaacagtcagactcagccaaagcaaattcagctttccacagcagcaccctgttcaacaactgcagtggatgattccgcagaaaagccctctggttctgtggaaagctcaccagagatcctaaagaatgaagatttttctagcagccgtgctattacattgtacaaagacaagcgtcaagaatctgtagaccagctgtctttgattttgtcttatgagtgccagatttctcagaagctctacattcctcgaagtacagccactgctgccttaggtgctgccgcacggttagctacatccaggagcctcctacactggtaccccagtgtgaaaaggatggaagcatgagggagggagggaggagggagaaaaacagaatccagccgcttaggctttgatgaactcccaggccaaaatgaggagttattgaagcaaaatagtatcttgatcattgatacttttgtctttctgtgactatatgttagctttattatgctaacagtctactttgatgtgtaagtaagtattgatatttactgttaatcttgatttttcttgattttattctgtgtcattttgttcacctttgtttttaatgtagtttaaaggaatttgtttttttgtgtttgtttttcttgtacattatcatgactgataaatgaaaattgaaaaact

SEQ ID NO: 196208 - DNA, 3946 bp, Homo sapiens
  Payload ID: 18705
  Gene Name: tudor domain containing 5
  Uniprot ID: Q8NAT2
  ENST ID: ENST00000444136
  CDS Start-End: 519-3626
cttcccaccgcgtcggaggacgtaggcgcctgggatcctggaaggcggccagcctctgcagccgggcccagcggctcctgagactggggcggacctcacacctgaccccggagcggctaatcctgcccaaccgtcccacctgccacgtgccctcggggctggaacgcggcgccccgggagaggcctgctggtcagggggcgctggtgcgcaggcgcgcggggccgccgtcgcagctaccttcctgcgccgattcggagagggccccctaatctctactcggcccgcaccagcagcgctggcgtcagggcgcggtgggggcaagacgggtgactggcagcagggcggtgccgggccgagaagggcgcctcacctggcgcctcctgccttcctttccacctcaggttgcagagagccgccagggcaggtggaagggccacgccccgctcccgtgagggtcaccgagagacgttgggggtggggcagggaccccaaccctagaccagtcctgtagggcacaatgtctgaacaagagcgtatacaggaatgtctgcggaaggaaataaggtcacttctcatttccaccaaagatggtttgagcccacaggagttggagaaggagtaccttttgatggttggcaaccatctaccactccgaatccttgggtatcggtccactatggagctggtattggacatgcctgatgttgttcgtgtctgccccggtgcaggtggtactgtaatactgaaagccattccagatgaatctaccaaaggaatagcaagcttagttgcaaaacagaggagcagccataagcttcgaaactcaatgcataagggaagacctagtatttattctggaccgagatctcatcggcgagtaccttaccgaggaagggttgcccctattcttccagctgttgtgaagagtgagttgaaggacctgttggcgttatctcctgttcttctttctgattttgaaaaggcatttgccaaaagatttggacgatcattccaatacatgcaatatggatttctctctatgtttgaagtgcttaatgcggcttcagatgtcatttctgtagagcagaccagagcaggttctttgttgatgctaaagaagagtgtaacagaggaaaagccgagaggatgtccagcaggtaaaatttttacccagccatttagaatgaaacaagggtcatactccacaggctttccggtagcaaagccatgcttttcacaacccacttcaaacatggaaccaccgaagcaaataatgagcatggaaaagacttccaagttaaatgtagtggagacttcaagactgaatcacactgaaaaattaaaccagctggagaacacattcaaatcagttattgcacagattggacctggaggaactatcagttcagaactaaaacataagataaaatttgttgtatctaagttcccagagggtttgtttatttctaaactgcttggagagtatgaggtaatttttaaagagcaactatcaccaaaaaaattaggcttcttaaatgtgacagaacttgttggagctcttagtgacattctccatgttgagttcaggaaaggacaccaagacttactagtgtttgatgcggataagaagcctctaccacctgttcagtcagataagaaaatagaagccaaagcttgtgtctccagtccacctagaaattcattgtctactgctgctgtcaaagagactgtatggaattgcccttcaaaaaaacaaaaagagccacaacagaagatttgcaagaagcctaatctggtggtaaagcctttacagctgcaagtagaaacaaacaaatcagagctcaacttggcaatggcaaatcatgacatcccgccagacgctgtgccgaacaagaaattatgcagactcccaccattagacaccagttccctcataggggtctttgtggagtatatcatctctcctagtcaattctacatccggatctatagcagggattcgtcagagttactcgaagacatgatgattgaaatgcggcgctgttattctaatcagctggtttctgatcgatatgtcatgccagaatgttttattcagccgggacatctctgttgtgtaaggatttctgaggataagtggtggtatcgggtcattatccatcgagtccttgagaaacaggaagttgaagtgttctacccagactttggaaatattggaattgttcagaagtcctccctgaggttcctcaagtgctgctacacaaagcttccagctcaggctatcccttgttctttggcttgggtgagaccagtagaggaacactggacatcgaaagctattttgcagttccagaagttgtgcggtttgaagccattagtgggggtagtggatgaatatgtagatggaatccttaacatttttttgtgtgacacatcctcaaacgaagatgtctatttccatcatgtcttgagaacagagggccatgctattgtatgccgagaaaatatctcttctaagggtttcagtgagctcaaccctttagctttatacacgacatccagtggagggccagaggacattgtcttgacagaactgggttatccttcccagcagcactattttaatgaagaccgaaagataagtccacagtcaaaagagagtgagttacgtatcttgcaagatattaatgatgaaaagtctttaagtcatcttaaatctgagtcaaaggagccattaaaggattctgaatttgagtctttgaaaacctgtaataagagctttgaagaagatccaaagtggtccaacccagaaccaaacgatctgaaggaagaaaatgaggatgagatccccactggaatgccatgcctggagtcagtgaccataggtgatgatatttgggatgagaactggttacctctacaggctaagatgggaaaaggaggtgatgctgcctcccatctatttactgcaagccttggtggaaagaatcagtattcatcatgtaaagaaatgccacagaaggactggtgtttttctacccctaaagatacatgggatgattcttggcagccttcaggccttgtaaatggaacgaaagtagaagttcataagccagaagtactgggtgctcaggaaaaaaatactggcacaaacaggactcaaaagcaactagacataaatggttcttcagattcttccacactgcccaaattggaagaattctgtacctctcttacccagtcagagcagtcagcagacgggagccagtctgaacccaacaacagtcagactcagccaaagcaaattcagctttccacagcagcaccctgttcaacaactgcagtggatgattccgcagaaaagccctctggttctgtggaaagctcaccagagatcctaaagaatgaagatttttctagcagccgtgctattacattgtacaaagacaagcgtcaagaatctgtagaccagctgtctttgattttgtcttatgagtgccagatttctcagaagctctacattcctcgaagtacagccactgctgccttaggtgctgccgcacggttagctacatccaggagcctcctacactggtaccccagtgtgaaaaggatggaagcatgagggagggagggaggagggagaaaaacagaatccagccgcttaggctttgatgaactcccaggccaaaatgaggagttattgaagcaaaatagtatcttgatcattgatacttttgtctttctgtgactatatgttagctttattatgctaacagtctactttgatgtgtaagtaagtattgatatttactgttaatcttgatttttcttgattttattctgtgtcattttgttcacctttgtttttaatgtagtttaaaggaatttgtttttttgtgtttgtttttcttgtacattatcatgactgataaatgaaaattg

SEQ ID NO: 196209 - DNA, 1805 bp, Homo sapiens
  Payload ID: 18705
  Gene Name: tudor domain containing 5
  ENST ID: ENST00000417329
  CDS Start-End: 1-1476
gtcattatccatcgagtccttgagaaacaggaagttgaagtgttctacccagactttggaaatattggaattgttcagaagtcctccctgaggttcctcaagtgctgctacacaaagcttccagctcaggctatcccttgttctttggcttgggtgagaccagtagaggaacactggacatcgaaagctattttgcagttccagaagttgtgcggtttgaagccattagtgggggtagtggatgaatatgtagatggaatccttaacatttttttgtgtgacacatcctcaaacgaagatgtctatttccatcatgtcttgagaacagagggccatgctattgtatgccgagaaaatatctcttctaagggtttcagtgagctcaaccctttagctttatacacgacatccagtggagggccagaggacattgtcttgacagaactgggttatccttcccagcagcactattttaatgaagaccgaaagataagtccacagtcaaaagagagtgagttacgtatcttgcaagatattaatgatgaaaagtctttaagtcatcttaaatctgagtcaaaggagccattaaaggattctgaatttgagtctttgaaaacctgtaataagagctttgaagaagatccaaagtggtccaacccagaaccaaacgatctgaaggaagaaaatgaggatgagatccccactggaatgccatgcctggagtcagtgaccataggtgatgatatttgggatgagaactggttacctctacaggctaagatgggaaaaggaggtgatgctgcctcccatctatttactgcaagccttggtggaaagaatcagtattcatcatgtaaagaaatgccacagaaggactggtgtttttctacccctaaagatacatgggatgattcttggcagccttcaggccttgtaaatggaacgaaagtagaagttcataagccagaagtactgggtgctcaggaaaaaaatactggcacaaacaggactcaaaagcaactagacataaatggttcttcagattcttccacactgcccaaattggaagaattctgtacctctcttacccagtcagagcagtcagcagacgggagccagtctgaacccaacaacagtcagactcagccaaagcaaattcagctttccacagcagcaccctgttcaacaactgcagtggatgattccgcagaaaagccctctggttctgtggaaagctcaccagagatcctaaagaatgaagatttttctagcagccgtgctattacattgtacaaagacaagcgtcaagaatctgtagaccagctgtctttgattttgtcttatgagtgccagatttctcagaagctctacattcctcgaagtacagccactgctgccttaggtgctgccgcacggttagctacatccaggagcctcctacactggtaccccagtgtgaaaaggatggaagcatgagggagggagggaggagggagaaaaacagaatccagccgcttaggctttgatgaactcccaggccaaaatgaggagttattgaagcaaaatagtatcttgatcattgatacttttgtctttctgtgactatatgttagctttattatgctaacagtctactttgatgtgtaagtaagtattgatatttactgttaatcttgatttttcttgattttattctgtgtcattttgttcacctttgtttttaatgtagtttaaaggaatttgtttttttgtgtttgtttttcttgtacattatcatgactgataaatgaaaattgaaaaactaa

SEQ ID NO: 196210 - DNA, 6817 bp, Homo sapiens
  Payload ID: 18706
  Gene Name: tudor domain containing 6
  Uniprot ID: O60522
  ENST ID: ENST00000316081
  CDS Start-End: 1-6291
atgtgctcgacgcccggaatgccggcgccgggggcctcgctggccctgcgggtgtccttcgtggacgtgcatcccgatgtgatcccggtgcagctgtgggggctggtgggcgagcggcggggcgagtacctgcggctgagccgggaaatccaggaagcggcggccacgcgcggccagtgggcgctgggcagcgcctcggcctcgcccggcgagctgtgcctggtgcaggtcgggcttttgtggcaccgctgccgcgtggtcagccggcaggcacaggagagccgtgtcttcctgctggacgagggccgcaccatcacggccggagcaggctcgctggcgcctgggcgcagagagttcttcaatttgccctcggaagtgctgggctgcgtgctagcgggcctggtgccggcaggctgcggcgcgggctcaggcgagccgccgcagcactggcccgccgacgccgtggacttccttagcaaccttcagggcaaggaggtgcacgggtgcgtcctggacgtgctgctgctccatcgcctggtcctcctggaggtgcctgatgtgttccaacagatgcgggagctgggcctggctcggcgggtgcccgacagcctcttccgttcgctgctggagcgctatctcacagcggccactgctagcgtgggctccggggtcccggttctctcgcgagtcccgctcaagcaaaagcagcctggtctggattacttctatccccagctgcagctgggcgtgacggaggccgtggtcataacccaagtgtgccatccccaccgcattcactgccagctccgcagcgtctcgcaggagatccaccgcctctccgagagcatggcccaggtataccggggttccacggggacaggggatgagaactctaccagtgccacctgggaggagagggaggagagcccagataagccgggctctccgtgtgcatcctgtggcctggatggacattggtacagagcactgttgcttgagacttttcggccccagcgctgtgcccaggtgcttcatgtggactatggaaggaaggagttagtgagttgcagcagccttcggtacttgctgcctgaatattttcgaatgccggtggtgacctacccttgtgctttgtatggactctgggacggtgggagaggctggtctcggtcacaggtcggtgacctgaagacactgatactaggcaaggcagtgaatgcaaagattgaattttattgctcctttgagcatgtgtattatgtcagcctgtatggagaagatgggattaatctgaaccgtgtgtttggagtacagtcgtgttgcttggctgaccgagtccttcagagccaggcaacagaggaggaggaaccagaaacatctcagtctcagtctcctgctgaagaagtagatgaagagatttcactcccagccttaagatctatcaggttaaagatgaatgccttctacgatgcgcaggtagagtttgttaaaaatccttctgagttttggattaggttgaggaaacacaatgtcaccttcagtaagctgatgaggagaatgtgtggtttctattcctctgccagtaagctggatggtgtagttttgaaacctgaacctgatgacctttgctgtgtcaagtggaaagaaaatggttattatagggccatagtcaccaaattggatgacaagagtgtggatgtattcttagttgaccgaggcaattcggaaaatgtggactggtatgacgtaaggatgctgcttcctcagtttaggcagctaccaatattggctgtgaagtgcaccctggctgatatttggcctttgggaaaaacttggagccaggaggcagtttccttttttaaaaagactgtgctccacaaagaattagtcatccatattcttgataaacaggatcatcaatatgttattgagattcttgacgaatcaagaacaggggaagaaaacattagtaaggtaattgcccaagctggatatgccaagtatcaggaatttgaaacaaaggaaaatatcctggtaaatgcccactccccagggcatgtttcaaaccactttactacggagagtaacaaaataccttttgccaagactggagaaggagagcagaaagccaagagagagaataaaaccacatctgtttcaaaagctttgagtgacacaacagttgtaacaaatggttcaactgaactagttgtgcaggaaaaagtgaaaagagcatctgtttattttcctcttatgcagaattgcttggaaattaagccaggctcctctagtaaaggagagctggaagttggaagtacagtagaagtcagagtgtcttatgttgaaaaccctggctatttctggtgtcagctgaccaggaacatacaaggacttaaaactctaatgtctgatattcagtactattgcaaaaatacagctgctcctcaccagagaaacacccttgcttgtttggctaagcgaacagtaaacagacagtggtccagagcacttattagtgggatacagtctgtggagcatgtcaatgtaacatttgtagattatggagacagagaaatggtatctgtgaagaatatttattcaattagtgaagaatttctgaaggttaaggcacaggcttttaggtgcagtctttataatttaattcaaccagttggccagaatccctttgtttgggatgtaaaggcaatacaagctttcaatgaatttatagataatgcatggcaaaaaaatctagaattaaaatgtacaatatttgctctggcttcaattaatgaagaactgtttaacattgtggatttgctaaccccctttcagagtgcatgccatttcttggtagaaaagagacttgcaagaccagtaaaacttcagaagcctttggagtcctctgttcagctacattcctacttctattctacacatgatatgaaaattggaagtgaagaattagtttatataacgcatattgatgacccttggacattttattgccagctggcaagaaatgcaaatattttagaacagttgtcatgtagtattacacaattaagtaaagttttgctgaatttaaaaacatctcccttgaaccctggaaccttgtgccttgccaagtatactgatggaaactggtataggggcatagtaatagagaaagagccaaagaaagtcttctttgttgattttgggaatatttatgtagtaacaagtgatgatctgcttccaatacctagtgatgcatatgatgtcttacttttgcccatgcaagctgtcagatgttcattatctgatattcctgatcatataccagaagaagtggtggtgtggtttcaggagactattttagataagtcattgaaggctttagttgtagcaaaagatccagatggaacactgattatagaactatatggtgacaatattcaaattagtgctagtattaataagaagttggggctacttagttacaaagatagaataagaaaaaaagaaagtgaagtcctctgttctacaactgaaactcttgaagaaaaaaatgagaatatgaagttgccatgtacagagtatttaagtaaatcagtagggtacaagttacctaataaagaaattttggaagagtcatataaacctcagatcaactcatcatacaaggaactcaaacttttacaaagtttaacaaaaacaaacttagtcactcaatatcaagactctgtgggaaataaaaatagtcaagtgtttccattaacaacagaaaagaaagaagaaatttctgctgagacacccttgaaaacagcaagagtagaagctactctttcagagagaaaaataggagattcatgtgacaaagatttgcctctgaaattttgtgagttcccacagaagactataatgcctggatttaaaacaactgtatatgtttctcatataaatgacctttcagacttttatgttcaactaatagaagatgaagctgaaattagtcatctttcagagagattaaacagtgttaaaacaaggcccgaatattatgtaggtccacctttgcaaagaggagatatgatatgtgctgttttcccagaagataatttatggtatcgtgctgtgatcaaggagcaacaacccaatgaccttctctctgtgcagtttatagattatggcaatgtttctgtggttcatactaacaaaataggtaggcttgaccttgttaatgcaatattgccggggttgtgcattcattgctccttgcagggatttgaggttcctgacaataaaaattctaagaaaatgatgcattacttttcccaacggaccagcgaggctgcaataagatgtgaatttgttaaatttcaagacagatgggaagttattcttgctgatgaacatgggatcatagcagatgatatgattagcaggtatgctctcagtgaaaaatctcaagtagaactttctacccaagtaattaaaagtgccagttcaaagtctgttaacaaatcagacattgacacttcagtatttcttaactggtataatccagaaaaaaaaatgataagagcttatgccactgtgatagatggacctgagtacttttggtgtcagtttgctgatacggagaaacttcagtgtttagaagtagaagtacagactgctggagaacaggtagcagacaggagaaattgtatcccatgtccttatattggagatccttgtatagtaagatacagagaagatggacattattatagggcacttatcactaatatttgtgaagattatcttgtatctgtcaggcttgtggactttggaaacattgaagactgtgtggacccaaaagcactctgggccattccttctgaacttctgtcggttcccatgcaagcctttccatgttgcctctcagggtttaacatttcagaaggattatgttctcaagagggaaatgactatttctatgaaataataacagaagatgtgttggaaataacaatactagaaatcagaagggatgtttgtgatatccctttagcaattgttgacttgaaaagcaaaggtaaaagtattaatgagaaaatggagaaatattctaagactggtattaaaagtgctcttccctatgaaaatattgactcagagataaagcagactcttgggtcctacaatcttgatgtaggacttaagaaattaagtaataaagctgtacaaaataaaatatatatggaacaacagacagatgagcttgctgaaataactgaaaaagatgtaaacattattggaaccaaaccaagtaacttccgtgaccctaaaactgataacatttgtgaagggtttgaaaacccctgcaaagataaaattgatactgaggaactggaaggtgaattagagtgccatctggttgacaaagcagagtttgatgataaatacctgattacaggatttaacacattactaccacatgctaatgaaacaaaggagatactagaactgaattcacttgaggtgccgctttctcctgatgatgaatcaaaagaattcttagaactggaatctattgagttacagaattctctggtggtggatgaagaaaaaggggagctaagcccggtgccaccgaatgtgccactctcccaagagtgtgtcacaaaaggcgccatggagctatttacactgcagcttcctctcagctgtgaagctgagaaacagccagaactagaactacctacagcccagctgcctttagatgacaagatggatcctttgtctttaggagttagtcagaaagcacaggaatccatgtgtactgaggacatgagaaagtcaagttgtgtagaatcttttgatgaccagcgcaggatgtcattgcatctacatggagcagattgtgatcctaaaacacagaatgaaatgaatatatgtgaagaagaatttgtagagtataaaaacagggatgccatttcggcattgatgcctttgttctctgaggaagaaagcagtgatggaagcaagcacaataatggtttaccagatcatatctcagctcaactacagaacacctacactctgaaagcctttactgttggatctaaatgtgttgtgtggtcaagtctaagaaacacatggtctaaatgtgagattttagaaacagctgaagaaggaacaagggttttgaacctttcaaatggtatggaggagatagtgaaccctgagaatgtctggaatggcatacccaaattggataagagtccacctgagaaaaggggtttggaggtgatggagatttaaccgtggatctatagctgtggccaatcagtcagaagctgcccttgaacaagtggcatcttacgcagaccaacagagtatttgagaaaattgaaaacatgtaaccacaagaagttgtcattttcaaaaacttctatataggtggaaaacaaattaggtctcaggttgatggtggggtgtgtttatagtgatcctgttatatatacagatctgggatctttcgtctttattgtcttacgtttctaattagttgggaggatttattttgctaaacagtttactaacacattacatttcaaaaactattttggtacctttcaaatacagtgtttaaattaaaatagaaaaataagggctcatgacaagtacattatttgattctacttaggatagctttttagcaggatctccttcagaatttttgtcttgactttgaatctttgcctgtttgtctaaacatttgactaacattctgtttgaatttggaagtattctaatacaagatttgaataaagtttatccttaaata

SEQ ID NO: 196211 - DNA, 583 bp, Homo sapiens
  Payload ID: 18706
  Gene Name: tudor domain containing 6
  ENST ID: ENST00000450697
  CDS Start-End: 1-526
ttttgatgaccagcgcaggatgtcattgcatctacatggagcagattgtgatcctaaaacacagaatgaaatgaatatatgtgaagaagaatttgtagagtataaaaacagggatgccatttcggcattgatgcctttgttctctgaggaagaaagcagtgatggaagcaagcacaataatggtttaccagatcatatctcagctcaactacagaacacctacactctgaaagcctttactgttggatctaaatgtgttgtgtggtcaagtctaagaaacacatggtctaaatgtgagattttagaaacagctgaagaaggaacaagggttttgaacctttcaaatggtatggaggagatagtgaaccctgagaatgtctggaatggcatacccaaattggataagagtccacctgaggctgtatcccaaagagtagggaaagatctttacttcatgtcagtgggtgataccactattaaagaaaaggggtttggaggtgatggagatttaaccgtggatctatagctgtggccaatcagtcagaagctgcccttgaacaagtggcatcttacgcagaccaac

SEQ ID NO: 196212 - DNA, 8887 bp, Homo sapiens
  Payload ID: 18706
  Gene Name: tudor domain containing 6
  Uniprot ID: O60522
  ENST ID: ENST00000544460
  CDS Start-End: 255-6455
aggtaaatgcgtgcccggaagcgcgacctcgggcggttggaggggctaccgggtcttaccagtccgtggcgggagtcccggaggaccctcgacgggggagttgccgagaaaaggcctcgccggcattcttcccctccactgggtcctttgaacctagtttggctgggactcgccttcaggcggcgcggaggatttcgaggccctgaggcgcggcccttaatttccggaagtgggggccgcgccgcgccgtcaagatgtgctcgacgcccggaatgccggcgccgggggcctcgctggccctgcgggtgtccttcgtggacgtgcatcccgatgtgatcccggtgcagctgtgggggctggtgggcgagcggcggggcgagtacctgcggctgagccgggaaatccaggaagcggcggccacgcgcggccagtgggcgctgggcagcgcctcggcctcgcccggcgagctgtgcctggtgcaggtcgggcttttgtggcaccgctgccgcgtggtcagccggcaggcacaggagagccgtgtcttcctgctggacgagggccgcaccatcacggccggagcaggctcgctggcgcctgggcgcagagagttcttcaatttgccctcggaagtgctgggctgcgtgctagcgggcctggtgccggcaggctgcggcgcgggctcaggcgagccgccgcagcactggcccgccgacgccgtggacttccttagcaaccttcagggcaaggaggtgcacgggtgcgtcctggacgtgctgctgctccatcgcctggtcctcctggaggtgcctgatgtgttccaacagatgcgggagctgggcctggctcggcgggtgcccgacagcctcttccgttcgctgctggagcgctatctcacagcggccactgctagcgtgggctccggggtcccggttctctcgcgagtcccgctcaagcaaaagcagcctggtctggattacttctatccccagctgcagctgggcgtgacggaggccgtggtcataacccaagtgtgccatccccaccgcattcactgccagctccgcagcgtctcgcaggagatccaccgcctctccgagagcatggcccaggtataccggggttccacggggacaggggatgagaactctaccagtgccacctgggaggagagggaggagagcccagataagccgggctctccgtgtgcatcctgtggcctggatggacattggtacagagcactgttgcttgagacttttcggccccagcgctgtgcccaggtgcttcatgtggactatggaaggaaggagttagtgagttgcagcagccttcggtacttgctgcctgaatattttcgaatgccggtggtgacctacccttgtgctttgtatggactctgggacggtgggagaggctggtctcggtcacaggtcggtgacctgaagacactgatactaggcaaggcagtgaatgcaaagattgaattttattgctcctttgagcatgtgtattatgtcagcctgtatggagaagatgggattaatctgaaccgtgtgtttggagtacagtcgtgttgcttggctgaccgagtccttcagagccaggcaacagaggaggaggaaccagaaacatctcagtctcagtctcctgctgaagaagtagatgaagagatttcactcccagccttaagatctatcaggttaaagatgaatgccttctacgatgcgcaggtagagtttgttaaaaatccttctgagttttggattaggttgaggaaacacaatgtcaccttcagtaagctgatgaggagaatgtgtggtttctattcctctgccagtaagctggatggtgtagttttgaaacctgaacctgatgacctttgctgtgtcaagtggaaagaaaatggttattatagggccatagtcaccaaattggatgacaagagtgtggatgtattcttagttgaccgaggcaattcggaaaatgtggactggtatgacgtaaggatgctgcttcctcagtttaggcagctaccaatattggctgtgaagtgcaccctggctgatatttggcctttgggaaaaacttggagccaggaggcagtttccttttttaaaaagactgtgctccacaaagaattagtcatccatattcttgataaacaggatcatcaatatgttattgagattcttgacgaatcaagaacaggggaagaaaacattagtaaggtaattgcccaagctggatatgccaagtatcaggaatttgaaacaaaggaaaatatcctggtaaatgcccactccccagggcatgtttcaaaccactttactacggagagtaacaaaataccttttgccaagactggagaaggagagcagaaagccaagagagagaataaaaccacatctgtttcaaaagctttgagtgacacaacagttgtaacaaatggttcaactgaactagttgtgcaggaaaaagtgaaaagagcatctgtttattttcctcttatgcagaattgcttggaaattaagccaggctcctctagtaaaggagagctggaagttggaagtacagtagaagtcagagtgtcttatgttgaaaaccctggctatttctggtgtcagctgaccaggaacatacaaggacttaaaactctaatgtctgatattcagtactattgcaaaaatacagctgctcctcaccagagaaacacccttgcttgtttggctaagcgaacagtaaacagacagtggtccagagcacttattagtgggatacagtctgtggagcatgtcaatgtaacatttgtagattatggagacagagaaatggtatctgtgaagaatatttattcaattagtgaagaatttctgaaggttaaggcacaggcttttaggtgcagtctttataatttaattcaaccagttggccagaatccctttgtttgggatgtaaaggcaatacaagctttcaatgaatttatagataatgcatggcaaaaaaatctagaattaaaatgtacaatatttgctctggcttcaattaatgaagaactgtttaacattgtggatttgctaaccccctttcagagtgcatgccatttcttggtagaaaagagacttgcaagaccagtaaaacttcagaagcctttggagtcctctgttcagctacattcctacttctattctacacatgatatgaaaattggaagtgaagaattagtttatataacgcatattgatgacccttggacattttattgccagctggcaagaaatgcaaatattttagaacagttgtcatgtagtattacacaattaagtaaagttttgctgaatttaaaaacatctcccttgaaccctggaaccttgtgccttgccaagtatactgatggaaactggtataggggcatagtaatagagaaagagccaaagaaagtcttctttgttgattttgggaatatttatgtagtaacaagtgatgatctgcttccaatacctagtgatgcatatgatgtcttacttttgcccatgcaagctgtcagatgttcattatctgatattcctgatcatataccagaagaagtggtggtgtggtttcaggagactattttagataagtcattgaaggctttagttgtagcaaaagatccagatggaacactgattatagaactatatggtgacaatattcaaattagtgctagtattaataagaagttggggctacttagttacaaagatagaataagaaaaaaagaaagtgaagtcctctgttctacaactgaaactcttgaagaaaaaaatgagaatatgaagttgccatgtacagagtatttaagtaaatcagtagggtacaagttacctaataaagaaattttggaagagtcatataaacctcagatcaactcatcatacaaggaactcaaacttttacaaagtttaacaaaaacaaacttagtcactcaatatcaagactctgtgggaaataaaaatagtcaagtgtttccattaacaacagaaaagaaagaagaaatttctgctgagacacccttgaaaacagcaagagtagaagctactctttcagagagaaaaataggagattcatgtgacaaagatttgcctctgaaattttgtgagttcccacagaagactataatgcctggatttaaaacaactgtatatgtttctcatataaatgacctttcagacttttatgttcaactaatagaagatgaagctgaaattagtcatctttcagagagattaaacagtgttaaaacaaggcccgaatattatgtaggtccacctttgcaaagaggagatatgatatgtgctgttttcccagaagataatttatggtatcgtgctgtgatcaaggagcaacaacccaatgaccttctctctgtgcagtttatagattatggcaatgtttctgtggttcatactaacaaaataggtaggcttgaccttgttaatgcaatattgccggggttgtgcattcattgctccttgcagggatttgaggttcctgacaataaaaattctaagaaaatgatgcattacttttcccaacggaccagcgaggctgcaataagatgtgaatttgttaaatttcaagacagatgggaagttattcttgctgatgaacatgggatcatagcagatgatatgattagcaggtatgctctcagtgaaaaatctcaagtagaactttctacccaagtaattaaaagtgccagttcaaagtctgttaacaaatcagacattgacacttcagtatttcttaactggtataatccagaaaaaaaaatgataagagcttatgccactgtgatagatggacctgagtacttttggtgtcagtttgctgatacggagaaacttcagtgtttagaagtagaagtacagactgctggagaacaggtagcagacaggagaaattgtatcccatgtccttatattggagatccttgtatagtaagatacagagaagatggacattattatagggcacttatcactaatatttgtgaagattatcttgtatctgtcaggcttgtggactttggaaacattgaagactgtgtggacccaaaagcactctgggccattccttctgaacttctgtcggttcccatgcaagcctttccatgttgcctctcagggtttaacatttcagaaggattatgttctcaagagggaaatgactatttctatgaaataataacagaagatgtgttggaaataacaatactagaaatcagaagggatgtttgtgatatccctttagcaattgttgacttgaaaagcaaaggtaaaagtattaatgagaaaatggagaaatattctaagactggtattaaaagtgctcttccctatgaaaatattgactcagagataaagcagactcttgggtcctacaatcttgatgtaggacttaagaaattaagtaataaagctgtacaaaataaaatatatatggaacaacagacagatgagcttgctgaaataactgaaaaagatgtaaacattattggaaccaaaccaagtaacttccgtgaccctaaaactgataacatttgtgaagggtttgaaaacccctgcaaagataaaattgatactgaggaactggaaggtgaattagagtgccatctggttgacaaagcagagtttgatgataaatacctgattacaggatttaacacattactaccacatgctaatgaaacaaaggagatactagaactgaattcacttgaggtgccgctttctcctgatgatgaatcaaaagaattcttagaactggaatctattgagttacagaattctctggtggtggatgaagaaaaaggggagctaagcccggtgccaccgaatgtgccactctcccaagagtgtgtcacaaaaggcgccatggagctatttacactgcagcttcctctcagctgtgaagctgagaaacagccagaactagaactacctacagcccagctgcctttagatgacaagatggatcctttgtctttaggagttagtcagaaagcacaggaatccatgtgtactgaggacatgagaaagtcaagttgtgtagaatcttttgatgaccagcgcaggatgtcattgcatctacatggagcagattgtgatcctaaaacacagaatgaaatgaatatatgtgaagaagaatttgtagagtataaaaacagggatgccatttcggcattgatgcctttgttctctgaggaagaaagcagtgatggaagcaagcacaataatggtttaccagatcatatctcagctcaactacagaacacctacactctgaaagcctttactgttggatctaaatgtgttgtgtggtcaagtctaagaaacacatggtctaaatgtgagattttagaaacagctgaagaaggaacaaggaaaaggggtttggaggtgatggagatttaaccgtggatctatagctgtggccaatcagtcagaagctgcccttgaacaagtggcatcttacgcagaccaacagagtatttgagaaaattgaaaacatgtaaccacaagaagttgtcattttcaaaaacttctatataggtggaaaacaaattaggtctcaggttgatggtggggtgtgtttatagtgatcctgttatatatacagatctgggatctttcgtctttattgtcttacgtttctaattagttgggaggatttattttgctaaacagtttactaacacattacatttcaaaaactattttggtacctttcaaatacagtgtttaaattaaaatagaaaaataagggctcatgacaagtacattatttgattctacttaggatagctttttagcaggatctccttcagaatttttgtcttgactttgaatctttgcctgtttgtctaaacatttgactaacattctgtttgaatttggaagtattctaatacaagatttgaataaagtttatccttaaataaagtttatccttaatatgatggtctcattttattaaaaaggaaatagaactcttaaatatacttggttccatctctcctctgtaatggaggattggggaaagcatagtaatattaaatgttagctcttatgtattagtcacttagcttatactttaaatgcattttttcactttattcatcaactttgaagtgcatatcaatattatccatattttataggtgagaaaattgaagcttcataaagaggttaaataacttgcctaaggtcagatagctgatgagtctcagaggcttgatcaaacccagacctacctaactttgaagcccatgactttttaaacatgattttgcaaagcatagatcttagcttttagaaacagatctgagctatatgctgcttaacagatatgtgacatgggcaaattatgtaatattttgaactttgatcttcatctgtaaagtggtgataataaaacctttcttgcagtgtttttttaagatgagaaataattgatataaagtccctgaaaaggagtaggcatttgataaatgtgtctttctttaccctgaaaaatactcagtgtgcactatgttaggttatttctttttaaccttaacttattagatattttcaatagttattttctcctttcagcatcagcatgcgccaccaacaaaagactgtaaaaaacaaacaaacaaaaaagtgttgaatgggacatccatacagttggaatgcttatttctaaaatgaatagggaaaaggtttgctaaatgagactggggtaaaggtgtatctctgtgaagcattatcagactctgaagcctaatggaaatagaattatgaaccttaaaaacccattataatttccgtaagtagaagggagagaggtttgcattaaaagtaattgaggtagatgagtatattacttattcctggaataatgaatagacaagtttggcttactcatatagataatataatgtgaattgccagaagcaaagctcagagaagatgcattaggatcagattataggaagccttcaatttcaagctgagtttaactccctattttaaaaaatttaatctgaatggctacagaagtaaaatttctcagaatgagtgactttgcacctgacaccactaagataggactagggtaccaaatgagtggtataaatttttatgtcccctgggaaataaaatcattttccatgattcccatatttataagtataaattcttaagctatatttttacctccatttaatcgtgttattctgttttactactacatatagaattgaaaacattaaataaaattaactggaatatgaagaagctaaatgtaattctgaatgttttattatccttcacagcctttgtgtgagtaactaatgtattctaactggaatccctgctatatgctgtaatacctgtggaacctttctttagcaagtagaatgccttaaagaattaaagaaagtgtcaaaaaattaccaatttaatccactgcctttgcctcatctctaatattcttaacccttctctactccttttagtcatcatttgaaattgtgtagtaccaccaatcctgtgctgaaacaatggcttttgcttgttctaatttttcttaccgtgaccaaaagtcaaagagaagagctgccaaattctacctagaatatcatgttgctataattaaactccactgcccatagtagataataaaaggcaagaaattgttttttactctatgtttagggagtcttgtatcattgcaacaggttttcactgggattttgcctgttttaatctacttgtctgtcaaagtaatgtaaaaacagtttttaacttcgacactgaaaaggaatcatctttaaaattaaaatttaggctgatatgaa

SEQ ID NO: 196213 - DNA, 3834 bp, Homo sapiens
  Payload ID: 18707
  Gene Name: tudor domain containing 7
  Uniprot ID: Q8NHU6
  ENST ID: ENST00000355295
  CDS Start-End: 296-3592
ggcgacggtttcccttcccacgcgcggacgccggcgtgggccgacgcggccggagcgcccgcgcgtgcgcagagccgaggccaggctgccctcgaagcggggcggggcgaagcggggcggggccgagcagggcggggcgggggcttgaggtgattcccaagccgcggggcggctccggtggtgcggggaaaccgaaagtgggcggcggccgcggcggggcccctggcggagacggcggcaggagctgggcccagagacgcggggacgggccgtgggcccccggaacgaggcaaagatgctggaaggagatctggtttcaaagatgctacgagctgttctgcagtctcataagaatggagtagcattaccccggctccaaggagagtacagatccttgactggagactggatccccttcaaacagctaggtttccctacactagaagcctatctgagaagtgtgccagcagtggtcaggatagagactagtagatctggagagattacctgctatgccatggcctgcacagaaactgcaagaattgctcagcttgtggctcgtcaaaggagttctaaaaggaaaaccgggcgtcaagttaattgtcagatgagagtgaagaaaaccatgccattttttctagaaggaaaaccaaaagcaaccctcagacaaccaggatttgcttcaaatttttctgttggcaaaaaacctaatccagcaccgttaagagacaaaggaaactctgttggagttaagcctgatgctgaaatgtctccttatatgctacacacaactcttggaaatgaagcattcaaagacattccagtgcaaaggcatgtgaccatgtccaccaacaacaggtttagcccaaaggcgtcccttcaaccacctttgcagatgcatctctcaagaacctctactaaggaaatgagtgataatttaaatcagactgttgaaaaacccaatgtcaagcctcctgcctcttacacttataaaatggatgaggttcaaaatcgcataaaggaaatactaaacaagcataacaatggcatttggatatctaagcttccacatttttacaaagagttatataaagaagaccttaatcaaggaattttacaacagtttgaacactggcctcatatttgcacggtggagaaaccttgcagtggtggccaagatttacttctttatccagctaagagaaagcagcttttgagaagtgaactggatactgagaaagtacctctatccccactacctggtcccaaacaaacaccaccgttgaaagggtgtccaacagttatggcaggagactttaaagaaaaagtggcagacctgctggtgaaatacacaagtggcctttgggccagtgcacttccgaaagcatttgaggaaatgtacaaagtgaaattccctgaggatgccttaaaaaatcttgcctcactttctgatgtatgcagcatagactacatttctggaaatccccagaaggccattctctatgctaaacttccattgcccactgacaaaatccaaaaggatgcagggcaagcacatggtgataatgatatcaaggctatggttgaacaagagtatttgcaggtagaagaaagcattgctgaaagtgctaatacctttatggaggacataacagttcctcctttaatgattccaactgaagcatcaccatctgtattggtggttgaactgagcaacacaaatgaagtggttatcaggtatgtgggcaaagactattctgctgctcaggaattaatggaagatgagatgaaggaatattacagtaagaatcctaagatcacaccagtccaggctgtgaatgttgggcagttgctggccgtaaatgccgaggaggacgcctggttacgggcacaggtcatctcaacagaagagaacaaaataaaggtatgctatgttgactatggttttagtgaaaatgttgaaaaaagcaaagcatacaaattaaacccgaagttttgttcactctcatttcaagctacaaaatgtaagcttgcaggcttggaagtcctaagcgatgaccctgatctagtgaaggtggttgaatctttaacttgtggaaagatctttgcagtggaaatacttgacaaagctgacattccacttgttgttctgtacgatacctcaggagaagatgatatcaatatcaatgccacctgcttgaaggctatatgtgacaagtcactagaggttcacctgcaggttgacgccatgtacacaaatgtcaaagtaactaatatttgctctgatgggacactctactgccaggtgccttgtaagggtctgaacaagctcagtgaccttctacgtaagatagaggactacttccattgcaagcacatgacctctgagtgctttgtttcattacccttctgtgggaaaatctgcctcttccattgcaaaggaaaatggttacgagtagagatcacaaatgttcacagcagccgggctcttgatgttcagttcctggactctggcactgtgacatctgtaaaagtgtcagagctcagggaaattccacctcggtttctacaagaaatgattgcaataccacctcaggccattaagtgctgtttagcagatcttccacaatctattggcatgtggacaccagatgcagtgctgtggttaagagattctgttttgaattgctcggactgtagcattaaggttacaaaagtggatgaaaccagagggatcgcacatgtttatttatttacccctaagaacttccctgaccctcatcgcagtattaatcgccagattacaaatgcagacttgtggaagcatcagaaggatgtgtttttgagtgccatatccagtggagctgactctcccaacagcaaaaatggcaacatgcccatgtcgggcaacactggagagaatttcagaaagaacctcacagatgtcatcaaaaagtccatggtggaccatacgagcgctttctccacagaggaactgccacctcctgtccacttatcaaagccaggggaacacatggatgtgtatgtgcctgtggcctgtcacccaggctacttcgtcatccagccttggcaggagatacataagttggaagttctgatggaagagatgattctatattacagcgtgtctgaagagcgccacatagcagtggagaaagaccaagtgtatgctgcaaaagtggaaaataagtggcacagggtgcttttaaaaggaatcctgaccaatggactggtatctgtgtatgagctggattatggcaaacacgaattagtcaacataagaaaagtacagcccctagtggacatgttccgaaagctgcccttccaagcagtcacagctcaacttgcaggagtgaagtgcaaccagtggtctgaggaggcttctatggtgtttcgaaatcatgtggagaagaaacctctggtggcactggtgcagacagtcattgaaaatgctaacccttgggaccggaaagtagtggtctacttagtggacacatcgttgccagacaccgatacctggattcatgattttatgtcagagtatctgatagagctttcaaaagttaattaatgactgcctctgaaaccttgacaactaattcagattttttagcaataacaaaatgtagtaggcttaaaaaaaatcttaactctgctacatggctctgactgctgtgggggattgaaaagaatatgcttatgtttgatgaaagatatttaacaagttttgttttaacagagttgacttttcaaagaaaattgtacttgaattattactataatattagaataaaaatgtttatcaatataaaa

SEQ ID NO: 196214 - DNA, 3447 bp, Homo sapiens
  Payload ID: 18708
  Gene Name: tudor domain containing 9
  ENST ID: ENST00000339063
  CDS Start-End: 25-2658
tcacgttttgtgaaggtggtcctgatgtcggctaccatcagctgtaaagagtttgcagactactttgctgttcctgttcaaaacaagatgaatcctgcatatatttttgaagtggaaggcaagccccattcagttgaagagtattatcttaatgatttggagcacattcatcatagcaagctctctcctcatctcctggaggaaccggtgataactaaggatatatatgaagttgctgtctctctcattcagatgtttgatgacttggatatgaaggagagtgggaacaaggcttggtcgggggcccagtttgtgttggagcgaagcagtgtgttggtgtttttgccaggtctgggtgaaataaattatatgcatgaacttctcacaagcctggttcataaaaggttgcaggtctatccactccattcaagtgtggctttagaagaacagaataatgtctttttaagtccagtccctgggtacagaaagattattctgtccaccaatattgcagagagttctgtcacagttccagatgtcaaatatgttatagatttttgtttgactagaactttggtctgtgatgaagatacaaattatcagagtctgcgattgagttgggcttctaaaaccagctgtaatcagagaaaaggccgtgctggacgagtgtctagagggtactgttaccggctggtacacaaggatttctgggacaactccatccctgatcatgttgttcctgagatgttgcgttgtccattaggaagcacgatcttgaaagtgaaattacttgacatgggtgagccgagagctctgctggccactgccctttccccgcctggtctgagtgacattgagcgcaccatccttctactaaaggaggttggagcacttgcagtgagtgggcagagagaagatgaaaacccccatgatggtgaattgaccttcttaggaagagttttagcccaacttcctgtaaatcagcaacttggtaaactcatagtccttggacatgtatttggatgtctagatgaatgtcttattatagcggcagctctttctttgaagaatttttttgcaatgcctttccggcagcatctcgatggatataggaacaaagtgaatttctctggcagtagcaagagtgactgtattgcacttgttgaggcatttaaaacatggaaggcttgcagacagacaggggagctgcggtacccgaaggatgaacttaattggggacggttaaattacattcaaatcaagagaattagagaggtggctgaattatatgaagaattgaagactagaatctcacagttcaacatgcatgttgattctcggcgacctgtcatggaccaagagtatatatataagcagcgattcatcctacaggttgtattggcaggtgctttctatccaaattactttacttttggacagccggatgaggagatggcggtgagggagctggctggcaaggaccccaagacaactgtcgtgttgaaacacattcctccctatggatttctttactataaacaactacagtctctctttagacagtgtggtcaagtcaaatccattgtatttgatggtgcaaaagcctttgtggaattctcacgaaatccaacagagagatttaaaacccttcctgcagtatatatggcaattaagatgtctcaactaaaagtttcacttgaactcagcgttcattctgcagaggaaattgaagggaaggtgcaaggcatgaacgtctcaaagctcaggaacacaagggtgaatgtggacttccagaagcagacggtagatcctatgcaagtctcctttaacacatcagacaggtcccagacagttacagatctccttctaactattgatgtcacagaggtggttgaagtgggacacttttggggatacaggattgatgaaaacaactcagagattctgaaaaagcttactgctgaaatcaaccaactgacgctggtgcccttgcccactcacccacatccagacttggtctgtctggcaccttttgctgattttgataaacaacgctactttagagctcaagtcctttatgtttctggaaattctgctgaggtattctttgtagattatggcaataagtctcatgtagatctacatcttttgatggagattccctgtcaatttcttgaacttcctttccaggctttggaatttaagatttgcaaaatgagaccatcagcaaagtctcttgtttgtggcaagcactggagtgacggggccagccagtggttcgcctctctggtgagcggctgcaccctccttgtgaaggtcttctctgtggtgcacagcgtcctgcacgtggatgtgtaccagtactcaggggtccaggatgccatcaacataagagacgtcctcatccagcagggctatgccgagctcacggaggagtcctacgagtccaagcaaagccatgaagttctcaagggcctcttttccaagtcagtagaaaacatgacagatggctctgtgccctttcccatgaaagacgacgagaaatatctcatccggattttgttagagagcttttctaccaataaactgggtactccaaactgtaaggcagaacttcacgggccttttaacccttatgaactaagtgccatagtttgaccagaatatccaaattcaggtgtgtttggattgagaaggagagcatcaactctgtcattatcagtgacgcccctgaagaccttcaccagagaatgctggttgcagcttccctttccatcaatgcgactggatctacgatgctgctgagagaaacctctctgatgcctcatatccctggcctcccggctctcctcagcatgttattcgcaccggtgatagagttaaggattgatcagaatggcaagtactatactggagtcctttgtggtttggggtggaatccagctacaggggcttccatactgcccgagcacgacatggagcttgcgtttgacgttcaattcagcgtggaggatgtcgtcgaggttaatattctcagggctgctattaacaagctagtctgtgatggaccaaatggatgcaagtgtcttgggccagagagagttgcgcagcttcaagacattgcccgtcagaagcttttaggtttgttctgtcagtcaaaaccaagggagaagattgttcccaagtggcatgaaaagccctacgagtggaatcaggttgatccaaagctggtcatggagcaggccgaccgtgagagcagcagagggaagaacacctttctctaccagctccacaaactggttgtgctcggcacctgagcatgtccacaggtggcctccagcacacccctcaggaagctgtggaggctggattccaggctccctccgcagactgactttcctctgtgtctgggtgttacagtctgtgcccactgcatcctaaaggcct

SEQ ID NO: 196215 - DNA, 4782 bp, Homo sapiens
  Payload ID: 18708
  Gene Name: tudor domain containing 9
  Uniprot ID: Q8NDG6
  ENST ID: ENST00000409874
  CDS Start-End: 49-4197
gccgcggagacccggcagttgggggatgccgacgcctgggccttgaggatgctgcggaagctcaccatcgagcagatcaacgactggttcaccatcggcaagacggtgaccaatgtggagctgctgggcgcgccgcccgccttcccggcaggggcggccagggaggaggtgcagcgccaggacgtggcccccggcgctggtcccgcggcccaggctccggctctggcccaagctccggcccggccggccgctgcgttcgaaaggtcactcagccaaaggagctcagaagtagagtatattaacaaatacagacagctcgaagcacaagagcttgatgtgtgtcgcagtgtccaaccaaccagtgggccaggtccaaggccatctttggctaaattaagcagtgtgacatgcatcccagggacaacttataaatatcctgatttgcctataagtcgatacaaggaagaggttgtgtctttgatagaaagtaattccgtggtgattatccatggggccacgggaagcggtaaaagcactcagctcccgcagtatatcttggaccactacgttcagcgctccgcctactgcagcattgtggtcacccagccccggaagataggggcaagcagcatcgccaggtggatcagtaaagagcgtgcctggaccctgggaggtgtggtgggctaccaggtagggctagagaaaatagcaacagaggacaccaggctaatttatatgacaactggagtcctgcttcagaaaatagttagtgccaagagtttgatggaattcacacatatcatcattgatgaagtacacgaacgaacagaagaaatggatttcctgctattggtagtccgcaaactcttaagaacaaattcacgttttgtgaaggtggtcctgatgtcggctaccatcagctgtaaagagtttgcagactactttgctgttcctgttcaaaacaagatgaatcctgcatatatttttgaagtggaaggcaagccccattcagttgaagagtattatcttaatgatttggagcacattcatcatagcaagctctctcctcatctcctggaggaaccggtgataactaaggatatatatgaagttgctgtctctctcattcagatgtttgatgacttggatatgaaggagagtgggaacaaggcttggtcgggggcccagtttgtgttggagcgaagcagtgtgttggtgtttttgccaggtctgggtgaaataaattatatgcatgaacttctcacaagcctggttcataaaaggttgcaggtctatccactccattcaagtgtggctttagaagaacagaataatgtctttttaagtccagtccctgggtacagaaagattattctgtccaccaatattgcagagagttctgtcacagttccagatgtcaaatatgttatagatttttgtttgactagaactttggtctgtgatgaagatacaaattatcagagtctgcgattgagttgggcttctaaaaccagctgtaatcagagaaaaggccgtgctggacgagtgtctagagggtactgttaccggctggtacacaaggatttctgggacaactccatccctgatcatgttgttcctgagatgttgcgttgtccattaggaagcacgatcttgaaagtgaaattacttgacatgggtgagccgagagctctgctggccactgccctttccccgcctggtctgagtgacattgagcgcaccatccttctactaaaggaggttggagcacttgcagtgagtgggcagagagaagatgaaaacccccatgatggtgaattgaccttcttaggaagagttttagcccaacttcctgtaaatcagcaacttggtaaactcatagtccttggacatgtatttggatgtctagatgaatgtcttattatagcggcagctctttctttgaagaatttttttgcaatgcctttccggcagcatctcgatggatataggaacaaagtgaatttctctggcagtagcaagagtgactgtattgcacttgttgaggcatttaaaacatggaaggcttgcagacagacaggggagctgcggtacccgaaggatgaacttaattggggacggttaaattacattcaaatcaagagaattagagaggtggctgaattatatgaagaattgaagactagaatctcacagttcaacatgcatgttgattctcggcgacctgtcatggaccaagagtatatatataagcagcgattcatcctacaggttgtattggcaggtgctttctatccaaattactttacttttggacagccggatgaggagatggcggtgagggagctggctggcaaggaccccaagacaactgtcgtgttgaaacacattcctccctatggatttctttactataaacaactacagtctctctttagacagtgtggtcaagtcaaatccattgtatttgatggtgcaaaagcctttgtggaattctcacgaaatccaacagagagatttaaaacccttcctgcagtatatatggcaattaagatgtctcaactaaaagtttcacttgaactcagcgttcattctgcagaggaaattgaagggaaggtgcaaggcatgaacgtctcaaagctcaggaacacaagggtgaatgtggacttccagaagcagacggtagatcctatgcaagtctcctttaacacatcagacaggtcccagacagttacagatctccttctaactattgatgtcacagaggtggttgaagtgggacacttttggggatacaggattgatgaaaacaactcagagattctgaaaaagcttactgctgaaatcaaccaactgacgctggtgcccttgcccactcacccacatccagacttggtctgtctggcaccttttgctgattttgataaacaacgctactttagagctcaagtcctttatgtttctggaaattctgctgaggtattctttgtagattatggcaataagtctcatgtagatctacatcttttgatggagattccctgtcaatttcttgaacttcctttccaggctttggaatttaagatttgcaaaatgagaccatcagcaaagtctcttgtttgtggcaagcactggagtgacggggccagccagtggttcgcctctctggtgagcggctgcaccctccttgtgaaggtcttctctgtggtgcacagcgtcctgcacgtggatgtgtaccagtactcaggggtccaggatgccatcaacataagagacgtcctcatccagcagggctatgccgagctcacggaggagtcctacgagtccaagcaaagccatgaagttctcaagggcctcttttccaagtcagtagaaaacatgacagatggctctgtgccctttcccatgaaagacgacgagaaatatctcatccggattttgttagagagcttttctaccaataaactgggtactccaaactgtaaggcagaacttcacgggccttttaacccttatgaactaaagtgccatagtttgaccagaatatccaaattcaggtgtgtttggattgagaaggagagcatcaactctgtcattatcagtgacgcccctgaagaccttcaccagagaatgctggttgcagcttccctttccatcaatgcgactggatctacgatgctgctgagagaaacctctctgatgcctcatatccctggcctcccggctctcctcagcatgttattcgcaccggtgatagagttaaggattgatcagaatggcaagtactatactggagtcctttgtggtttggggtggaatccagctacaggggcttccatactgcccgagcacgacatggagcttgcgtttgacgttcaattcagcgtggaggatgtcgtcgaggttaatattctcagggctgctattaacaagctagtctgtgatggaccaaatggatgcaagtgtcttgggccagagagagttgcgcagcttcaagacattgcccgtcagaagcttttaggtttgttctgtcagtcaaaaccaagggagaagattgttcccaagtggcatgaaaagccctacgagtggaatcaggttgatccaaagctggtcatggagcaggccgaccgtgagagcagcagagggaagaacacctttctctaccagctccacaaactggttgtgctcggcacctgagcatgtccacaggtggcctccagcacacccctcaggaagctgtggaggctggattccaggctccctccgcagactgactttcctctgtgtctgggtgttacagtctgtgcccactgcatcctaaaggccttttctttcttcttttctctttgggtgatagtcagagagtggtgtttttgttcaggtgggaaggattggaaactctagtcttttctagaaacagaaaatcactgtattaaatattttggaaagattgttctgaaagaagtctgtttggataaagagctgtattttgctttaaatttattaaggtaaatataagtagttaatcttagatgtaaggttccagaatgtgcttacatattctgttctgttacagtgatttaaaccagtagtataggaaaaaacttaaaaaaacaaaaaaaccatgtagtattttctgatttttttttccatgagggaaaatatctaatttttataagactaagttgagttatacttcttggttcacattttggaaatcagagattacagattacatggccatagcttatctgtgttaaaacaataaaagcattaaatgaa

SEQ ID NO: 196216 - DNA, 3338 bp, Homo sapiens
  Payload ID: 18708
  Gene Name: tudor domain containing 9
  ENST ID: ENST00000557332
  CDS Start-End: 1-2755
aagaacaaattcacgttttgtgaaggtggtcctgatgtcggctaccatcagctgtaaagagtttgcagactactttgctgttcctgttcaaaacaagatgaatcctgcatatatttttgaagtggaaggcaagccccattcagttgaagagtattatcttaatgatttggagcacattcatcatagcaagctctctcctcatctcctggaggaaccggtgataactaaggatatatatgaagttgctgtctctctcattcagatgtttgatgacttggatatgaaggagagtgggaacaaggcttggtcgggggcccagtttgtgttggagcgaagcagtgtgttggtgtttttgccaggtctgggtgaaataaattatatgcatgaacttctcacaagcctggttcataaaaggttgcaggtctatccactccattcaagtgtggctttagaagaacagaataatgtctttttaagtccagtccctgggtacagaaagattattctgtccaccaatattgcagagagttctgtcacagttccagatgtcaaatatgttatagatttttgtttgactagaactttggtctgtgatgaagatacaaattatcagagtctgcgattgagttgggcttctaaaaccagctgtaatcagagaaaaggccgtgctggacgagtgtctagagggtactgttaccggctggtacacaaggatttctgggacaactccatccctgatcatgttgttcctgagatgttgcgttgtccattaggaagcacgatcttgaaagtgaaattacttgacatgggtgagccgagagctctgctggccactgccctttccccgcctggtctgagtgacattgagcgcaccatccttctactaaaggaggttggagcacttgcagtgagtgggcagagagaagatgaaaacccccatgatggtgaattgaccttcttaggaagagttttagcccaacttcctgtaaatcagcaacttggtaaactcatagtccttggacatgtatttggatgtctagatgaatgtcttattatagcggcagctctttctttgaagaatttttttgcaatgcctttccggcagcatctcgatggatataggaacaaagtgaatttctctggcagtagcaagagtgactgtattgcacttgttgaggcatttaaaacatggaaggcttgcagacagacaggggagctgcggtacccgaaggatgaacttaattggggacggttaaattacattcaaatcaagagaattagagaggtggctgaattatatgaagaattgaagactagaatctcacagttcaacatgcatgttgattctcggcgacctgtcatggaccaagagtatatatataagcagcgattcatcctacaggttgtattggcaggtgctttctatccaaattactttacttttggacagccggatgaggagatggcggtgagggagctggctggcaaggaccccaagacaactgtcgtgttgaaacacattcctccctatggatttctttactataaacaactacagtctctctttagacagtgtggtcaagtcaaatccattgtatttgatggtgcaaaagcctttgtggaattctcacgaaatccaacagagagatttaaaacccttcctgcagtatatatggcaattaagatgtctcaactaaaagtttcacttgaactcagcgttcattctgcagaggaaattgaagggaaggtgcaaggcatgaacgtctcaaagctcaggaacacaagggtgaatgtggacttccagaagcagacggtagatcctatgcaagtctcctttaacacatcagacaggtcccagacagttacagatctccttctaactattgatgtcacagaggtggttgaagtgggacacttttggggatacaggattgatgaaaacaactcagagattctgaaaaagcttactgctgaaatcaaccaactgacgctggtgcccttgcccactcacccacatccagacttggtctgtctggcaccttttgctgattttgataaacaacgctactttagagctcaagtcctttatgtttctggaaattctgctgaggtattctttgtagattatggcaataagtctcatgtagatctacatcttttgatggagattccctgtcaatttcttgaacttcctttccaggctttggaatttaagatttgcaaaatgagaccatcagcaaagtctcttgtttgtggcaagcactggagtgacggggccagccagtggttcgcctctctggtgagcggctgcaccctccttgtgaaggtcttctctgtggtgcacagcgtcctgcacgtggatgtgtaccagtactcaggggtccaggatgccatcaacataagagacgtcctcatccagcagggctatgccgagctcacggaggagtcctacgagtccaaggttaatattctcagggctgctattaacaagctagtctgtgatggaccaaatggatgcaagtgtcttgggccagagagagttgcgcagcttcaagacattgcccgtcagaagcttttaggtttgttctgtcagtcaaaaccaagggagaagattgttcccaagtggcatgaaaagccctacgagtggaatcaggttgatccaaagctggtcatggagcaggccgaccgtgagagcagcagagggaagaacacctttctctaccagctccacaaactggttgtgctcggcacctgagcatgtccacaggtggcctccagcacacccctcaggaagctgtggaggctggattccaggctccctccgcagactgactttcctctgtgtctgggtgttacagtctgtgcccactgcatcctaaaggccttttctttcttcttttctctttgggtgatagtcagagagtggtgtttttgttcaggtgggaaggattggaaactctagtcttttctagaaacagaaaatcactgtattaaatattttggaaagattgttctgaaagaagtctgtttggataaagagctgtattttgctttaaatttattaaggtaaatataagtagttaatcttagatgtaaggttccagaatgtgcttacatattctgttctgttacagtgatttaaaccagtagtataggaaaaaacttaaaaaaacaaaaaaaccatgtagtattttctgatttttttttccatgagggaaaatatctaatttttataagactaagttgagttatacttcttggttcacattttggaaatcagagattacagattacatggccatagcttatctgtgttaaaacaataaaagcattaaatg

SEQ ID NO: 196217 - DNA, 2107 bp, Homo sapiens
  Payload ID: 18709
  Gene Name: tuftelin 1
  ENST ID: ENST00000353024
  CDS Start-End: 45-644
agcggggtggacaagtggcgtgtgtgctgcgaccccgagggaagatgaacgggacgcggaactggtgtaccctggtggacgtgcacccagaggaccaggcggcggcgggcaggaagacctatgccatggtgtccagccactcagctggtcattctctggcttcagaactggtggagtcccatgatggacatgaggagatcattaaggtgtacttgaaggggaggtctggagacaagatgattcacgagaagaatattaaccagctgaagagtgaggtccagtacatccaggaggccaggaactgcctacagaagctccgggaggatataagtagcaagcttgacaggaacctaggagattctctccatcgacaggagatacaggtggtgctagaaaagccaaatggctttagtcagagtcccacagccctgtacagcagcccacctgaggtggacacctgtataaatgaggatgttgagagcttgaggaagacggtgcaggacttgctggccaagcttcaggaggccaagcggcaacaccagtcagactgtgtggcttttgaggtcacactcagccggtaccagagggaagcagaacaaagtaatgtggcccttcagagagaggaggacagatgtccagagtgattggagaatgtcctgggggaatgaagttccttccacaaacacagctcagttcttagcaacaaactgtttgtttttctacttgctccatctgcagcctacgctgccctggcctcctgcagacagatagtggggttacctggcaaggcctggtgagagccagtgaacctaagctttgactgggtggccttgtctttctggggaggagggaatgtacattcagggagtagccttttgcggaaaaattctctagggctacagacagtcatgtgtgacttctctctgctgtgaaaactcccagagtctctttagggattttccctaaggtgtaccaccaggcacacctcagtcttcttgacccagagcctgaaaactgttttcactgggttccaccagtcccagcaaaatcctctttgtatttattttgctaagttattggtggttttgcttacatctcatgattgatataataccaaagttctatagccttctcttgcagtatttggatttgcttgaaaccgggaaaactgttcccattaggcttgttaatgtcagagtgacactattatgaatctttctctccctttcctctgcctgtttcttctctctttctccttcaaacttgctctgcagctaaggaaggtgagtctactttccctgaggctttggggtcagagtatatgttgtttggagaaagagggcaatcaggactcttctgggacccagatgagttcttcactagcccttctgaaccccttgctccataattggtcttttatcctggctctgaatgaccctgcaggtcatcatggttttctttttttattgtttttttttttttctgagacagagtctcactctgtcacccaggctggagtgcagtggcgcgatctcagctcactgcaacctctgcctcccggatttaagcgattcttctgcctcagcctcccgagtagctgggactacaggtgtgccaccacgcctggctgatttttgtatttttagtagagatggggtttcaccatactggctaggctggtctcgaattcctgacctcaggtgatccacccacctcggcttcccaaagtgctaggattataggcttgagctactgcgcccggcccatggtgtttttctttagggctcttcctacaaccttgagaagtagataggcatcagagtatggtactataggaatcagaaaaattcaaaacaaatgtggattaagtgtttaggctctatgtggctcacgcagccagaatccttaagtctgtgtgtttctgtgtctcaagactgggctcacattctggctttgtccataacaatgctctgggatttcagggagttccctcatttgtaaaatgagggggtcagagcaggtgatatccatgtttcttccctttctgatattgttgtctgtggcatattctttgtatggcgaatttaataaattatattaatgtgtc

SEQ ID NO: 196218 - DNA, 3033 bp, Homo sapiens
  Payload ID: 18709
  Gene Name: tuftelin 1
  Uniprot ID: Q9NNX1
  ENST ID: ENST00000368848
  CDS Start-End: 60-1157
cagttggagccagacagcggggtggacaagtggcgtgtgtgctgcgaccccgagggaagatgaacgggacgcggaactggtgtaccctggtggacgtgcacccagaggaccaggcggcggcgggcaggaagacctatgccatggtgtccagccactcagctggtcattctctggcttcagaactggtggagtcccatgatggacatgaggagatcattaaggtgtacttgaaggggaggtctggagacaagatgattcacgagaagaatattaaccagctgaagagtgaggtccagtacatccaggaggccaggaactgcctacagaagctccgggaggatataagtagcaagcttgacaggaacctaggagattctctccatcgacaggagatacaggtggtgctagaaaagccaaatggctttagtcagagtcccacagccctgtacagcagcccacctgaggtggacacctgtataaatgaggatgttgagagcttgaggaagacggtgcaggacttgctggccaagcttcaggaggccaagcggcaacaccagtcagactgtgtggcttttgaggtcacactcagccggtaccagagggaagcagaacaaagtaatgtggcccttcagagagaggaggacagagtggagcagaaagaggcagaagtcggagagctgcagaggcgcttgctagggatggagacggagcatcaggccttactggcgaaagtgagggaaggggaggtggccctagaggaacttcggagcaacaatgctgactgccaagcagaacgagaaaaggctgctaccctggaaaaggaagtggccgggttgcgggagaagatccaccacttggatgacatgctcaagagccagcagcggaaagtccggcaaatgatagagcagctccagaattcaaaagctgtgatccagtcaaaggacgccaccatccaggagctcaaggagaaaatcgcctatctggaggcagagaatttagagatgcatgaccggatggaacacctgatagaaaaacaaatcagtcatggcaacttcagcacccaggcccgggccaagacagagaacccgggcagtattaggatatccaagccgcctagcccgaagcccatgcctgtcatccgagtggtggaaacctgagctgcctggagatggttgctgccattgctgctgcctctgcctcggagaagcccactgcccctgttggctgttaacactgcctttgacttcctgactgtcccctggctgcacccaggacttcgggctcctgtgtctcaccattcccaagcccctggccactctaagctgggcagacggagcacgagcacctattcaaggcactgcagccctttggaagacattgtcctgcaagcaggagccagggcaatatctatattcctacagtgactatttttctctgtagagagcctcccttctgttgtagactggactctggctgtgccataagccaggccttcatcagattgggagaggtgacaagatttgcctcagccctaaaagctggagacacagatgtccagagtgattggagaatgtcctgggggaatgaagttccttccacaaacacagctcagttcttagcaacaaactgtttgtttttctacttgctccatctgcagcctacgctgccctggcctcctgcagacagatagtggggttacctggcaaggcctggtgagagccagtgaacctaagctttgactgggtggccttgtctttctggggaggagggaatgtacattcagggagtagccttttgcggaaaaattctctagggctacagacagtcatgtgtgacttctctctgctgtgaaaactcccagagtctctttagggattttccctaaggtgtaccaccaggcacacctcagtcttcttgacccagagcctgaaaactgttttcactgggttccaccagtcccagcaaaatcctctttgtatttattttgctaagttattggtggttttgcttacatctcatgattgatataataccaaagttctatagccttctcttgcagtatttggatttgcttgaaaccgggaaaactgttcccattaggcttgttaatgtcagagtgacactattatgaatctttctctccctttcctctgcctgtttcttctctctttctccttcaaacttgctctgcagctaaggaaggtgagtctactttccctgaggctttggggtcagagtatatgttgtttggagaaagagggcaatcaggactcttctgggacccagatgagttcttcactagcccttctgaaccccttgctccataattggtcttttatcctggctctgaatgaccctgcaggtcatcatggttttctttttttattgtttttttttttttctgagacagagtctcactctgtcacccaggctggagtgcagtggcgcgatctcagctcactgcaacctctgcctcccggatttaagcgattcttctgcctcagcctcccgagtagctgggactacaggtgtgccaccacgcctggctgatttttgtatttttagtagagatggggtttcaccatactggctaggctggtctcgaattcctgacctcaggtgatccacccacctcggcttcccaaagtgctaggattataggcttgagctactgcgcccggcccatggtgtttttctttagggctcttcctacaaccttgagaagtagataggcatcagagtatggtactataggaatcagaaaaattcaaaacaaatgtggattaagtgtttaggctctatgtggctcacgcagccagaatccttaagtctgtgtgtttctgtgtctcaagactgggctcacattctggctttgtccataacaatgctctgggatttcagggagttccctcatttgtaaaatgagggggtcagagcaggtgatatccatgtttcttccctttctgatattgttgtctgtggcatattctttgtatggcgaatttaataaattatattaatgtgtctctttga

SEQ ID NO: 196219 - DNA, 3111 bp, Homo sapiens
  Payload ID: 18709
  Gene Name: tuftelin 1
  Uniprot ID: Q9NNX1
  ENST ID: ENST00000368849
  CDS Start-End: 63-1235
gcccagttggagccagacagcggggtggacaagtggcgtgtgtgctgcgaccccgagggaagatgaacgggacgcggaactggtgtaccctggtggacgtgcacccagaggaccaggcggcgggcagcgtggacattctcaggctgactctccagggtgaactgacaggagatgaacttgaacacatagcccagaaggcgggcaggaagacctatgccatggtgtccagccactcagctggtcattctctggcttcagaactggtggagtcccatgatggacatgaggagatcattaaggtgtacttgaaggggaggtctggagacaagatgattcacgagaagaatattaaccagctgaagagtgaggtccagtacatccaggaggccaggaactgcctacagaagctccgggaggatataagtagcaagcttgacaggaacctaggagattctctccatcgacaggagatacaggtggtgctagaaaagccaaatggctttagtcagagtcccacagccctgtacagcagcccacctgaggtggacacctgtataaatgaggatgttgagagcttgaggaagacggtgcaggacttgctggccaagcttcaggaggccaagcggcaacaccagtcagactgtgtggcttttgaggtcacactcagccggtaccagagggaagcagaacaaagtaatgtggcccttcagagagaggaggacagagtggagcagaaagaggcagaagtcggagagctgcagaggcgcttgctagggatggagacggagcatcaggccttactggcgaaagtgagggaaggggaggtggccctagaggaacttcggagcaacaatgctgactgccaagcagaacgagaaaaggctgctaccctggaaaaggaagtggccgggttgcgggagaagatccaccacttggatgacatgctcaagagccagcagcggaaagtccggcaaatgatagagcagctccagaattcaaaagctgtgatccagtcaaaggacgccaccatccaggagctcaaggagaaaatcgcctatctggaggcagagaatttagagatgcatgaccggatggaacacctgatagaaaaacaaatcagtcatggcaacttcagcacccaggcccgggccaagacagagaacccgggcagtattaggatatccaagccgcctagcccgaagcccatgcctgtcatccgagtggtggaaacctgagctgcctggagatggttgctgccattgctgctgcctctgcctcggagaagcccactgcccctgttggctgttaacactgcctttgacttcctgactgtcccctggctgcacccaggacttcgggctcctgtgtctcaccattcccaagcccctggccactctaagctgggcagacggagcacgagcacctattcaaggcactgcagccctttggaagacattgtcctgcaagcaggagccagggcaatatctatattcctacagtgactatttttctctgtagagagcctcccttctgttgtagactggactctggctgtgccataagccaggccttcatcagattgggagaggtgacaagatttgcctcagccctaaaagctggagacacagatgtccagagtgattggagaatgtcctgggggaatgaagttccttccacaaacacagctcagttcttagcaacaaactgtttgtttttctacttgctccatctgcagcctacgctgccctggcctcctgcagacagatagtggggttacctggcaaggcctggtgagagccagtgaacctaagctttgactgggtggccttgtctttctggggaggagggaatgtacattcagggagtagccttttgcggaaaaattctctagggctacagacagtcatgtgtgacttctctctgctgtgaaaactcccagagtctctttagggattttccctaaggtgtaccaccaggcacacctcagtcttcttgacccagagcctgaaaactgttttcactgggttccaccagtcccagcaaaatcctctttgtatttattttgctaagttattggtggttttgcttacatctcatgattgatataataccaaagttctatagccttctcttgcagtatttggatttgcttgaaaccgggaaaactgttcccattaggcttgttaatgtcagagtgacactattatgaatctttctctccctttcctctgcctgtttcttctctctttctccttcaaacttgctctgcagctaaggaaggtgagtctactttccctgaggctttggggtcagagtatatgttgtttggagaaagagggcaatcaggactcttctgggacccagatgagttcttcactagcccttctgaaccccttgctccataattggtcttttatcctggctctgaatgaccctgcaggtcatcatggttttctttttttattgtttttttttttttctgagacagagtctcactctgtcacccaggctggagtgcagtggcgcgatctcagctcactgcaacctctgcctcccggatttaagcgattcttctgcctcagcctcccgagtagctgggactacaggtgtgccaccacgcctggctgatttttgtatttttagtagagatggggtttcaccatactggctaggctggtctcgaattcctgacctcaggtgatccacccacctcggcttcccaaagtgctaggattataggcttgagctactgcgcccggcccatggtgtttttctttagggctcttcctacaaccttgagaagtagataggcatcagagtatggtactataggaatcagaaaaattcaaaacaaatgtggattaagtgtttaggctctatgtggctcacgcagccagaatccttaagtctgtgtgtttctgtgtctcaagactgggctcacattctggctttgtccataacaatgctctgggatttcagggagttccctcatttgtaaaatgagggggtcagagcaggtgatatccatgtttcttccctttctgatattgttgtctgtggcatattctttgtatggcgaatttaataaattatattaatgtgtctctttga

SEQ ID NO: 196220 - DNA, 2946 bp, Homo sapiens
  Payload ID: 18709
  Gene Name: tuftelin 1
  ENST ID: ENST00000392712
  CDS Start-End: 63-1070
gcccagttggagccagacagcggggtggacaagtggcgtgtgtgctgcgaccccgagggaagatgaacgggacgcggaactggtgtaccctggtggacgtgcacccagaggaccaggcggcggcgggcaggaagacctatgccatggtgtccagccactcagctggtcattctctggcttcagaactggtggagtcccatgatggacatgaggagatcattaaggtgtacttgaaggggaggtctggagacaagatgattcacgagaagaatattaaccagctgaagagtgaggtccagtacatccaggaggtggtgctagaaaagccaaatggctttagtcagagtcccacagccctgtacagcagcccacctgaggtggacacctgtataaatgaggatgttgagagcttgaggaagacggtgcaggacttgctggccaagcttcaggaggccaagcggcaacaccagtcagactgtgtggcttttgaggtcacactcagccggtaccagagggaagcagaacaaagtaatgtggcccttcagagagaggaggacagagtggagcagaaagaggcagaagtcggagagctgcagaggcgcttgctagggatggagacggagcatcaggccttactggcgaaagtgagggaaggggaggtggccctagaggaacttcggagcaacaatgctgactgccaagcagaacgagaaaaggctgctaccctggaaaaggaagtggccgggttgcgggagaagatccaccacttggatgacatgctcaagagccagcagcggaaagtccggcaaatgatagagcagctccagaattcaaaagctgtgatccagtcaaaggacgccaccatccaggagctcaaggagaaaatcgcctatctggaggcagagaatttagagatgcatgaccggatggaacacctgatagaaaaacaaatcagtcatggcaacttcagcacccaggcccgggccaagacagagaacccgggcagtattaggatatccaagccgcctagcccgaagcccatgcctgtcatccgagtggtggaaacctgagctgcctggagatggttgctgccattgctgctgcctctgcctcggagaagcccactgcccctgttggctgttaacactgcctttgacttcctgactgtcccctggctgcacccaggacttcgggctcctgtgtctcaccattcccaagcccctggccactctaagctgggcagacggagcacgagcacctattcaaggcactgcagccctttggaagacattgtcctgcaagcaggagccagggcaatatctatattcctacagtgactatttttctctgtagagagcctcccttctgttgtagactggactctggctgtgccataagccaggccttcatcagattgggagaggtgacaagatttgcctcagccctaaaagctggagacacagatgtccagagtgattggagaatgtcctgggggaatgaagttccttccacaaacacagctcagttcttagcaacaaactgtttgtttttctacttgctccatctgcagcctacgctgccctggcctcctgcagacagatagtggggttacctggcaaggcctggtgagagccagtgaacctaagctttgactgggtggccttgtctttctggggaggagggaatgtacattcagggagtagccttttgcggaaaaattctctagggctacagacagtcatgtgtgacttctctctgctgtgaaaactcccagagtctctttagggattttccctaaggtgtaccaccaggcacacctcagtcttcttgacccagagcctgaaaactgttttcactgggttccaccagtcccagcaaaatcctctttgtatttattttgctaagttattggtggttttgcttacatctcatgattgatataataccaaagttctatagccttctcttgcagtatttggatttgcttgaaaccgggaaaactgttcccattaggcttgttaatgtcagagtgacactattatgaatctttctctccctttcctctgcctgtttcttctctctttctccttcaaacttgctctgcagctaaggaaggtgagtctactttccctgaggctttggggtcagagtatatgttgtttggagaaagagggcaatcaggactcttctgggacccagatgagttcttcactagcccttctgaaccccttgctccataattggtcttttatcctggctctgaatgaccctgcaggtcatcatggttttctttttttattgtttttttttttttctgagacagagtctcactctgtcacccaggctggagtgcagtggcgcgatctcagctcactgcaacctctgcctcccggatttaagcgattcttctgcctcagcctcccgagtagctgggactacaggtgtgccaccacgcctggctgatttttgtatttttagtagagatggggtttcaccatactggctaggctggtctcgaattcctgacctcaggtgatccacccacctcggcttcccaaagtgctaggattataggcttgagctactgcgcccggcccatggtgtttttctttagggctcttcctacaaccttgagaagtagataggcatcagagtatggtactataggaatcagaaaaattcaaaacaaatgtggattaagtgtttaggctctatgtggctcacgcagccagaatccttaagtctgtgtgtttctgtgtctcaagactgggctcacattctggctttgtccataacaatgctctgggatttcagggagttccctcatttgtaaaatgagggggtcagagcaggtgatatccatgtttcttccctttctgatattgttgtctgtggcatattctttgtatggcgaatttaataaattatattaatgtgtctctttga

SEQ ID NO: 196221 - DNA, 2974 bp, Homo sapiens
  Payload ID: 18710
  Gene Name: tuftelin interacting protein 11
  Uniprot ID: Q9UBB9
  ENST ID: ENST00000407431
  CDS Start-End: 375-2888
acaaggggactcagcgccagtgagagtagggacgaaggctcagggaaggcgagcttcggtccaagccgttggggtgtggggaggggaatccatttcgtagacagctctgccgaggcacggagaggggcggtgctgcttggggtcaactgggatttagggcttggattcatttaagaacctgagcttccttcaccaaacctagacagcaagagagagacaagcccgaggcctgacttctagcactcctgagtttgagccctatgagcagtggaacctagggaccaccaaggatccagatataattctttcctcagtaatagaaaaaagaatctgggatctaagaagatacctactcattttctaagtgactggccatgtcattgtcccacttataccgggatggggaaggccgcattgatgatgatgatgacgagcgggagaactttgagatcactgactgggatctccagaatgagttcaaccccaaccgacagcgccactggcagaccaaggaagaagccacctacggggtgtgggcagagcgagactcggatgatgagaggcccagctttggaggcaaacgggcccgtgactactctgcgccagtcaacttcatcagcgcagggctcaagaaaggggcagcggaggaggcagagttggaagattctgatgacgaagagaaacctgttaagcaggacgactttcctaaggattttggaccaaggaagctaaaaacgggtggcaattttaagcccagccagaaaggttttgcaggaggaaccaaatctttcatggacttcggcagctgggaaagacacacaaaaggaattggacagaagcttcttcagaagatgggctacgtccctggacggggcctcgggaagaatgcacaaggtatcattaacccaattgaagccaagcagagaaagggaaaaggtgctgtgggggcttatggatccgagcgcaccactcagtccatgcaagacttccctgtggttgactcagaggaagaagctgaagaggagtttcagaaggagctgagccagtggaggaaagacccaagtggaagcaagaagaagcccaaatactcttacaagaccgtggaagagttgaaggccaagggcaggattagcaagaagctcactgctccccagaaggaactttctcaagtcaaggtcatagacatgacaggccgggagcagaaggtctactacagctacagtcagatcagccacaagcacaacgttcccgatgatgggctgccgctacagtcccaacagctgccacagtctggcaaagaggccaaggcccccggcttcgcgctgcccgagctggagcacaacctgcagctgctcatcgacctcacggagcaggagatcatccagaatgaccggcagctacagtatgagcgggacatggtggtcaacctcttccacgagctggagaagatgaccgaggtcctggaccacgaggagcgggtcatctcgaacctcagcaaggtcctggagatggtggaggagtgcgagcggcggatgcagcccgactgcagcaaccccctcaccctggacgagtgtgcccgcatcttcgaaaccctgcaggacaagtactatgaggagtacaggatgtccgaccgtgtggaccttgctgtggccatcgtctatccactcatgaaggagtacttcaaggagtgggatcccctcaaagactgcacttatggcaccgagatcatctctaagtggaaaagcctcctagagaatgaccagctcttgtcccatggcggacaggacctctcagcagatgcctttcacaggttgatatgggaagtctggatgccttttgttcgaaatattgtcacccagtggcagccaaggaactgtgacccgatggtggactttttggatagttgggtgcacattattcctgtgtggatcttagataacatactggaccaactcatcttccccaagctgcaaaaggaggtggaaaactggaacccgctcacagacactgttcccatccactcttggatccacccatggctgccccttatgcaggcacggctggagccactctattcccccatccgtagtaagctgtccagcgccctgcagaagtggcaccccagcgactcctctgccaagctcatcctccagccctggaaggatgtcttcactcctggctcctgggaagcattcatggtcaaaaacatagtgcccaagctggggatgtgtcttggtgagctagtcattaacccccaccagcagcacatggatgcattctattgggtgattgactgggaagggatgatctctgtctctagcctggtgggacttcttgaaaagcacttcttccccaagtggcttcaggtgctgtgctcttggctcagtaacagcccaaattatgaggagatcaccaagtggtacctgggttggaagtcgatgttctcagaccaagtgctggcacatccatctgtcaaggacaaatttaatgaggcacttgatatcatgaaccgggcggtgtcctccaacgttggtgcctacatgcagccaggagcacgggagaacattgcctatctcacccacacggagcggaggaaggacttccagtacgaggccatgcaggagaggcgggaggctgagaacatggctcagaggggcattggcgtggccgctagctctgtgcccatgaactttaaggacctcattgagaccaaggctgaggagcacaacattgtcttcatgcccgtcattgggaagcgacacgaagggaagcagctctacacctttggccgcattgtgatctacatcgaccggggagtggtctttgtccagggcgagaagacgtgggtgcccacctcactgcagagcctgatcgacatggccaagtgaactgtggcaggtccagaaccagtcagagacttgcccctaagagggatgtactgtaaataaacagtatttttagatcaccttcaaaa

SEQ ID NO: 196222 - DNA, 2896 bp, Homo sapiens
  Payload ID: 18710
  Gene Name: tuftelin interacting protein 11
  Uniprot ID: Q9UBB9
  ENST ID: ENST00000405938
  CDS Start-End: 356-2869
gtcatttccggcgcgccggccacggtgcttccgggttctggtgtaggagcggcgtcttctcgcgcggatggtgaagctgaatttggtacgctggaccctcggacagacagcaagagagagacaagcccgaggcctgacttctagcactcctgagtttgagccctatgagcagtggaacctaggttcttcagctttggaacttgactggctctccttgctcctcagcctgcagacagcctattgtgggaccttttgatcgtgaccaccaaggatccagatataattctttcctcagtaatagaaaaaagaatctgggatctaagaagatacctactcattttctaagtgactggccatgtcattgtcccacttataccgggatggggaaggccgcattgatgatgatgatgacgagcgggagaactttgagatcactgactgggatctccagaatgagttcaaccccaaccgacagcgccactggcagaccaaggaagaagccacctacggggtgtgggcagagcgagactcggatgatgagaggcccagctttggaggcaaacgggcccgtgactactctgcgccagtcaacttcatcagcgcagggctcaagaaaggggcagcggaggaggcagagttggaagattctgatgacgaagagaaacctgttaagcaggacgactttcctaaggattttggaccaaggaagctaaaaacgggtggcaattttaagcccagccagaaaggttttgcaggaggaaccaaatctttcatggacttcggcagctgggaaagacacacaaaaggaattggacagaagcttcttcagaagatgggctacgtccctggacggggcctcgggaagaatgcacaaggtatcattaacccaattgaagccaagcagagaaagggaaaaggtgctgtgggggcttatggatccgagcgcaccactcagtccatgcaagacttccctgtggttgactcagaggaagaagctgaagaggagtttcagaaggagctgagccagtggaggaaagacccaagtggaagcaagaagaagcccaaatactcttacaagaccgtggaagagttgaaggccaagggcaggattagcaagaagctcactgctccccagaaggaactttctcaagtcaaggtcatagacatgacaggccgggagcagaaggtctactacagctacagtcagatcagccacaagcacaacgttcccgatgatgggctgccgctacagtcccaacagctgccacagtctggcaaagaggccaaggcccccggcttcgcgctgcccgagctggagcacaacctgcagctgctcatcgacctcacggagcaggagatcatccagaatgaccggcagctacagtatgagcgggacatggtggtcaacctcttccacgagctggagaagatgaccgaggtcctggaccacgaggagcgggtcatctcgaacctcagcaaggtcctggagatggtggaggagtgcgagcggcggatgcagcccgactgcagcaaccccctcaccctggacgagtgtgcccgcatcttcgaaaccctgcaggacaagtactatgaggagtacaggatgtccgaccgtgtggaccttgctgtggccatcgtctatccactcatgaaggagtacttcaaggagtgggatcccctcaaagactgcacttatggcaccgagatcatctctaagtggaaaagcctcctagagaatgaccagctcttgtcccatggcggacaggacctctcagcagatgcctttcacaggttgatatgggaagtctggatgccttttgttcgaaatattgtcacccagtggcagccaaggaactgtgacccgatggtggactttttggatagttgggtgcacattattcctgtgtggatcttagataacatactggaccaactcatcttccccaagctgcaaaaggaggtggaaaactggaacccgctcacagacactgttcccatccactcttggatccacccatggctgccccttatgcaggcacggctggagccactctattcccccatccgtagtaagctgtccagcgccctgcagaagtggcaccccagcgactcctctgccaagctcatcctccagccctggaaggatgtcttcactcctggctcctgggaagcattcatggtcaaaaacatagtgcccaagctggggatgtgtcttggtgagctagtcattaacccccaccagcagcacatggatgcattctattgggtgattgactgggaagggatgatctctgtctctagcctggtgggacttcttgaaaagcacttcttccccaagtggcttcaggtgctgtgctcttggctcagtaacagcccaaattatgaggagatcaccaagtggtacctgggttggaagtcgatgttctcagaccaagtgctggcacatccatctgtcaaggacaaatttaatgaggcacttgatatcatgaaccgggcggtgtcctccaacgttggtgcctacatgcagccaggagcacgggagaacattgcctatctcacccacacggagcggaggaaggacttccagtacgaggccatgcaggagaggcgggaggctgagaacatggctcagaggggcattggcgtggccgctagctctgtgcccatgaactttaaggacctcattgagaccaaggctgaggagcacaacattgtcttcatgcccgtcattgggaagcgacacgaagggaagcagctctacacctttggccgcattgtgatctacatcgaccggggagtggtctttgtccagggcgagaagacgtgggtgcccacctcactgcagagcctgatcgacatggccaagtgaactgtggcaggtccagaaccagtcaga

SEQ ID NO: 196223 - DNA, 3586 bp, Homo sapiens
  Payload ID: 18710
  Gene Name: tuftelin interacting protein 11
  Uniprot ID: Q9UBB9
  ENST ID: ENST00000407690
  CDS Start-End: 285-2798
actaacgtcatttccggcgcgccggccacggtgcttccgggttctggtgtaggagcggcgtcttctcgcgcggatggtgaagctgaatttggtacgctggaccctcggacagacagcaagagagagacaagcccgaggcctgacttctagcactcctgagtttgagccctatgagcagtggaacctagggaccaccaaggatccagatataattctttcctcagtaatagaaaaaagaatctgggatctaagaagatacctactcattttctaagtgactggccatgtcattgtcccacttataccgggatggggaaggccgcattgatgatgatgatgacgagcgggagaactttgagatcactgactgggatctccagaatgagttcaaccccaaccgacagcgccactggcagaccaaggaagaagccacctacggggtgtgggcagagcgagactcggatgatgagaggcccagctttggaggcaaacgggcccgtgactactctgcgccagtcaacttcatcagcgcagggctcaagaaaggggcagcggaggaggcagagttggaagattctgatgacgaagagaaacctgttaagcaggacgactttcctaaggattttggaccaaggaagctaaaaacgggtggcaattttaagcccagccagaaaggttttgcaggaggaaccaaatctttcatggacttcggcagctgggaaagacacacaaaaggaattggacagaagcttcttcagaagatgggctacgtccctggacggggcctcgggaagaatgcacaaggtatcattaacccaattgaagccaagcagagaaagggaaaaggtgctgtgggggcttatggatccgagcgcaccactcagtccatgcaagacttccctgtggttgactcagaggaagaagctgaagaggagtttcagaaggagctgagccagtggaggaaagacccaagtggaagcaagaagaagcccaaatactcttacaagaccgtggaagagttgaaggccaagggcaggattagcaagaagctcactgctccccagaaggaactttctcaagtcaaggtcatagacatgacaggccgggagcagaaggtctactacagctacagtcagatcagccacaagcacaacgttcccgatgatgggctgccgctacagtcccaacagctgccacagtctggcaaagaggccaaggcccccggcttcgcgctgcccgagctggagcacaacctgcagctgctcatcgacctcacggagcaggagatcatccagaatgaccggcagctacagtatgagcgggacatggtggtcaacctcttccacgagctggagaagatgaccgaggtcctggaccacgaggagcgggtcatctcgaacctcagcaaggtcctggagatggtggaggagtgcgagcggcggatgcagcccgactgcagcaaccccctcaccctggacgagtgtgcccgcatcttcgaaaccctgcaggacaagtactatgaggagtacaggatgtccgaccgtgtggaccttgctgtggccatcgtctatccactcatgaaggagtacttcaaggagtgggatcccctcaaagactgcacttatggcaccgagatcatctctaagtggaaaagcctcctagagaatgaccagctcttgtcccatggcggacaggacctctcagcagatgcctttcacaggttgatatgggaagtctggatgccttttgttcgaaatattgtcacccagtggcagccaaggaactgtgacccgatggtggactttttggatagttgggtgcacattattcctgtgtggatcttagataacatactggaccaactcatcttccccaagctgcaaaaggaggtggaaaactggaacccgctcacagacactgttcccatccactcttggatccacccatggctgccccttatgcaggcacggctggagccactctattcccccatccgtagtaagctgtccagcgccctgcagaagtggcaccccagcgactcctctgccaagctcatcctccagccctggaaggatgtcttcactcctggctcctgggaagcattcatggtcaaaaacatagtgcccaagctggggatgtgtcttggtgagctagtcattaacccccaccagcagcacatggatgcattctattgggtgattgactgggaagggatgatctctgtctctagcctggtgggacttcttgaaaagcacttcttccccaagtggcttcaggtgctgtgctcttggctcagtaacagcccaaattatgaggagatcaccaagtggtacctgggttggaagtcgatgttctcagaccaagtgctggcacatccatctgtcaaggacaaatttaatgaggcacttgatatcatgaaccgggcggtgtcctccaacgttggtgcctacatgcagccaggagcacgggagaacattgcctatctcacccacacggagcggaggaaggacttccagtacgaggccatgcaggagaggcgggaggctgagaacatggctcagaggggcattggcgtggccgctagctctgtgcccatgaactttaaggacctcattgagaccaaggctgaggagcacaacattgtcttcatgcccgtcattgggaagcgacacgaagggaagcagctctacacctttggccgcattgtgatctacatcgaccggggagtggtctttgtccagggcgagaagacgtgggtgcccacctcactgcagagcctgatcgacatggccaagtgaactgtggcaggtccagaaccagtcagagacttgcccctaagagggatgtactgtaaataaacagtatttttagatcaccttcaaaagggtaacttctttactcaggagctactccacatcaggccaggtcatgagggaaggatgtaaaatgggacaatgccacgtagggcaggaatctttataccaagtcctcatgtggggtatcgtcctcaaaacaggacagccaagttgatgttctttcctggcaaaggagttctctgtagttcctccatagcagccttccctttagtctctggtggcagcttctacctcagccaacactgagtacctcacaacgagttcagtcagtagcagaaggatcttctctcttgttcctgatgatttcaaggtcctcacagtcctgataatctggttcttcccgaaactcccaaatatctatggagagctgttctagcttttgcacagggaaccagtggacagaggtatcattaaatatgtccatgtattgtgaagtctgaggaaactcaagctcctccagtccttttaaaatctgagcagaaaaattcaagtataaaaacttcagatagtcacagtaatccccactcttctgggataaatttccactttacttgtcatccccactttactttttaaaaaaataacaaatagggtattttgatttaaatgcttttgcacaatgaattgggcgccccaaggacagtggatatcatggactgtgatactaagaataaaggaaataaggaaaaaactaagagatgcattaaaga

SEQ ID NO: 196224 - DNA, 2789 bp, Homo sapiens
  Payload ID: 18710
  Gene Name: tuftelin interacting protein 11
  Uniprot ID: Q9UBB9
  ENST ID: ENST00000407148
  CDS Start-End: 190-2703
atttccggcgcgccggccacggtgcttccgggttctggtgtaggagcggcgtcttctcgcgcggatggtgaagctgaatttggtacgctggaccctcggacagacagcaagagagagacaagcccgaggcctgacttctagcactcctgagtttgagccctatgagcagtggaacctaggtgactggccatgtcattgtcccacttataccgggatggggaaggccgcattgatgatgatgatgacgagcgggagaactttgagatcactgactgggatctccagaatgagttcaaccccaaccgacagcgccactggcagaccaaggaagaagccacctacggggtgtgggcagagcgagactcggatgatgagaggcccagctttggaggcaaacgggcccgtgactactctgcgccagtcaacttcatcagcgcagggctcaagaaaggggcagcggaggaggcagagttggaagattctgatgacgaagagaaacctgttaagcaggacgactttcctaaggattttggaccaaggaagctaaaaacgggtggcaattttaagcccagccagaaaggttttgcaggaggaaccaaatctttcatggacttcggcagctgggaaagacacacaaaaggaattggacagaagcttcttcagaagatgggctacgtccctggacggggcctcgggaagaatgcacaaggtatcattaacccaattgaagccaagcagagaaagggaaaaggtgctgtgggggcttatggatccgagcgcaccactcagtccatgcaagacttccctgtggttgactcagaggaagaagctgaagaggagtttcagaaggagctgagccagtggaggaaagacccaagtggaagcaagaagaagcccaaatactcttacaagaccgtggaagagttgaaggccaagggcaggattagcaagaagctcactgctccccagaaggaactttctcaagtcaaggtcatagacatgacaggccgggagcagaaggtctactacagctacagtcagatcagccacaagcacaacgttcccgatgatgggctgccgctacagtcccaacagctgccacagtctggcaaagaggccaaggcccccggcttcgcgctgcccgagctggagcacaacctgcagctgctcatcgacctcacggagcaggagatcatccagaatgaccggcagctacagtatgagcgggacatggtggtcaacctcttccacgagctggagaagatgaccgaggtcctggaccacgaggagcgggtcatctcgaacctcagcaaggtcctggagatggtggaggagtgcgagcggcggatgcagcccgactgcagcaaccccctcaccctggacgagtgtgcccgcatcttcgaaaccctgcaggacaagtactatgaggagtacaggatgtccgaccgtgtggaccttgctgtggccatcgtctatccactcatgaaggagtacttcaaggagtgggatcccctcaaagactgcacttatggcaccgagatcatctctaagtggaaaagcctcctagagaatgaccagctcttgtcccatggcggacaggacctctcagcagatgcctttcacaggttgatatgggaagtctggatgccttttgttcgaaatattgtcacccagtggcagccaaggaactgtgacccgatggtggactttttggatagttgggtgcacattattcctgtgtggatcttagataacatactggaccaactcatcttccccaagctgcaaaaggaggtggaaaactggaacccgctcacagacactgttcccatccactcttggatccacccatggctgccccttatgcaggcacggctggagccactctattcccccatccgtagtaagctgtccagcgccctgcagaagtggcaccccagcgactcctctgccaagctcatcctccagccctggaaggatgtcttcactcctggctcctgggaagcattcatggtcaaaaacatagtgcccaagctggggatgtgtcttggtgagctagtcattaacccccaccagcagcacatggatgcattctattgggtgattgactgggaagggatgatctctgtctctagcctggtgggacttcttgaaaagcacttcttccccaagtggcttcaggtgctgtgctcttggctcagtaacagcccaaattatgaggagatcaccaagtggtacctgggttggaagtcgatgttctcagaccaagtgctggcacatccatctgtcaaggacaaatttaatgaggcacttgatatcatgaaccgggcggtgtcctccaacgttggtgcctacatgcagccaggagcacgggagaacattgcctatctcacccacacggagcggaggaaggacttccagtacgaggccatgcaggagaggcgggaggctgagaacatggctcagaggggcattggcgtggccgctagctctgtgcccatgaactttaaggacctcattgagaccaaggctgaggagcacaacattgtcttcatgcccgtcattgggaagcgacacgaagggaagcagctctacacctttggccgcattgtgatctacatcgaccggggagtggtctttgtccagggcgagaagacgtgggtgcccacctcactgcagagcctgatcgacatggccaagtgaactgtggcaggtccagaaccagtcagagacttgcccctaagagggatgtactgtaaataaacagtatttttagatcaccttcaaaa

SEQ ID NO: 196225 - DNA, 571 bp, Homo sapiens
  Payload ID: 18710
  Gene Name: tuftelin interacting protein 11
  ENST ID: ENST00000450493
  CDS Start-End: 1-571
ctggacggggcctcgggaagaatgcacaaggtatcattaacccaattgaagccaagcagagaaagggaaaaggtgctgtgggggcttatggatccgagcgcaccactcagtccatgcaagacttccctgtggttgactcagaggaagaagctgaagagtggttgttccttgctgcatctgactgtattcttctggttcaggagtttcagaaggagctgagccagtggaggaaagacccaagtggaagcaagaagaagcccaaatactcttacaagaccgtggaagagttgaaggccaagggcaggattagcaagaagctcactgctccccagaaggaactttctcaagtcaaggtcatagacatgacaggccgggagcagaaggtctactacagctacagtcagatcagccacaagcacaacgttcccgatgatgggctgccgctacagtcccaacagctgccacagtctggcaaagaggccaaggcccccggcttcgcgctgcccgagctggagcacaacctgcagctgctcatcgacctcacggagcaggagatcatccagaatgaccg

SEQ ID NO: 196226 - DNA, 525 bp, Homo sapiens
  Payload ID: 18710
  Gene Name: tuftelin interacting protein 11
  ENST ID: ENST00000420242
  CDS Start-End: 266-525
atttccggcgcgccggccacggtgcttccgggttctggtgtaggagcggcgtcttctcgcgcggatggtgaagctgaatttggtacgctggaccctcggacagacagcaagagagagacaagcccgaggcctgacttctagcactcctgagtttgagccctatgagcagtggaacctagggatccagatataattctttcctcagtaatagaaaaaagaatctgggatctaagaagatacctactcattttctaagtgactggccatgtcattgtcccacttataccgggatggggaaggccgcattgatgatgatgatgacgagcgggagaactttgagatcactgactgggatctccagaatgagttcaaccccaaccgacagcgccactggcagaccaaggaagaagccacctacggggtgtgggcagagcgagactcggatgatgagaggcccagctttggaggcaaacgggcccgtgactactctgcgccagtcaacttcatcagcgcagggctcaagaa

SEQ ID NO: 196227 - DNA, 638 bp, Homo sapiens
  Payload ID: 18710
  Gene Name: tuftelin interacting protein 11
  ENST ID: ENST00000455080
  CDS Start-End: 275-638
ggtgtaggagcggcgtcttctcgcgcggatggtgaagctgaatttggtacgctggaccctcggacagacagcaagagagagacaagcccgaggcctgacttctagcactcctgagtttgagccctatgagcagtggaacctaggcctgcagacagcctattgtgggaccttttgatcgtgaccaccaaggatccagatataattctttcctcagtaatagaaaaaagaatctgggatctaagaagatacctactcattttctaagtgactggccatgtcattgtcccacttataccgggatggggaaggccgcattgatgatgatgatgacgagcgggagaactttgagatcactgactgggatctccagaatgagttcaaccccaaccgacagcgccactggcagaccaaggaagaagccacctacggggtgtgggcagagcgagactcggatgatgagaggcccagctttggaggcaaacgggcccgtgactactctgcgccagtcaacttcatcagcgcagggctcaagaaaggggcagcggaggaggcagagttggaagattctgatgacgaagagaaacctgttaagcaggacgactttcctaaggattttggaccaaggaagctaaaaacgg

SEQ ID NO: 196228 - DNA, 563 bp, Homo sapiens
  Payload ID: 18710
  Gene Name: tuftelin interacting protein 11
  ENST ID: ENST00000418876
  CDS Start-End: 300-563
acggtgcttccgggttctggtgtaggagcggcgtcttctcgcgcggatggtgaagctgaatttggtacgctggaccctcggacagacagcaagagagagacaagcccgaggcctgacttctagcactcctgagtttgagccctatgagcagtggaacctaggttcttcagctttggaacttgactggctctccttgctcctcagcctgcagacagcctattgtgggaccttttgatcgttaatagaaaaaagaatctgggatctaagaagatacctactcattttctaagtgactggccatgtcattgtcccacttataccgggatggggaaggccgcattgatgatgatgatgacgagcgggagaactttgagatcactgactgggatctccagaatgagttcaaccccaaccgacagcgccactggcagaccaaggaagaagccacctacggggtgtgggcagagcgagactcggatgatgagaggcccagctttggaggcaaacgggcccgtgactactctgcgccagtcaacttcatcagcgcagggctcaagaaaggg

SEQ ID NO: 196229 - DNA, 595 bp, Homo sapiens
  Payload ID: 18710
  Gene Name: tuftelin interacting protein 11
  ENST ID: ENST00000440258
  CDS Start-End: 468-595
gcgcgccggccacggtgcttccgggttctggtgtaggagcggcgtcttctcgcgcggatggtgaagctgaatttggtacgctggaccctcggacagacagcaagagagagacaagcccgaggcctgacttctagcactcctgagtttgagccctatgagcagtggaacctaggctgccagcacggcaagaatataagcaggcagaaaaatgtgaaaagagagactggcctagcctcccagcctatatctttctcctgtgctggatgcttcctgccctcgaacattggacttcaagttcttcagctttggaacttgactggctctccttgctcctcagcctgcagacagcctattgtgggaccttttgatcgtgaccaccaaggatccagatataattctttcctcagtaatagaaaaaagaatctgggatctaagaagatacctactcattttctaagtgactggccatgtcattgtcccacttataccgggatggggaaggccgcattgatgatgatgatgacgagcgggagaactttgagatcactgactgggatctccagaatgagttcaaccccaaccgacagcgccactg

SEQ ID NO: 196230 - DNA, 3402 bp, Homo sapiens
  Payload ID: 18710
  Gene Name: tuftelin interacting protein 11
  Uniprot ID: Q9UBB9
  ENST ID: ENST00000619735
  CDS Start-End: 101-2614
cctaggaccaccaaggatccagatataattctttcctcagtaatagaaaaaagaatctgggatctaagaagatacctactcattttctaagtgactggccatgtcattgtcccacttataccgggatggggaaggccgcattgatgatgatgatgacgagcgggagaactttgagatcactgactgggatctccagaatgagttcaaccccaaccgacagcgccactggcagaccaaggaagaagccacctacggggtgtgggcagagcgagactcggatgatgagaggcccagctttggaggcaaacgggcccgtgactactctgcgccagtcaacttcatcagcgcagggctcaagaaaggggcagcggaggaggcagagttggaagattctgatgacgaagagaaacctgttaagcaggacgactttcctaaggattttggaccaaggaagctaaaaacgggtggcaattttaagcccagccagaaaggttttgcaggaggaaccaaatctttcatggacttcggcagctgggaaagacacacaaaaggaattggacagaagcttcttcagaagatgggctacgtccctggacggggcctcgggaagaatgcacaaggtatcattaacccaattgaagccaagcagagaaagggaaaaggtgctgtgggggcttatggatccgagcgcaccactcagtccatgcaagacttccctgtggttgactcagaggaagaagctgaagaggagtttcagaaggagctgagccagtggaggaaagacccaagtggaagcaagaagaagcccaaatactcttacaagaccgtggaagagttgaaggccaagggcaggattagcaagaagctcactgctccccagaaggaactttctcaagtcaaggtcatagacatgacaggccgggagcagaaggtctactacagctacagtcagatcagccacaagcacaacgttcccgatgatgggctgccgctacagtcccaacagctgccacagtctggcaaagaggccaaggcccccggcttcgcgctgcccgagctggagcacaacctgcagctgctcatcgacctcacggagcaggagatcatccagaatgaccggcagctacagtatgagcgggacatggtggtcaacctcttccacgagctggagaagatgaccgaggtcctggaccacgaggagcgggtcatctcgaacctcagcaaggtcctggagatggtggaggagtgcgagcggcggatgcagcccgactgcagcaaccccctcaccctggacgagtgtgcccgcatcttcgaaaccctgcaggacaagtactatgaggagtacaggatgtccgaccgtgtggaccttgctgtggccatcgtctatccactcatgaaggagtacttcaaggagtgggatcccctcaaagactgcacttatggcaccgagatcatctctaagtggaaaagcctcctagagaatgaccagctcttgtcccatggcggacaggacctctcagcagatgcctttcacaggttgatatgggaagtctggatgccttttgttcgaaatattgtcacccagtggcagccaaggaactgtgacccgatggtggactttttggatagttgggtgcacattattcctgtgtggatcttagataacatactggaccaactcatcttccccaagctgcaaaaggaggtggaaaactggaacccgctcacagacactgttcccatccactcttggatccacccatggctgccccttatgcaggcacggctggagccactctattcccccatccgtagtaagctgtccagcgccctgcagaagtggcaccccagcgactcctctgccaagctcatcctccagccctggaaggatgtcttcactcctggctcctgggaagcattcatggtcaaaaacatagtgcccaagctggggatgtgtcttggtgagctagtcattaacccccaccagcagcacatggatgcattctattgggtgattgactgggaagggatgatctctgtctctagcctggtgggacttcttgaaaagcacttcttccccaagtggcttcaggtgctgtgctcttggctcagtaacagcccaaattatgaggagatcaccaagtggtacctgggttggaagtcgatgttctcagaccaagtgctggcacatccatctgtcaaggacaaatttaatgaggcacttgatatcatgaaccgggcggtgtcctccaacgttggtgcctacatgcagccaggagcacgggagaacattgcctatctcacccacacggagcggaggaaggacttccagtacgaggccatgcaggagaggcgggaggctgagaacatggctcagaggggcattggcgtggccgctagctctgtgcccatgaactttaaggacctcattgagaccaaggctgaggagcacaacattgtcttcatgcccgtcattgggaagcgacacgaagggaagcagctctacacctttggccgcattgtgatctacatcgaccggggagtggtctttgtccagggcgagaagacgtgggtgcccacctcactgcagagcctgatcgacatggccaagtgaactgtggcaggtccagaaccagtcagagacttgcccctaagagggatgtactgtaaataaacagtatttttagatcaccttcaaaagggtaacttctttactcaggagctactccacatcaggccaggtcatgagggaaggatgtaaaatgggacaatgccacgtagggcaggaatctttataccaagtcctcatgtggggtatcgtcctcaaaacaggacagccaagttgatgttctttcctggcaaaggagttctctgtagttcctccatagcagccttccctttagtctctggtggcagcttctacctcagccaacactgagtacctcacaacgagttcagtcagtagcagaaggatcttctctcttgttcctgatgatttcaaggtcctcacagtcctgataatctggttcttcccgaaactcccaaatatctatggagagctgttctagcttttgcacagggaaccagtggacagaggtatcattaaatatgtccatgtattgtgaagtctgaggaaactcaagctcctccagtccttttaaaatctgagcagaaaaattcaagtataaaaacttcagatagtcacagtaatccccactcttctgggataaatttccactttacttgtcatccccactttactttttaaaaaaataacaaatagggtattttgatttaaatgcttttgcacaatgaattgggcgccccaaggacagtggatatcatggactgtgatactaagaataaaggaaataaggaaaaaactaagagatgcattaaaga

SEQ ID NO: 196231 - DNA, 1676 bp, Homo sapiens
  Payload ID: 18711
  Gene Name: tumor necrosis factor
  Uniprot ID: P01375
  ENST ID: ENST00000376122
  CDS Start-End: 176-877
cagacgctccctcagcaaggacagcagaggaccagctaagagggagagaagcaactacagaccccccctgaaaacaaccctcagacgccacatcccctgacaagctgccaggcaggttctcttcctctcacatactgacccacggctccaccctctctcccctggaaaggacaccatgagcactgaaagcatgatccgggacgtggagctggccgaggaggcgctccccaagaagacaggggggccccagggctccaggcggtgcttgttcctcagcctcttctccttcctgatcgtggcaggcgccaccacgctcttctgcctgctgcactttggagtgatcggcccccagagggaagagttccccagggacctctctctaatcagccctctggcccaggcagtcagatcatcttctcgaaccccgagtgacaagcctgtagcccatgttgtagcaaaccctcaagctgaggggcagctccagtggctgaaccgccgggccaatgccctcctggccaatggcgtggagctgagagataaccagctggtggtgccatcagagggcctgtacctcatctactcccaggtcctcttcaagggccaaggctgcccctccacccatgtgctcctcacccacaccatcagccgcatcgccgtctcctaccagaccaaggtcaacctcctctctgccatcaagagcccctgccagagggagaccccagagggggctgaggccaagccctggtatgagcccatctatctgggaggggtcttccagctggagaagggtgaccgactcagcgctgagatcaatcggcccgactatctcgactttgccgagtctgggcaggtctactttgggatcattgccctgtgaggaggacgaacatccaaccttcccaaacgcctcccctgccccaatccctttattaccccctccttcagacaccctcaacctcttctggctcaaaaagagaattgggggcttagggtcggaacccaagcttagaactttaagcaacaagaccaccacttcgaaacctgggattcaggaatgtgtggcctgcacagtgaagtgctggcaaccactaagaattcaaactggggcctccagaactcactggggcctacagctttgatccctgacatctggaatctggagaccagggagcctttggttctggccagaatgctgcaggacttgagaagacctcacctagaaattgacacaagtggaccttaggccttcctctctccagatgtttccagacttccttgagacacggagcccagccctccccatggagccagctccctctatttatgtttgcacttgtgattatttattatttatttattatttatttatttacagatgaatgtatttatttgggagaccggggtatcctgggggacccaatgtaggagctgccttggctcagacatgttttccgtgaaaacggagctgaacaataggctgttcccatgtagccccctggcctctgtgccttcttttgattatgttttttaaaatatttatctgattaagttgtctaaacaatgctgatttggtgaccaactgtcactcattgctgagcctctgctccccaggggagttgtgtctgtaatcgccctactattcagtggcgagaaataaagtttgcttagaaaagaaa

SEQ ID NO: 196232 - DNA, 1676 bp, Homo sapiens; identical to SEQ ID NO: 196231
  Payload ID: 18711
  Gene Name: tumor necrosis factor
  Uniprot ID: P01375
  ENST ID: ENST00000383496
  CDS Start-End: 176-877

SEQ ID NO: 196233 - DNA, 1315 bp, Homo sapiens
  Payload ID: 18711
  Gene Name: tumor necrosis factor
  ENST ID: ENST00000445232
  CDS Start-End: 1-516
ttccccagggacctctctctaatcagccctctggcccaggcagtcagatcatcttctcgaaccccgagtgacaagcctgtagcccatgttgtagcaaaccctcaagctgaggggcagctccagtggctgaaccgccgggccaatgccctcctggccaatggcgtggagctgagagataaccagctggtggtgccatcagagggcctgtacctcatctactcccaggtcctcttcaagggccaaggctgcccctccacccatgtgctcctcacccacaccatcagccgcatcgccgtctcctaccagaccaaggtcaacctcctctctgccatcaagagcccctgccagagggagaccccagagggggctgaggccaagccctggtatgagcccatctatctgggaggggtcttccagctggagaagggtgaccgactcagcgctgagatcaatcggcccgactatctcgactttgccgagtctgggcaggtctactttgggatcattgccctgtgaggaggacgaacatccaaccttcccaaacgcctcccctgccccaatccctttattaccccctccttcagacaccctcaacctcttctggctcaaaaagagaattgggggcttagggtcggaacccaagcttagaactttaagcaacaagaccaccacttcgaaacctgggattcaggaatgtgtggcctgcacagtgaagtgctggcaaccactaagaattcaaactggggcctccagaactcactggggcctacagctttgatccctgacatctggaatctggagaccagggagcctttggttctggccagaatgctgcaggacttgagaagacctcacctagaaattgacacaagtggaccttaggccttcctctctccagatgtttccagacttccttgagacacggagcccagccctccccatggagccagctccctctatttatgtttgcacttgtgattatttattatttatttattatttatttatttacagatgaatgtatttatttgggagaccggggtatcctgggggacccaatgtaggagctgccttggctcagacatgttttccgtgaaaacggagctgaacaataggctgttcccatgtagccccctggcctctgtgccttcttttgattatgttttttaaaatatttatctgattaagttgtctaaacaatgctgatttggtgaccaactgtcactcattgctgagcctctgctccccaggggagttgtgtctgtaatcgccctactattcagtggcgagaaataaagtttgcttagaaaagaaa

SEQ ID NO: 196234 - DNA, 1676 bp, Homo sapiens; identical to SEQ ID NO: 196231
  Payload ID: 18711
  Gene Name: tumor necrosis factor
  Uniprot ID: P01375
  ENST ID: ENST00000448781
  CDS Start-End: 176-877

SEQ ID NO: 196235 - DNA, 1676 bp, Homo sapiens; identical to SEQ ID NO: 196231
  Payload ID: 18711
  Gene Name: tumor necrosis factor
  Uniprot ID: P01375
  ENST ID: ENST00000443707
  CDS Start-End: 176-877

SEQ ID NO: 196236 - DNA, 1676 bp, Homo sapiens; identical to SEQ ID NO: 196231
  Payload ID: 18711
  Gene Name: tumor necrosis factor
  Uniprot ID: P01375
  ENST ID: ENST00000412275
  CDS Start-End: 176-877

SEQ ID NO: 196237 - DNA, 1676 bp, Homo sapiens; identical to SEQ ID NO: 196231
  Payload ID: 18711
  Gene Name: tumor necrosis factor
  Uniprot ID: P01375
  ENST ID: ENST00000449264
  CDS Start-End: 176-877

SEQ ID NO: 196238 - DNA, 1676 bp, Homo sapiens; identical to SEQ ID NO: 196231
  Payload ID: 18711
  Gene Name: tumor necrosis factor
  Uniprot ID: P01375
  ENST ID: ENST00000420425
  CDS Start-End: 176-877

SEQ ID NO: 196239 - DNA, 1953 bp, Homo sapiens
  Payload ID: 18712
  Gene Name: tumor necrosis factor (ligand) superfamily, member 10
  Uniprot ID: P50591
  ENST ID: ENST00000241261
  CDS Start-End: 124-969
acagaacccagaaaaacaactcattcgctttcatttcctcactgactataaaagaatagagaaggaagggcttcagtgaccggctgcctggctgacttacagcagtcagactctgacaggatcatggctatgatggaggtccaggggggacccagcctgggacagacctgcgtgctgatcgtgatcttcacagtgctcctgcagtctctctgtgtggctgtaacttacgtgtactttaccaacgagctgaagcagatgcaggacaagtactccaaaagtggcattgcttgtttcttaaaagaagatgacagttattgggaccccaatgacgaagagagtatgaacagcccctgctggcaagtcaagtggcaactccgtcagctcgttagaaagatgattttgagaacctctgaggaaaccatttctacagttcaagaaaagcaacaaaatatttctcccctagtgagagaaagaggtcctcagagagtagcagctcacataactgggaccagaggaagaagcaacacattgtcttctccaaactccaagaatgaaaaggctctgggccgcaaaataaactcctgggaatcatcaaggagtgggcattcattcctgagcaacttgcacttgaggaatggtgaactggtcatccatgaaaaagggttttactacatctattcccaaacatactttcgatttcaggaggaaataaaagaaaacacaaagaacgacaaacaaatggtccaatatatttacaaatacacaagttatcctgaccctatattgttgatgaaaagtgctagaaatagttgttggtctaaagatgcagaatatggactctattccatctatcaagggggaatatttgagcttaaggaaaatgacagaatttttgtttctgtaacaaatgagcacttgatagacatggaccatgaagccagtttttttggggcctttttagttggctaactgacctggaaagaaaaagcaataacctcaaagtgactattcagttttcaggatgatacactatgaagatgtttcaaaaaatctgaccaaaacaaacaaacagaaaacagaaaacaaaaaaacctctatgcaatctgagtagagcagccacaaccaaaaaattctacaacacacactgttctgaaagtgactcacttatcccaagagaatgaaattgctgaaagatctttcaggactctacctcatatcagtttgctagcagaaatctagaagactgtcagcttccaaacattaatgcaatggttaacatcttctgtctttataatctactccttgtaaagactgtagaagaaagagcaacaatccatctctcaagtagtgtatcacagtagtagcctccaggtttccttaagggacaacatccttaagtcaaaagagagaagaggcaccactaaaagatcgcagtttgcctggtgcagtggctcacacctgtaatcccaacattttgggaacccaaggtgggtagatcacgagatcaagagatcaagaccatagtgaccaacatagtgaaaccccatctctactgaaagtacaaaaattagctgggtgtgttggcacatgcctgtagtcccagctacttgagaggctgaggcaagagaattgtttgaacccgggaggcagaggttgcagtgtggtgagatcatgccactacactccagcctggcgacagagcgagacttggtttcaaaaaaaaaaaaaaaaaaaacttcagtaagtacgtgttatttttttcaataaaattctattacagtatgtcatgtttgctgtagtgctcatatttattgttgtttttgttttagtactcacttgtttcataatatcaagattactaaaaatgggggaaaagacttctaatctttttttcataatatctttgacacatattacagaagaaataaatttcttacttttaatttaatatga

SEQ ID NO: 196240 - DNA, 1619 bp, Homo sapiens
  Payload ID: 18712
  Gene Name: tumor necrosis factor (ligand) superfamily, member 10
  Uniprot ID: P50591
  ENST ID: ENST00000420541
  CDS Start-End: 92-397
atttcctcactgactataaaagaatagagaaggaagggcttcagtgaccggctgcctggctgacttacagcagtcagactctgacaggatcatggctatgatggaggtccaggggggacccagcctgggacagacctgcgtgctgatcgtgatcttcacagtgctcctgcagtctctctgtgtggctgtaacttacgtgtactttaccaacgagctgaagcagatgcaggacaagtactccaaaagtggcattgcttgtttcttaaaagaagatgacagttattgggaccccaatgacgaagagagtatgaacagcccctgctggcaagtcaagtggcaactccgtcagctcgttagaaagactccaagaatgaaaaggctctgggccgcaaaataaactcctgggaatcatcaaggagtgggcattcattcctgagcaacttgcacttgaggaatggtgaactggtcatccatgaaaaagggttttactacatctattcccaaacatactttcgatttcaggaggaaataaaagaaaacacaaagaacgacaaacaaatggtccaatatatttacaaatacacaagttatcctgaccctatattgttgatgaaaagtgctagaaatagttgttggtctaaagatgcagaatatggactctattccatctatcaagggggaatatttgagcttaaggaaaatgacagaatttttgtttctgtaacaaatgagcacttgatagacatggaccatgaagccagtttttttggggcctttttagttggctaactgacctggaaagaaaaagcaataacctcaaagtgactattcagttttcaggatgatacactatgaagatgtttcaaaaaatctgaccaaaacaaacaaacagaaaacagaaaacaaaaaaacctctatgcaatctgagtagagcagccacaaccaaaaaattctacaacacacactgttctgaaagtgactcacttatcccaagagaatgaaattgctgaaagatctttcaggactctacctcatatcagtttgctagcagaaatctagaagactgtcagcttccaaacattaatgcaatggttaacatcttctgtctttataatctactccttgtaaagactgtagaagaaagagcaacaatccatctctcaagtagtgtatcacagtagtagcctccaggtttccttaagggacaacatccttaagtcaaaagagagaagaggcaccactaaaagatcgcagtttgcctggtgcagtggctcacacctgtaatcccaacattttgggaacccaaggtgggtagatcacgagatcaagagatcaagaccatagtgaccaacatagtgaaaccccatctctactgaaagtacaaaaattagctgggtgtgttggcacatgcctgtagtcccagctacttgagaggctgaggcaagagaattgtttgaacccgggaggcagaggttgcagtgtggtgagatcatgccactacactccagcctggcgacagagcgagacttggtttcaaaaaaaaaaaaaaaaaaaacttcagtaagtacgtgttatttttttcaataaaattctattacagtatgtcatgtttgctgtag

SEQ ID NO: 196241 - DNA, 467 bp, Homo sapiens
  Payload ID: 18712
  Gene Name: tumor necrosis factor (ligand) superfamily, member 10
  ENST ID: ENST00000430881
  CDS Start-End: 1-223
cctgcagtctctctgtgtggctgtaacttacgtgtactttaccaacgagctgaagcagatgcaggacaagtactccaaaagtggcattgcttgtttcttaaaagaagatgacagttattgggaccccaatgacgaagagagtatgaacagcccctgctggcaagtcaagtggcaactccgtcagctcgttagaaagaaaagcaacaaaatatttctcccctagtgagagaaagaggtcctcagagagtagcagctcacataactgggaccagaggaagaagcaacacattgtcttctccaaagacgccatctgcttggatgtgcctttgactctggagagctgagaaagatcaaggggggacccaaagagtccaaaaggaatggcaagaacttctgagatttaggcctaaagaaatagatacgtttatttcggtttccttctggattgtccacttaagttcaccagc

SEQ ID NO: 196242 - DNA, 911 bp, Homo sapiens
  Payload ID: 18713
  Gene Name: tumor necrosis factor (ligand) superfamily, member 11
  Uniprot ID: O14788
  ENST ID: ENST00000239849
  CDS Start-End: 99-911
atgcgccgcgccagcagagactacaccaagtacctgcgtggctcggaggagatgggcggcggccccggagccccgcacgagggccccctgcacgctccatgttcgtggccctcctggggctggggctgggccaggttgtctgcagcgtcgccctgttcttctatttcagagcgcagatggatcctaatagaatatcagaagatggcactcactgcatttatagaattttgagactccatgaaaatgcagattttcaagacacaactctggagagtcaagatacaaaattaatacctgattcatgtaggagaattaaacaggcctttcaaggagctgtgcaaaaggaattacaacatatcgttggatcacagcacatcagagcagagaaagcgatggtggatggctcatggttagatctggccaagaggagcaagcttgaagctcagccttttgctcatctcactattaatgccaccgacatcccatctggttcccataaagtgagtctgtcctcttggtaccatgatcggggttgggccaagatctccaacatgacttttagcaatggaaaactaatagttaatcaggatggcttttattacctgtatgccaacatttgctttcgacatcatgaaacttcaggagacctagctacagagtatcttcaactaatggtgtacgtcactaaaaccagcatcaaaatcccaagttctcataccctgatgaaaggaggaagcaccaagtattggtcagggaattctgaattccatttttattccataaacgttggtggattttttaagttacggtctggagaggaaatcagcatcgaggtctccaacccctccttactggatccggatcaggatgcaacatactttggggcttttaaagttcgagatatagattga

SEQ ID NO: 196243 - DNA, 1520 bp, Homo sapiens
  Payload ID: 18713
  Gene Name: tumor necrosis factor (ligand) superfamily, member 11
  Uniprot ID: O14788
  ENST ID: ENST00000358545
  CDS Start-End: 530-1264
ctgaaagcaaatggtgtggccgaagctgcctctctggtggcatagctaagaccaagctgcacgcagtgaaaacacagtttgttttcactgacaacaaggcagaatgtgtaccagggatgtgacgtggggaaccaggaagaggacagtctgaggatcattattaaagggactccatccaagaaggtttccagccagaggcaagctgtagccagaagaaaagaatgagagatcacctgaataatagaacagaaactgctgaaatattgaacacagatctagatcaaatgaaggaacatattcaggatgaagcataaataaaggccaggcgtggtggctcatgcctggaatctcagctctttgggaggccgaggctattctccatctcctgggctccagtgatcctcacgcctcggccacccaaagtgctgggattatagaagtgaaccactgcgcctggcctattgaaggtttttaatcttcagagtttcgactttatcaacaacacttagaagccaccaaagaattgcagatggatcctaatagaatatcagaagatggcactcactgcatttatagaattttgagactccatgaaaatgcagattttcaagacacaactctggagagtcaagatacaaaattaatacctgattcatgtaggagaattaaacaggcctttcaaggagctgtgcaaaaggaattacaacatatcgttggatcacagcacatcagagcagagaaagcgatggtggatggctcatggttagatctggccaagaggagcaagcttgaagctcagccttttgctcatctcactattaatgccaccgacatcccatctggttcccataaagtgagtctgtcctcttggtaccatgatcggggttgggccaagatctccaacatgacttttagcaatggaaaactaatagttaatcaggatggcttttattacctgtatgccaacatttgctttcgacatcatgaaacttcaggagacctagctacagagtatcttcaactaatggtgtacgtcactaaaaccagcatcaaaatcccaagttctcataccctgatgaaaggaggaagcaccaagtattggtcagggaattctgaattccatttttattccataaacgttggtggattttttaagttacggtctggagaggaaatcagcatcgaggtctccaacccctccttactggatccggatcaggatgcaacatactttggggcttttaaagttcgagatatagattgagccccagtttttggagtgttatgtatttcctggatgtttggaaacattttttaaaacaagccaagaaagatgtatataggtgtgtgagactactaagaggcatggccccaacggtacacgactcagtatccatgctcttgaccttgtagagaacacgcgtatttacagccagtgggagatgttagactcatggtgtgttacacaatggtttttaaattttgtaatgaattcctagaattaaaccagattggagcaa

SEQ ID NO: 196244 - DNA, 2199 bp, Homo sapiens
  Payload ID: 18713
  Gene Name: tumor necrosis factor (ligand) superfamily, member 11
  Uniprot ID: O14788
  ENST ID: ENST00000398795
  CDS Start-End: 152-1105
cccgctcgcccgcgcgccccaggacccaaagccgggctccaagtcggcgccccacgtcgaggctccgccgcagcctccggagttggccgcagacaagaaggggagggagcgggagagggaggagagctccgaagcgagagggccgagcgccatgcgccgcgccagcagagactacaccaagtacctgcgtggctcggaggagatgggcggcggccccggagccccgcacgagggccccctgcacgccccgccgccgcctgcgccgcaccagccccctgccgcctcccgctccatgttcgtggccctcctggggctggggctgggccaggttgtctgcagcgtcgccctgttcttctatttcagagcgcagatggatcctaatagaatatcagaagatggcactcactgcatttatagaattttgagactccatgaaaatgcagattttcaagacacaactctggagagtcaagatacaaaattaatacctgattcatgtaggagaattaaacaggcctttcaaggagctgtgcaaaaggaattacaacatatcgttggatcacagcacatcagagcagagaaagcgatggtggatggctcatggttagatctggccaagaggagcaagcttgaagctcagccttttgctcatctcactattaatgccaccgacatcccatctggttcccataaagtgagtctgtcctcttggtaccatgatcggggttgggccaagatctccaacatgacttttagcaatggaaaactaatagttaatcaggatggcttttattacctgtatgccaacatttgctttcgacatcatgaaacttcaggagacctagctacagagtatcttcaactaatggtgtacgtcactaaaaccagcatcaaaatcccaagttctcataccctgatgaaaggaggaagcaccaagtattggtcagggaattctgaattccatttttattccataaacgttggtggattttttaagttacggtctggagaggaaatcagcatcgaggtctccaacccctccttactggatccggatcaggatgcaacatactttggggcttttaaagttcgagatatagattgagccccagtttttggagtgttatgtatttcctggatgtttggaaacattttttaaaacaagccaagaaagatgtatataggtgtgtgagactactaagaggcatggccccaacggtacacgactcagtatccatgctcttgaccttgtagagaacacgcgtatttacagccagtgggagatgttagactcatggtgtgttacacaatggtttttaaattttgtaatgaattcctagaattaaaccagattggagcaattacggggtgaccttatgagaaactgcatgtgggctatgggaggggttggtccctggtcatgtgccccttcgcagctgaagtggagagggtgtcatctagcgcaattgaaggatcatctgaaggggcaaattcttttgaattgttacatcatgctggaacctgcaaaaaatactttttctaatgaggagagaaaatatatgtatttttatataatatctaaagttatatttcagatgtaatgttttctttgcaaagtattgtaaattatatttgtgctatagtatttgattcaaaatatttaaaaatgtcttgctgttgacatatttaatgttttaaatgtacagacatatttaactggtgcactttgtaaattccctggggaaaacttgcagctaaggaggggaaaaaaatgttgtttcctaatatcaaatgcagtatatttcttcgttctttttaagttaatagattttttcagacttgtcaagcctgtgcaaaaaaattaaaatggatgccttgaataataagcaggatgttggccaccaggtgcctttcaaatttagaaactaattgactttagaaagctgacattgccaaaaaggatacataatgggccactgaaatctgtcaagagtagttatataattgttgaacaggtgtttttccacaagtgccgcaaattgtaccttttttgttttttcaaaatagaaaagttattagtggtttatcagcaaaaaagtccaattttaatttagtaaatgttatcttatactgtacaataaaaacattgcctttgaatgttaattttttggtacaaaaataaatttatatgaaaacctg

SEQ ID NO: 196245 - DNA, 2135 bp, Homo sapiens
  Payload ID: 18713
  Gene Name: tumor necrosis factor (ligand) superfamily, member 11
  Uniprot ID: O14788
  ENST ID: ENST00000405262
  CDS Start-End: 306-1040
acagatcacctgaataatagaacagaaactgctgaaatattgaacacagatctagatcaaatgaaggaacatattcaggatgaagcataaataaaggccaggcgtggtggctcatgcctggaatctcagctctttgggaggccgaggctattctccatctcctgggctccagtgatcctcacgcctcggccacccaaagtgctgggattatagaagtgaaccactgcgcctggcctattgaaggtttttaatcttcagagtttcgactttatcaacaacacttagaagccaccaaagaattgcagatggatcctaatagaatatcagaagatggcactcactgcatttatagaattttgagactccatgaaaatgcagattttcaagacacaactctggagagtcaagatacaaaattaatacctgattcatgtaggagaattaaacaggcctttcaaggagctgtgcaaaaggaattacaacatatcgttggatcacagcacatcagagcagagaaagcgatggtggatggctcatggttagatctggccaagaggagcaagcttgaagctcagccttttgctcatctcactattaatgccaccgacatcccatctggttcccataaagtgagtctgtcctcttggtaccatgatcggggttgggccaagatctccaacatgacttttagcaatggaaaactaatagttaatcaggatggcttttattacctgtatgccaacatttgctttcgacatcatgaaacttcaggagacctagctacagagtatcttcaactaatggtgtacgtcactaaaaccagcatcaaaatcccaagttctcataccctgatgaaaggaggaagcaccaagtattggtcagggaattctgaattccatttttattccataaacgttggtggattttttaagttacggtctggagaggaaatcagcatcgaggtctccaacccctccttactggatccggatcaggatgcaacatactttggggcttttaaagttcgagatatagattgagccccagtttttggagtgttatgtatttcctggatgtttggaaacattttttaaaacaagccaagaaagatgtatataggtgtgtgagactactaagaggcatggccccaacggtacacgactcagtatccatgctcttgaccttgtagagaacacgcgtatttacagccagtgggagatgttagactcatggtgtgttacacaatggtttttaaattttgtaatgaattcctagaattaaaccagattggagcaattacggggtgaccttatgagaaactgcatgtgggctatgggaggggttggtccctggtcatgtgccccttcgcagctgaagtggagagggtgtcatctagcgcaattgaaggatcatctgaaggggcaaattcttttgaattgttacatcatgctggaacctgcaaaaaatactttttctaatgaggagagaaaatatatgtatttttatataatatctaaagttatatttcagatgtaatgttttctttgcaaagtattgtaaattatatttgtgctatagtatttgattcaaaatatttaaaaatgtcttgctgttgacatatttaatgttttaaatgtacagacatatttaactggtgcactttgtaaattccctggggaaaacttgcagctaaggaggggaaaaaaatgttgtttcctaatatcaaatgcagtatatttcttcgttctttttaagttaatagattttttcagacttgtcaagcctgtgcaaaaaaattaaaatggatgccttgaataataagcaggatgttggccaccaggtgcctttcaaatttagaaactaattgactttagaaagctgacattgccaaaaaggatacataatgggccactgaaatctgtcaagagtagttatataattgttgaacaggtgtttttccacaagtgccgcaaattgtaccttttttgttttttcaaaatagaaaagttattagtggtttatcagcaaaaaagtccaattttaatttagtaaatgttatcttatactgtacaataaaaacattgcctttgaatgttaattttttggtacaaaaataaatttatatgaaaacctgc

SEQ ID NO: 196246 - DNA, 818 bp, Homo sapiens
  Payload ID: 18713
  Gene Name: tumor necrosis factor (ligand) superfamily, member 11
  Uniprot ID: O14788
  ENST ID: ENST00000544862
  CDS Start-End: 84-818
agcctccggagttggccgcagacaagaaggggctgggccaggttgtctgcagcgtcgccctgttcttctatttcagagcgcagatggatcctaatagaatatcagaagatggcactcactgcatttatagaattttgagactccatgaaaatgcagattttcaagacacaactctggagagtcaagatacaaaattaatacctgattcatgtaggagaattaaacaggcctttcaaggagctgtgcaaaaggaattacaacatatcgttggatcacagcacatcagagcagagaaagcgatggtggatggctcatggttagatctggccaagaggagcaagcttgaagctcagccttttgctcatctcactattaatgccaccgacatcccatctggttcccataaagtgagtctgtcctcttggtaccatgatcggggttgggccaagatctccaacatgacttttagcaatggaaaactaatagttaatcaggatggcttttattacctgtatgccaacatttgctttcgacatcatgaaacttcaggagacctagctacagagtatcttcaactaatggtgtacgtcactaaaaccagcatcaaaatcccaagttctcataccctgatgaaaggaggaagcaccaagtattggtcagggaattctgaattccatttttattccataaacgttggtggattttttaagttacggtctggagaggaaatcagcatcgaggtctccaacccctccttactggatccggatcaggatgcaacatactttggggcttttaaagttcgagatatagattga

SEQ ID NO: 196247 - DNA, 1553 bp, Homo sapiens
  Payload ID: 18714
  Gene Name: tumor necrosis factor (ligand) superfamily, member 12
  Uniprot ID: O43508
  ENST ID: ENST00000293825
  CDS Start-End: 264-1013
cctcgccctggtggtgcacgcccgggctgggcgctcagaggtcgggtgggcgcccactccgttcgctgcgcgcacagcgcccggcgagaggctcggagtttgatcacacacagcgtccggcttcctgtccccagcgccccctcccgccccgtttcccttgcccctccctctccccggcccgatccgcccgccggctccccctcccccgatccctcgggtcccgggatgggggggcggtgaggcaggcacagccccccgcccccatggccgcccgtcggagccagaggcggagggggcgccggggggagccgggcaccgccctgctggtcccgctcgcgctgggcctgggcctggcgctggcctgcctcggcctcctgctggccgtggtcagtttggggagccgggcatcgctgtccgcccaggagcctgcccaggaggagctggtggcagaggaggaccaggacccgtcggaactgaatccccagacagaagaaagccaggatcctgcgcctttcctgaaccgactagttcggcctcgcagaagtgcacctaaaggccggaaaacacgggctcgaagagcgatcgcagcccattatgaagttcatccacgacctggacaggacggagcgcaggcaggtgtggacgggacagtgagtggctgggaggaagccagaatcaacagctccagccctctgcgctacaaccgccagatcggggagtttatagtcacccgggctgggctctactacctgtactgtcaggtgcactttgatgaggggaaggctgtctacctgaagctggacttgctggtggatggtgtgctggccctgcgctgcctggaggaattctcagccactgcggcgagttccctcgggccccagctccgcctctgccaggtgtctgggctgttggccctgcggccagggtcctccctgcggatccgcaccctcccctgggcccatctcaaggctgcccccttcctcacctacttcggactcttccaggttcactgaggggccctggtctccccgcagtcgtcccaggctgccggctcccctcgacagctctctgggcacccggtcccctctgccccaccctcagccgctctttgctccagacctgcccctccctctagaggctgcctgggcctgttcacgtgttttccatcccacataaatacagtattcccactcttatcttacaactcccccaccgcccactctccacctcactagctccccaatccctgaccctttgaggcccccagtgatctcgactcccccctggccacagacccccagggcattgtgttcactgtactctgtgggcaaggatgggtccagaagaccccacttcaggcactaagaggggctggacctggcggcaggaagccaaagagactgggcctaggccaggagttcccaaatgtgaggggcgagaaacaagacaagctcctcccttgagaattccctgtggatttttaaaacagatattatttttattattattgtgacaaaatgttgataaatggatattaaatagaataagtcata

SEQ ID NO: 196248 - DNA, 1625 bp, Homo sapiens
  Payload ID: 18714
  Gene Name: tumor necrosis factor (ligand) superfamily, member 12
  ENST ID: ENST00000322272
  CDS Start-End: 97-501
ctctccccggcccgatccgcccgccggctccccctcccccgatccctcgggtcccgggatgggggggcggtgaggcaggcacagccccccgcccccatggccgcccgtcggagccagaggcggagggggcgccggggggagccgggcaccgccctgctggtcccgctcgcgctgggcctgggcctggcgctggcctgcctcggcctcctgctggccgtggtcagtttggggagccgggcatcgctgtccgcccaggagcctgcccaggaggagctggtggcagaggaggaccaggacccgtcggaactgaatccccagacagaagaaagccaggatcctgcgcctttcctgaaccgactagttcggcctcgcagaagtgcacctaaaggccggaaaacacgggctcgaagagcgatcgcagcccattatgaagttcatccacgacctggacaggacggagcgcaggcagatggaggttacacaacttgtctgaggccatgagatactaagtggtggagccaagatttgaacccagctagaatgtgcctgtgtactggacatggtctgcatgaaaggcgaggtggctggtgcaggggtgaggggtccatgcaggggccacatccaaaaaggggagagggaagtttccagaaagaagagaggacacatctcccaccattaccagagggtcaaaggagaacaagagaccaggtgtggacgggacagtgagtggctgggaggaagccagaatcaacagctccagccctctgcgctacaaccgccagatcggggagtttatagtcacccgggctgggctctactacctgtactgtcaggtgcactttgatgaggggaaggctgtctacctgaagctggacttgctggtggatggtgtgctggccctgcgctgcctggaggaattctcagccactgcggcgagttccctcgggccccagctccgcctctgccaggtgtctgggctgttggccctgcggccagggtcctccctgcggatccgcaccctcccctgggcccatctcaaggctgcccccttcctcacctacttcggactcttccaggttcactgaggggccctggtctccccgcagtcgtcccaggctgccggctcccctcgacagctctctgggcacccggtcccctctgccccaccctcagccgctctttgctccagacctgcccctccctctagaggctgcctgggcctgttcacgtgttttccatcccacataaatacagtattcccactcttatcttacaactcccccaccgcccactctccacctcactagctccccaatccctgaccctttgaggcccccagtgatctcgactcccccctggccacagacccccagggcattgtgttcactgtactctgtgggcaaggatgggtccagaagaccccacttcaggcactaagaggggctggacctggcggcaggaagccaaagagactgggcctaggccaggagttcccaaatgtgaggggcgagaaacaagacaagctcctcccttgagaattccctgtggatttttaaaacagatattatttttattattattgtgacaaaatgttgataaatggatattaaatagaataagtcata

SEQ ID NO: 196249 - DNA, 2036 bp, Homo sapiens
  Payload ID: 18715
  Gene Name: tumor necrosis factor (ligand) superfamily, member 13
  Uniprot ID: O75888
  ENST ID: ENST00000349228
  CDS Start-End: 565-1269
agaactcagccagtttcttgcttccgtgcccctggttctcctccccatcgagcccacccctcctttcccaccttcagtcacccctagtgaactgccccagcgatctctgctgtgcttgaccccgagggtcttccaccctcgccctgaccctggacactgcccagcttggccccccatcctgctcctggcacaatgccctctagccagccaaccttccctcccccaaccctggggccgccccagggttcctgcgcactgcctgttcctcctgggtgtcactggcagccctgtccttcctagagggactggaacctaattctcctgaggctgagggagggtggagggtctcaaggcaacgctggccccacgacggagtgccaggagcactaacagtacccttagcttgctttcctcctccctcctttttattttcaagttcctttttatttctccttgcgtaacaaccttcttcccttctgcaccactgcccgtacccttacccgccccgccacctccttgctaccccactcttgaaaccacagctgttggcagggtccccagctcatgccagcctcatctcctttcttgctagcccccaaagggcctccaggcaacatggggggcccagtcagagagccggcactctcagttgccctctggttgagttggggggcagctctgggggccgtggcttgtgccatggctctgctgacccaacaaacagagctgcagagcctcaggagagaggtgagccggctgcaggggacaggaggcccctcccagaatggggaagggtatccctggcagagtctcccggagcagagttccgatgccctggaagcctgggagaatggggagagatcccggaaaaggagagcagtgctcacccaaaaacagaagaatgactccgatgtgacagaggtgatgtggcaaccagctcttaggcgtgggagaggcctacaggcccaaggatatggtgtccgaatccaggatgctggagtttatctgctgtatagccaggtcctgtttcaagacgtgactttcaccatgggtcaggtggtgtctcgagaaggccaaggaaggcaggagactctattccgatgtataagaagtatgccctcccacccggaccgggcctacaacagctgctatagcgcaggtgtcttccatttacaccaaggggatattctgagtgtcataattccccgggcaagggcgaaacttaacctctctccacatggaaccttcctggggtttgtgaaactgtgattgtgttataaaaagtggctcccagcttggaagaccagggtgggtacatactggagacagccaagagctgagtatataaaggagagggaatgtgcaggaacagaggcgtcttcctgggtttggctccccgttcctcacttttcccttttcattcccaccccctagactttgattttacggatatcttgcttctgttccccatggagctccgaattcttgcgtgtgtgtagatgaggggcgggggacgggcgccaggcattgtccagacctggtcggggcccactggaagcatccagaacagcaccaccatctagcggccgctcgagggaagcacccgccggttggccgaagtccacgaagccgccctctgctagggaaaacccctggttctccatgccacacctctctccaggtgccctctgcctcttcaccccacaagaagccttatcctacgtccttctctccatctatcggaccccagtttccatcactatctccagagatgtagctattatgcgcccgtctacagggggtgcccgacgatgacggtgccttcgcagtcaaattactcttcgggtcccaaggtttggctttcacgcgctccattgccccggcgtggcaggccattccaagcccttccgggctggaactggtgtcggaggagcctcgggtgtatcgtacgccctggtgttggtgttgcctcactcctctgagctcttctttctgatcaagccctgcttaaagttaaataaaatagaatgaatgat

SEQ ID NO: 196250 - DNA, 1971 bp, Homo sapiens
  Payload ID: 18715
  Gene Name: tumor necrosis factor (ligand) superfamily, member 13
  Uniprot ID: O75888
  ENST ID: ENST00000338784
  CDS Start-End: 444-1196
ccgagggtcttccaccctcgccctgaccctggacactgcccagcttggccccccatcctgctcctggcacaatgccctctagccagccaaccttccctcccccaaccctggggccgccccagggttcctgcgcactgcctgttcctcctgggtgtcactggcagccctgtccttcctagagggactggaacctaattctcctgaggctgagggagggtggagggtctcaaggcaacgctggccccacgacggagtgccaggagcactaacagtacccttagcttgctttcctcctccctcctttttattttcaagttcctttttatttctccttgcgtaacaaccttcttcccttctgcaccactgcccgtacccttacccgccccgccacctccttgctaccccactcttgaaaccacagctgttggcagggtccccagctcatgccagcctcatctcctttcttgctagcccccaaagggcctccaggcaacatggggggcccagtcagagagccggcactctcagttgccctctggttgagttggggggcagctctgggggccgtggcttgtgccatggctctgctgacccaacaaacagagctgcagagcctcaggagagaggtgagccggctgcaggggacaggaggcccctcccagaatggggaagggtatccctggcagagtctcccggagcagagttccgatgccctggaagcctgggagaatggggagagatcccggaaaaggagagcagtgctcacccaaaaacagaagaagcagcactctgtcctgcacctggttcccattaacgccacctccaaggatgactccgatgtgacagaggtgatgtggcaaccagctcttaggcgtgggagaggcctacaggcccaaggatatggtgtccgaatccaggatgctggagtttatctgctgtatagccaggtcctgtttcaagacgtgactttcaccatgggtcaggtggtgtctcgagaaggccaaggaaggcaggagactctattccgatgtataagaagtatgccctcccacccggaccgggcctacaacagctgctatagcgcaggtgtcttccatttacaccaaggggatattctgagtgtcataattccccgggcaagggcgaaacttaacctctctccacatggaaccttcctggggtttgtgaaactgtgattgtgttataaaaagtggctcccagcttggaagaccagggtgggtacatactggagacagccaagagctgagtatataaaggagagggaatgtgcaggaacagaggcgtcttcctgggtttggctccccgttcctcacttttcccttttcattcccaccccctagactttgattttacggatatcttgcttctgttccccatggagctccgaattcttgcgtgtgtgtagatgaggggcgggggacgggcgccaggcattgtccagacctggtcggggcccactggaagcatccagaacagcaccaccatctagcggccgctcgagggaagcacccgccggttggccgaagtccacgaagccgccctctgctagggaaaacccctggttctccatgccacacctctctccaggtgccctctgcctcttcaccccacaagaagccttatcctacgtccttctctccatctatcggaccccagtttccatcactatctccagagatgtagctattatgcgcccgtctacagggggtgcccgacgatgacggtgccttcgcagtcaaattactcttcgggtcccaaggtttggctttcacgcgctccattgccccggcgtggcaggccattccaagcccttccgggctggaactggtgtcggaggagcctcgggtgtatcgtacgccctggtgttggtgttgcctcactcctctgagctcttctttctgatcaagccctgcttaaagttaaataaaatagaatgaatgataccccggc

SEQ ID NO: 196251 - DNA, 2195 bp, Homo sapiens
  Payload ID: 18715
  Gene Name: tumor necrosis factor (ligand) superfamily, member 13
  ENST ID: ENST00000380535
  CDS Start-End: 749-1420
ccggaaccctgtgtgctggggaggaatcccgcagtggccggggggcttgaggccgctgctttgtctcttcgtccagagccttatgtaagagcttttctcgggaaacaggaagtcctgcttgccaatttcagcacagggagtagtgcaggccttattccaacacacccggcccagccttaaccccagaactcagccagtttcttgcttccgtgcccctggttctcctccccatcgagcccacccctcctttcccaccttcagtcacccctagtgaactgccccagcgatctctgctgtgcttgaccccgagggtcttccaccctcgccctgaccctggacactgcccagcttggccccccatcctgctcctggcacaatgccctctagccagccaaccttccctcccccaaccctggggccgccccagggttcctgcgcactgcctgttcctcctgggtgtcactggcagccctgtccttcctagagggactggaacctaattctcctgaggctgagggagggtggagggtctcaaggcaacgctggccccacgacggagtgccaggagcactaacagtacccttagcttgctttcctcctccctcctttttattttcaagttcctttttatttctccttgcgtaacaaccttcttcccttctgcaccactgcccgtacccttacccgccccgccacctccttgctaccccactcttgaaaccacagctgttggcagggtccccagctcatgccagcctcatctcctttcttgctagcccccaaagggcctccaggcaacatggggggcccagtcagagagccggcactctcagttgccctctggttgagttggggggcagctctgggggccgtggcttgtgccatggctctgctgacccaacaaacagagctgcagagcctcaggagagaggtgagccggctgcaggggacaggaggcccctcccagaatggggaagggtatccctggcagagtctcccggagcagcagcactctgtcctgcacctggttcccattaacgccacctccaaggatgactccgatgtgacagaggtgatgtggcaaccagctcttaggcgtgggagaggcctacaggcccaaggatatggtgtccgaatccaggatgctggagtttatctgctgtatagccaggtcctgtttcaagacgtgactttcaccatgggtcaggtggtgtctcgagaaggccaaggaaggcaggagactctattccgatgtataagaagtatgccctcccacccggaccgggcctacaacagctgctatagcgcaggtgtcttccatttacaccaaggggatattctgagtgtcataattccccgggcaagggcgaaacttaacctctctccacatggaaccttcctggggtttgtgaaactgtgattgtgttataaaaagtggctcccagcttggaagaccagggtgggtacatactggagacagccaagagctgagtatataaaggagagggaatgtgcaggaacagaggcgtcttcctgggtttggctccccgttcctcacttttcccttttcattcccaccccctagactttgattttacggatatcttgcttctgttccccatggagctccgaattcttgcgtgtgtgtagatgaggggcgggggacgggcgccaggcattgtccagacctggtcggggcccactggaagcatccagaacagcaccaccatctagcggccgctcgagggaagcacccgccggttggccgaagtccacgaagccgccctctgctagggaaaacccctggttctccatgccacacctctctccaggtgccctctgcctcttcaccccacaagaagccttatcctacgtccttctctccatctatcggaccccagtttccatcactatctccagagatgtagctattatgcgcccgtctacagggggtgcccgacgatgacggtgccttcgcagtcaaattactcttcgggtcccaaggtttggctttcacgcgctccattgccccggcgtggcaggccattccaagcccttccgggctggaactggtgtcggaggagcctcgggtgtatcgtacgccctggtgttggtgttgcctcactcctctgagctcttctttctgatcaagccctgcttaaagttaaataaaatagaatgaatgataccccggc

SEQ ID NO: 196252 - DNA, 726 bp, Homo sapiens
  Payload ID: 18715
  Gene Name: tumor necrosis factor (ligand) superfamily, member 13
  Uniprot ID: O75888
  ENST ID: ENST00000396542
  CDS Start-End: 107-724
cggaaccctgtgtgctggggaggaatcccgcagtggccggggggcttgaggccgctgctttgtctcttcgtccagagccttatcccccaaagggcctccaggcaacatggggggcccagtcagagagccggcactctcagttgccctctggttgagttggggggcagctctgggggccgtggcttgtgccatggctctgctgacccaacaaacagagctgcagagcctcaggagagaggtgagccggctgcaggggacaggaggcccctcccagaatggggaagggtatccctggcagagtctcccggagcagcactctgtcctgcacctggttcccattaacgccacctccaaggatgactccgatgtgacagaggtgatgtggcaaccagctcttaggcgtgggagaggcctacaggcccaaggatatggtgtccgaatccaggatgctggagtttatctgctgtatagccaggtcctgtttcaagacgtgactttcaccatgggtcaggtggtgtctcgagaaggccaaggaaggcaggagactctattccgatgtataagaagtatgccctcccacccggaccgggcctacaacagctgctatagcgcaggtgtcttccatttacaccaaggggatattctgagtgtcataattccccgggcaagggcgaaacttaacctctctccacatggaaccttcctggggtttgtgaaactgtgatt

SEQ ID NO: 196253 - DNA, 1593 bp, Homo sapiens
  Payload ID: 18715
  Gene Name: tumor necrosis factor (ligand) superfamily, member 13
  Uniprot ID: O75888
  ENST ID: ENST00000396545
  CDS Start-End: 254-997
cctaattctcctgaggctgagggagggtggagggtctcaaggcaacgctggccccacgacggagtgccaggagcactaacagtacccttagcttgctttcctcctccctcctttttattttcaagttcctttttatttctccttgcgtaacaaccttcttcccttctgcaccactgcccgtacccttacccgccccgccacctccttgctaccccactcttgaaaccacagctgttggcagggtccccagctcatgccagcctcatctcctttcttgctagcccccaaagggcctccaggcaacatggggggcccagtcagagagccggcactctcagttgccctctggttgagttggggggcagctctgggggccgtggcttgtgccatggctctgctgacccaacaaacagagctgcagagcctcaggagagaggtgagccggctgcaggggacaggaggcccctcccagaatggggaagggtatccctggcagagtctcccggagcagagttccgatgccctggaagcctgggagaatggggagagatcccggaaaaggagagcagtgctcacccaaaaacagaagaagcagcactctgtcctgcacctggttcccattaacgccacctccaaggatgactccgatgtgacagaggtgatgtggcaaccagctcttaggcgtgggagaggcctacaggcccaaggatatggtgtccgaatccaggatgctggagtttatctgctgtatagccaggtcctgtttcaagacgtgactttcaccatgggtcaggtggtgtctcgagaaggccaaggaaggcaggagactctattccgatgtataagaagtatgccctcccacccggaccgggcctacaacagctgctatagcgcaggtgtcttccatttacaccaaggggatattctgagtgtcataattccccgggcaagggcgaaacttaacctctctccacatggaaccttcctgggactttgattttacggatatcttgcttctgttccccatggagctccgaattcttgcgtgtgtgtagatgaggggcgggggacgggcgccaggcattgtccagacctggtcggggcccactggaagcatccagaacagcaccaccatctagcggccgctcgagggaagcacccgccggttggccgaagtccacgaagccgccctctgctagggaaaacccctggttctccatgccacacctctctccaggtgccctctgcctcttcaccccacaagaagccttatcctacgtccttctctccatctatcggaccccagtttccatcactatctccagagatgtagctattatgcgcccgtctacagggggtgcccgacgatgacggtgccttcgcagtcaaattactcttcgggtcccaaggtttggctttcacgcgctccattgccccggcgtggcaggccattccaagcccttccgggctggaactggtgtcggaggagcctcgggtgtatcgtacgccctggtgttggtgttgcctcactcctctgagctcttctttctgatcaagccctgcttaaagttaaataaaatagaatgaatgata

SEQ ID NO: 196254 - DNA, 549 bp, Homo sapiens
  Payload ID: 18715
  Gene Name: tumor necrosis factor (ligand) superfamily, member 13
  ENST ID: ENST00000438470
  CDS Start-End: 100-549
ctgtgtgctggggaggaatcccgcagtggccggggggcttgaggccgctgctttgtctcttcgtccagagccttatcccccaaagggcctccaggcaacatggggggcccagtcagagagccggcactctcagttgccctctggttgagttggggggcagctctgggggccgtggcttgtgccatggctctgctgacccaacaaacagagctgcagagcctcaggagagaggtgagccggctgcaggggacaggaggcccctcccagaatggggaagggtatccctggcagagtctcccggagcagagttccgatgccctggaagcctgggagaatggggagagatcccggaaaaggagagcagtgctcacccaaaaacagaagaatgactccgatgtgacagaggtgatgtggcaaccagctcttaggcgtgggagaggcctacaggcccaaggatatggtgtccgaatccaggatgctggagtttatctgctgtatagccaggtcctgtttcaagacgtgactttcaccatgggtcaggtggtgtct

SEQ ID NO: 196255 - DNA, 573 bp, Homo sapiens
  Payload ID: 18715
  Gene Name: tumor necrosis factor (ligand) superfamily, member 13
  ENST ID: ENST00000436057
  CDS Start-End: 98-573
gtgtgctggggaggaatcccgcagtggccggggggcttgaggccgctgctttgtctcttcgtccagagccttatcccccaaagggcctccaggcaacatggggggcccagtcagagagccggcactctcagttgccctctggttgagttggggggcagctctgggggccgtggcttgtgccatggctctgctgacccaacaaacagagctgcagagcctcaggagagaggtgagccggctgcaggggacaggaggcccctcccagaatggggaagggtatccctggcagagtctcccggagcagagttccgatgccctggaagcctgggagaatggggagagatcccggaaaaggagagcagtgctcacccaaaaacagaagaagcagcactctgtcctgcacctggttcccattaacgccacctccaaggatgactccgatgtgacagaggtgatgtggcaaccagctcttaggcgtgggagaggcctacaggcccaaggatatggtgtccgaatccaggatgctggagtttatctgctgtatagccaggtcctgtttcaagacgtgacttt

SEQ ID NO: 196256 - DNA, 959 bp, Homo sapiens
  Payload ID: 18715
  Gene Name: tumor necrosis factor (ligand) superfamily, member 13
  ENST ID: ENST00000483039
  CDS Start-End: 156-500
ccggaaccctgtgtgctggggaggaatcccgcagtggccggggggcttgaggccgctgctttgtctcttcgtccagagccttatagcagcactctgtcctgcacctggttcccattaacgccacctccaaggatgactccgatgtgacagaggtgatgtggcaaccagctcttaggcgtgggagaggcctacaggcccaaggatatggtgtccgaatccaggatgctggagtttatctgctgtatagccaggtcctgtttcaagacgtgactttcaccatgggtcaggtggtgtctcgagaaggccaaggaaggcaggagactctattccgatgtataagaagtatgccctcccacccggaccgggcctacaacagctgctatagcgcaggtgtcttccatttacaccaaggggatattctgagtgtcataattccccgggcaagggcgaaacttaacctctctccacatggaaccttcctggggtttgtgaaactgtgattgtgttataaaaagtggctcccagcttggaagaccagggtgggtacatactggagacagccaagagctgagtatataaaggagagggaatgtgcaggaacagaggcgtcttcctgggtttggctccccgttcctcacttttcccttttcattcccaccccctagactttgattttacggatatcttgcttctgttccccatggagctccgaattcttgcgtgtgtgtagatgaggggcgggggacgggcgccaggcattgtccagacctggtcggggcccactggaagcatccagaacagcaccaccatctagcggccgctcgagggaagcacccgccggttggccgaagtccacgaagccgccctctgctagggaaaacccctggttctccatgccacacctctctccaggtgccctctgcctcttcaccccacaagaagccttatcctacgtcctt

SEQ ID NO: 196257 - DNA, 955 bp, Homo sapiens
  Payload ID: 18715
  Gene Name: tumor necrosis factor (ligand) superfamily, member 13
  Uniprot ID: O75888
  ENST ID: ENST00000625791
  CDS Start-End: 282-950
agccctgtccttcctagagggactggaacctaattctcctgaggctgagggagggtggagggtctcaaggcaacgctggccccacgacggagtgccaggagcactaacagtacccttagcttgctttcctcctccctcctttttattttcaagttcctttttatttctccttgcgtaacaaccttcttcccttctgcaccactgcccgtacccttacccgccccgccacctccttgctaccccactcttgaaaccacagctgttggcagggtccccagctcatgccagcctcatctcctttcttgctagcccccaaagggcctccaggcaacatggggggcccagtcagagagccggcactctcagttgccctctggttgagttggggggcagctctgggggccgtggcttgtgccatggctctgctgacccaacaaacagagctgcagagcctcaggagagaggtgagccggctgcaggggacaggaggcccctcccagaatggggaagggtatccctggcagagtctcccggagcagcactctgtcctgcacctggttcccattaacgccacctccaaggatgactccgatgtgacagaggtgatgtggcaaccagctcttaggcgtgggagaggcctacaggcccaaggatatggtgtccgaatccaggatgctggagtttatctgctgtatagccaggtcctgtttcaagacgtgactttcaccatgggtcaggtggtgtctcgagaaggccaaggaaggcaggagactctattccgatgtataagaagtatgccctcccacccggaccgggcctacaacagctgctatagcgcaggtgtcttccatttacaccaaggggatattctgagtgtcataattccccgggcaagggcgaaacttaacctctctccacatggaaccttcctggggtttgtgaaactgtgattgtg

SEQ ID NO: 196258 - DNA, 2582 bp, Homo sapiens
  Payload ID: 18716
  Gene Name: tumor necrosis factor (ligand) superfamily, member 13b
  Uniprot ID: Q9Y275
  ENST ID: ENST00000375887
  CDS Start-End: 179-1036
aggggtagagatgcagaaaggcagaaaggagaaaattcaggataactctcctgaggggtgagccaagccctgccatgtagtgcacgcaggacatcaacaaacacagataacaggaaatgatccattccctgtggtcacttattctaaaggccccaaccttcaaagttcaagtagtgatatggatgactccacagaaagggagcagtcacgccttacttcttgccttaagaaaagagaagaaatgaaactgaaggagtgtgtttccatcctcccacggaaggaaagcccctctgtccgatcctccaaagacggaaagctgctggctgcaaccttgctgctggcactgctgtcttgctgcctcacggtggtgtctttctaccaggtggccgccctgcaaggggacctggccagcctccgggcagagctgcagggccaccacgcggagaagctgccagcaggagcaggagcccccaaggccggcctggaggaagctccagctgtcaccgcgggactgaaaatctttgaaccaccagctccaggagaaggcaactccagtcagaacagcagaaataagcgtgccgttcagggtccagaagaaacagtcactcaagactgcttgcaactgattgcagacagtgaaacaccaactatacaaaaaggatcttacacatttgttccatggcttctcagctttaaaaggggaagtgccctagaagaaaaagagaataaaatattggtcaaagaaactggttacttttttatatatggtcaggttttatatactgataagacctacgccatgggacatctaattcagaggaagaaggtccatgtctttggggatgaattgagtctggtgactttgtttcgatgtattcaaaatatgcctgaaacactacccaataattcctgctattcagctggcattgcaaaactggaagaaggagatgaactccaacttgcaataccaagagaaaatgcacaaatatcactggatggagatgtcacattttttggtgcattgaaactgctgtgacctacttacaccatgtctgtagctattttcctccctttctctgtacctctaagaagaaagaatctaactgaaaataccaaaaaaaaaaaaaaaaaaaaaaaaaaaaaaagtagttaccattgccttttctgtgagctatttgttttggtttgctgaaactagtccaaaacaggaaatttaacagacagccacagccaaagagtgtcatgtgaattacaagaaatagagcccatttagggaaagatagaactagaaaggcttttcattataattccatgttgaacaattgagtcatagcttcttatcttggaggaaggacacaattcaaaggggcagtaaggattttgtaaaacgtggcatccataatttactatggagcaagtgcccacatctctaggacattaagacatttatgagaaatctcaggattcatcttctgtttttatgttaaatgcactccctccttttcagttaacattataaaaagtaaaaaatgaaaattttagaaatcttgcattagacacatgaaaaaataactaaaagtttaaatttaaatatgaaacaattttgctgaaaatagtatccatatactatttaagtcttttatggttatttcaagtatacaatttctatctgtaatgtaatatattacccacacatttttttcacaggagagagagaatatcctcatttgtttatgctcatgtgtattttctatagtgaatttcagaaacttttaatatcaggtaatttcaatttatgcctataaagcattgattgaaaaataactagaattgtgcatatataacacataatctccaacagaagttactgaatacattcatactaatgtaatgtaatttccctttatttcttgctcttctgtttcaaactgctgctattgtagtttacatatcccaacctttaaaaatattcctcttattagctttatattcactttatagaagttgagttttaattaaaattcttggcatcctgaagtatgtcacatagcatgtgctccttataaatatgttgatatctcagaagacagcatcccggttttcattttataaagtaccatacttaagaatgctgtaatacttatcttttataacatgtttccttcgctttgcttgtcttttatgtcatcagttttaactgtttacttcatttaacagtttacatcattcaacagtttacttcattaaacagtaggtggaaaaatagatgccagtctatgaaaatcttcccatctatatcaaaatacttttcaaggatatacttttcaaaacaaacgatttaaattttatgtttaaaatataaactttagatttaaactttatttaaatatctggttcctatgattttgacttcagtaagttcaaataaaatatattttgcaattcatttttacattataatttaaaaagaagaagcgataagtggagtcagtttcaatgctaggtggggtggttaatgatttttctggtgttgctgctaatgtggattaacaaataaaaacattcattgccttttgcctcat

SEQ ID NO: 196259 - DNA, 2614 bp, Homo sapiens
  Payload ID: 18716
  Gene Name: tumor necrosis factor (ligand) superfamily, member 13b
  Uniprot ID: Q9Y275
  ENST ID: ENST00000430559
  CDS Start-End: 268-1068
gaaattcttacaaaaactgaaagtgaaatgaggaagacagattgagcaatccaatcggagggtaaatgccagcaaacctactgtacagtaggggtagagatgcagaaaggcagaaaggagaaaattcaggataactctcctgaggggtgagccaagccctgccatgtagtgcacgcaggacatcaacaaacacagataacaggaaatgatccattccctgtggtcacttattctaaaggccccaaccttcaaagttcaagtagtgatatggatgactccacagaaagggagcagtcacgccttacttcttgccttaagaaaagagaagaaatgaaactgaaggagtgtgtttccatcctcccacggaaggaaagcccctctgtccgatcctccaaagacggaaagctgctggctgcaaccttgctgctggcactgctgtcttgctgcctcacggtggtgtctttctaccaggtggccgccctgcaaggggacctggccagcctccgggcagagctgcagggccaccacgcggagaagctgccagcaggagcaggagcccccaaggccggcctggaggaagctccagctgtcaccgcgggactgaaaatctttgaaccaccagctccaggagaaggcaactccagtcagaacagcagaaataagcgtgccgttcagggtccagaagaaacaggatcttacacatttgttccatggcttctcagctttaaaaggggaagtgccctagaagaaaaagagaataaaatattggtcaaagaaactggttacttttttatatatggtcaggttttatatactgataagacctacgccatgggacatctaattcagaggaagaaggtccatgtctttggggatgaattgagtctggtgactttgtttcgatgtattcaaaatatgcctgaaacactacccaataattcctgctattcagctggcattgcaaaactggaagaaggagatgaactccaacttgcaataccaagagaaaatgcacaaatatcactggatggagatgtcacattttttggtgcattgaaactgctgtgacctacttacaccatgtctgtagctattttcctccctttctctgtacctctaagaagaaagaatctaactgaaaataccaaaaaaaaaaaaaaaaaaaaaaaaaaaaaaagtagttaccattgccttttctgtgagctatttgttttggtttgctgaaactagtccaaaacaggaaatttaacagacagccacagccaaagagtgtcatgtgaattacaagaaatagagcccatttagggaaagatagaactagaaaggcttttcattataattccatgttgaacaattgagtcatagcttcttatcttggaggaaggacacaattcaaaggggcagtaaggattttgtaaaacgtggcatccataatttactatggagcaagtgcccacatctctaggacattaagacatttatgagaaatctcaggattcatcttctgtttttatgttaaatgcactccctccttttcagttaacattataaaaagtaaaaaatgaaaattttagaaatcttgcattagacacatgaaaaaataactaaaagtttaaatttaaatatgaaacaattttgctgaaaatagtatccatatactatttaagtcttttatggttatttcaagtatacaatttctatctgtaatgtaatatattacccacacatttttttcacaggagagagagaatatcctcatttgtttatgctcatgtgtattttctatagtgaatttcagaaacttttaatatcaggtaatttcaatttatgcctataaagcattgattgaaaaataactagaattgtgcatatataacacataatctccaacagaagttactgaatacattcatactaatgtaatgtaatttccctttatttcttgctcttctgtttcaaactgctgctattgtagtttacatatcccaacctttaaaaatattcctcttattagctttatattcactttatagaagttgagttttaattaaaattcttggcatcctgaagtatgtcacatagcatgtgctccttataaatatgttgatatctcagaagacagcatcccggttttcattttataaagtaccatacttaagaatgctgtaatacttatcttttataacatgtttccttcgctttgcttgtcttttatgtcatcagttttaactgtttacttcatttaacagtttacatcattcaacagtttacttcattaaacagtaggtggaaaaatagatgccagtctatgaaaatcttcccatctatatcaaaatacttttcaaggatatacttttcaaaacaaacgatttaaattttatgtttaaaatataaactttagatttaaactttatttaaatatctggttcctatgattttgacttcagtaagttcaaataaaatatattttgcaattcatttttacattataatttaaaaagaagaagcgataagtggagtcagtttcaatgctaggtggggtggttaatgatttttctggtgttgctgctaatgtggattaacaaataaaaacattcattgccttttgcctcat

SEQ ID NO: 196260 - DNA, 495 bp, Homo sapiens
  Payload ID: 18716
  Gene Name: tumor necrosis factor (ligand) superfamily, member 13b
  Uniprot ID: Q9Y275
  ENST ID: ENST00000542136
  CDS Start-End: 1-495
atggatgactccacagaaagggagcagtcacgccttacttcttgccttaagaaaagagaagaaatgaaactgaaggagtgtgtttccatcctcccacggaaggaaagcccctctgtccgatcctccaaagacggaaagctgctggctgcaaccttgctgctggcactgctgtcttgctgcctcacggtggtgtctttctaccaggtggccgccctgcaaggggacctggccagcctccgggcagagctgcagggccaccacgcggagaagctgccagcaggagcaggagcccccaaggccggcctggaggaagctccagctgtcaccgcgggactgaaaatctttgaaccaccagctccaggagaaggcaactccagtcagaacagcagaaataagcgtgccgttcagggtccagaagaaacagtcactcaagactgcttgcaactgattgcagacagtgaaacaccaactatacaaaaaggttttatatactga

SEQ ID NO: 196261 - DNA, 4336 bp, Homo sapiens
  Payload ID: 18717
  Gene Name: tumor necrosis factor (ligand) superfamily, member 14
  Uniprot ID: O43557
  ENST ID: ENST00000245912
  CDS Start-End: 49-663
gaggttgaaggacccaggcgtgtcagccctgctccagacaccttgggcatggaggagagtgtcgtacggccctcagtgtttgtggtggatggacagaccgacatcccattcacgaggctgggacgaagccaccggagacagtcgtgcagtgtggcccgggacggacctgcaggctcctgggagcagctgatacaagagcgaaggtctcacgaggtcaacccagcagcgcatctcacaggggccaactccagcttgaccggcagcggggggccgctgttatgggagactcagctgggcctggccttcctgaggggcctcagctaccacgatggggcccttgtggtcaccaaagctggctactactacatctactccaaggtgcagctgggcggtgtgggctgcccgctgggcctggccagcaccatcacccacggcctctacaagcgcacaccccgctaccccgaggagctggagctgttggtcagccagcagtcaccctgcggacgggccaccagcagctcccgggtctggtgggacagcagcttcctgggtggtgtggtacacctggaggctggggagaaggtggtcgtccgtgtgctggatgaacgcctggttcgactgcgtgatggtacccggtcttacttcggggctttcatggtgtgaaggaaggagcgtggtgcattggacatgggtctgacacgtggagaactcagagggtgcctcaggggaaagaaaactcacgaagcagaggctgggcgtggtggctctcgcctgtaatcccagcactttgggaggccaaggcaggcggatcacctgaggtcaggagttcgagaccagcctggctaacatggcaaaaccccatctctactaaaaatacaaaaattagccggacgtggtggtgcctgcctgtaatccagctactcaggaggctgaggcaggataattttgcttaaacccgggaggcggaggttgcagtgagccgagatcacaccactgcactccaacctgggaaacgcagtgagactgtgcctcaaaaaaaagaaaggaagaaaaaagaaaactcaggaaacagatcttgggggacactccagggaacccaaaactcaaaggcggagagctcagtgggcaccaccaaggcgagatgaagccccagcaggcaccttcagaagacccacgtagactgcagaccctgccacggacaatactaaggacaaaaacccagagacttggggtctgtgggcccccaaacatggggtaaagttgatttgcctgatattcaggaagaaggggtgaggggtgggtatttatgcttttgattcagaagaaagtggggcttgggattccagggacttggctgggggtgggaaacttcatccacttccctactctcatcatgagtacggacagggtgggcgggagactgatcatcgggactcatcatgaagagcccagccccaccccacatactcagatcccacccacagactggtggccacacctcagcctggtcacaaagagttacactcagatacatgagcacggcagcgtgctcataactgtttaacaaccagctgtcctgggagggggacagctttgtaatgtttgccaatttccatggtgtaaatgctaccaccatggctgatttcatcactgccaagcatagacatccctaataggacaccacggatctgtccccggcatccggcccagggcctggcacaaagcatgctctagggaaatgcttgctgattgaaaggaaggaagaatgactctacagtcacacctatggcatcccacaaaatctgtcacatggctgcataatctcagccactctttcacaactatagactcatacacgcgaagtgccagattcatgcacaaccacacaatcacatggaagtcacagacggcatcacagacagtcacagcactgtgtgtatgttataacacaagcacacaaaactcagacagcatcccagctacacagccactcccagaggtgtcaccgtcacacttggtaattaatactcattacattagacacagacagaccaagttatagtcagacctggttacacacatacacacacacaatatcaccatgacaaatacacattacacacacacaacatcacaatgacaaacacacattacacacacaacatcacgatgacaaacacacattacacacacaacatcacgatgacaaacacacattacacacacatcacaatgacaaacacaacattacacacacacaacatcacaatgacacacacatcacacacacatcacaatgacaaacacacaacattacacacatatacacacagcctgagggccctccccagcccagactaacacatctcggggtgaggaccagaccttgttcataaccctgggcctcttaaccactgatctttgaaataaatggcaaatagttgtacctggatctgtctagttcttaggggaacaaactgaagaagggtggagaggaattgtcaggcctaaagagccccacagggaaagggaggagtcggatggggggcaaccatcagcaacaagtggtggctcctagaggcagagggatggaggtaatgacccatggaggtcattctacagatgaggaacctggacccagttggctcaagtccatgcaggaaatgtgggggaaaccagagacctcacgtctggatctggcttcctctccaatccacaattcctgaggaagtagaggctacatcccgcaagacgcccttattagacacatccaggacagaatgacaatccgccaagccagctggaagcataaaacacagggagctggtgggttgggtgggggcagataatgatatgcatacaaattagagggtctatgcaaatgagcattgctgcagtgtggctggagggaatccttagttcctaggattctaggatatgggtttcgaccccagaggtgaatgtattgttattattgttttgttgttgttgtgaatgacaagtcaaaatttgtgggttattgttgttatcgccaatagtattcttgtcattgttgcacagtacagagatgaaggaaacagattttgcaatcagatgatcctgggttctgagtccactctgccactcaccagctatatgacctccagcaatttccatcacctctcaatgcttcagtttccccatcggcaagatggttgtggggggagaggaacaacagtacagattcaccatcccaaattcaaaatgctccaaaatctaggccgggcgtggtggctcatacctgtaatcccagcactttgggaggtcaaagtggacggataacctgaggtcaggagctccagaccagcctggccaacatggcgaaaccccatctctactaaaaatacaaaaaattacctgggtgtggtggggggcacctgtaaccccagctactcgggaggctgaggcaggaaccctggaggttgaggttgcagtgagctgagatcacaccactgcactccagcctgggtgacagagcaaggctcccatctcaaaaaacaaaaaaacatgctccaaaatctgaaactctttgagccccagtgtgatgccacaagtgggaaattccacaactcatcacatgtgatagattgcagtggaaatgcaggcacacaccacgaagtttactcagcatcctcaaaggaaatccccgtcagtagctatatatcattttctcacatgccagataggtatctctcatcttttactgttaggtacttctgtgttgaataggtggaggaaaatgattgctggttagtagtatataaattcagagtcaggaaggatggtgatgtcggctgggtgcagtggctcatgcctgtaattccaatgtgataccctaccttgtgtttaacgtgattgactctcccttagctgagagggccaggcagactctattttggcttcttcgcttgcagtctctcacccaccccccttcctcaaggacttaagctgactcccagcacatccaagaatgcgattactgataagatactgtgacaagctatatccacaattcccaggaattcgtccggttgatagcacccaaagcccccgcgtctatcaccttgtgatagatttaaagcccctgcacctggaactgtttgtttttctgttaccatttatctttttcactttcttgcctgttttgcttctgtaaaattgcttcagctcggctccctcttccccttctaaaccaaggtataaaaagaaacctagccccttctttggggtggagagaattttgagcgctagccgtctctcagtcgccggctaataaaggactcctgaattagtctaa

SEQ ID NO: 196262 - DNA, 1476 bp, Homo sapiens
  Payload ID: 18717
  Gene Name: tumor necrosis factor (ligand) superfamily, member 14
  Uniprot ID: O43557
  ENST ID: ENST00000599359
  CDS Start-End: 383-1105
cgagactccatctcaaaaacaaaacaaataaacgaacaaaaaaacccacaacgtattattttcttgtttacgaggtttcttgtctctctggctccaccagaagaggagcagggacccttcttgctgttgttcattgctgcatcccccacaccgagagcagagcctggcatgggcagaaagtcctcagtcgatatttggtggccccaagcgaatgaagcatccaagaagggaaagctgggggctccccactgcacttgccacctgagtcacattttcagaagcctctggaaagtcgtgcacagcccaggagtgttgagcaatttcggtttcctctgaggttgaaggacccaggcgtgtcagccctgctccagacaccttgggcatggaggagagtgtcgtacggccctcagtgtttgtggtggatggacagaccgacatcccattcacgaggctgggacgaagccaccggagacagtcgtgcagtgtggcccgggtgggtctgggtctcttgctgttgctgatgggggccgggctggccgtccaaggctggttcctcctgcagctgcactggcgtctaggagagatggtcacccgcctgcctgacggacctgcaggctcctgggagcagctgatacaagagcgaaggtctcacgaggtcaacccagcagcgcatctcacaggggccaactccagcttgaccggcagcggggggccgctgttatgggagactcagctgggcctggccttcctgaggggcctcagctaccacgatggggcccttgtggtcaccaaagctggctactactacatctactccaaggtgcagctgggcggtgtgggctgcccgctgggcctggccagcaccatcacccacggcctctacaagcgcacaccccgctaccccgaggagctggagctgttggtcagccagcagtcaccctgcggacgggccaccagcagctcccgggtctggtgggacagcagcttcctgggtggtgtggtacacctggaggctggggagaaggtggtcgtccgtgtgctggatgaacgcctggttcgactgcgtgatggtacccggtcttacttcggggctttcatggtgtgaaggaaggagcgtggtgcattggacatgggtctgacacgtggagaactcagagggtgcctcaggggaaagaaaactcacgaagcagaggctgggcgtggtggctctcgcctgtaatcccagcactttgggaggccaaggcaggcggatcacctgaggtcaggagttcgagaccagcctggctaacatggcaaaaccccatctctactaaaaatacaaaaattagccggacgtggtggtgcctgcctgtaatccagctactcaggaggctgaggcaggataattttgcttaaacccgggaggcggaggttgcagtgagccgagatcacaccactgcactccaacctgggaaacgcagtgagactgtgcctcaa

SEQ ID NO: 196263 - DNA, 2789 bp, Homo sapiens
  Payload ID: 18718
  Gene Name: tumor necrosis factor (ligand) superfamily, member 15
  ENST ID: ENST00000374044
  CDS Start-End: 1133-1657
agtgcaggtatctcatggagggttttttggatgtcttcttccctgtgggggggttccaaaggcccatgtctcttgggcattttctttcagattctatcagccctctctctttctctcctgtctctctctttcattcatacactgagtcattcagaaatggcttctctccaactcggagctgcaagtaattctggatctggtcacaaacaaaaagtccccagagttgccaatttatctagttcatctgtgccctgttcaagatgatgtaactaaacatttaccttcagggaggtgtttccaaagaattttcatcgatatatagaaatcaagagaaattccatactatcaccaaatcaagagaaattccatactatcaccagttggccaactttccaagtctagtgcagaaatccaaggcacctcacacctagagttcctatacctctgagactccagaggaaagaacaagacagtgcagaaggatatgttagaacccactgaaaacctagaaggttaaaaaggaagcataccctcctgacctataagaaaattttcagtctgcagggggatatccttgtggcccaagacattggtgttatcatttgactaagaggaaattatttgtggtgagctctgagtgaggattaggaccagggagatgccaagtttctatcacttacctcatgcctgtaagacaagtgttttgttccaattgatgaatggggataaaacagttcagccaatcacttatggggcaaagaatgggaatttgaagggtctggtgcctggccttgtcatacgtaaacaagagaggcatcgatgagttttatctgagtcatttgggaaaggataattcttgcagcaagccattttcctaaacacagaagaatagggggattccttaaccttcattgttctccaggatcataggtctcaggtaaaattaaaaattttcaggtcagaccactcagtctcagaaaggcaaagtaatttgccccaggtcactagtccaagatgttattctctttgaacaaatgtgtatgtccagtcacatattcttcattcattcctccccaaagcagtttttagctgttaggtatattcgatcactttagtctattttgaaaatgatatgagacactttttaagcaaagtctacagtttcccaatgagaaaattaatcctctttcttgtctttccagttgtgagacaaactcccacacagcactttaaaaatcagttcccagctctgcactgggaacatgaactaggcctggccttcaccaagaaccgaatgaactataccaacaaattcctgctgatcccagagtcgggagactacttcatttactcccaggtcacattccgtgggatgacctctgagtgcagtgaaatcagacaagcaggccgaccaaacaagccagactccatcactgtggtcatcaccaaggtaacagacagctaccctgagccaacccagctcctcatggggaccaagtctgtatgcgaagtaggtagcaactggttccagcccatctacctcggagccatgttctccttgcaagaaggggacaagctaatggtgaacgtcagtgacatctctttggtggattacacaaaagaagataaaaccttctttggagccttcttactataggaggagagcaaatatcattatatgaaagtcctctgccaccgagttcctaattttctttgttcaaatgtaattataaccaggggttttcttggggccgggagtagggggcattccacagggacaacggtttagctatgaaatttggggcccaaaatttcacacttcatgtgccttactgatgagagtactaactggaaaaaggctgaagagagcaaatatattattaagatgggttggaggattggcgagtttctaaatattaagacactgatcactaaatgaatggatgatctactcgggtcaggattgaaagagaaatatttcaacaccttcctgctatacaatggtcaccagtggtccagttattgttcaatttgatcataaatttgcttcaattcaggagctttgaaggaagtccaaggaaagctctagaaaacagtataaactttcagaggcaaaatccttcaccaatttttccacatactttcatgccttgcctaaaaaaaatgaaaagagagttggtatgtctcatgaatgttcacacagaaggagttggttttcatgtcatctacagcatatgagaaaagctacctttcttttgattatgtacacagatatctaaataaggaagtatgagtttcacatgtatatcaaaaatacaacagttgcttgtattcagtagagttttcttgcccacctattttgtgctgggttctaccttaacccagaagacactatgaaaaacaagacagactccactcaaaatttatatgaacaccactagatacttcctgatcaaacatcagtcaacatactctaaagaataactccaagtcttggccaggcgcagtggctcacacctgtaatcccaacactttgggaggccaaggtgggtggatcatctaaggccgggagttcaagaccagcctgaccaacgtggagaaaccccatctctactaaaaatacaaaattagccgggcgtggtagcgcatggctgtaatcctggctactcaggaggccgaggcagaagaattgcttgaactggggaggcagaggttgcggtgagcccagatcgcgccattgcactccagcctgggtaacaagagcaaaactctgtccaaaaaaaaaaaaa

SEQ ID NO: 196264 - DNA, 6687 bp, Homo sapiens
  Payload ID: 18718
  Gene Name: tumor necrosis factor (ligand) superfamily, member 15
  Uniprot ID: O95150
  ENST ID: ENST00000374045
  CDS Start-End: 115-870
aaaagggaaggaggagactgagtgattaagtcacccactgtgagagctggtcttctatttaatgggggctctctctgcccaggagtcagaggtgcctccaggagcagcaggagcatggccgaggatctgggactgagctttggggaaacagccagtgtggaaatgctgccagagcacggcagctgcaggcccaaggccaggagcagcagcgcacgctgggctctcacctgctgcctggtgttgctccccttccttgcaggactcaccacatacctgcttgtcagccagctccgggcccagggagaggcctgtgtgcagttccaggctctaaaaggacaggagtttgcaccttcacatcagcaagtttatgcacctcttagagcagacggagataagccaagggcacacctgacagttgtgagacaaactcccacacagcactttaaaaatcagttcccagctctgcactgggaacatgaactaggcctggccttcaccaagaaccgaatgaactataccaacaaattcctgctgatcccagagtcgggagactacttcatttactcccaggtcacattccgtgggatgacctctgagtgcagtgaaatcagacaagcaggccgaccaaacaagccagactccatcactgtggtcatcaccaaggtaacagacagctaccctgagccaacccagctcctcatggggaccaagtctgtatgcgaagtaggtagcaactggttccagcccatctacctcggagccatgttctccttgcaagaaggggacaagctaatggtgaacgtcagtgacatctctttggtggattacacaaaagaagataaaaccttctttggagccttcttactataggaggagagcaaatatcattatatgaaagtcctctgccaccgagttcctaattttctttgttcaaatgtaattataaccaggggttttcttggggccgggagtagggggcattccacagggacaacggtttagctatgaaatttggggcccaaaatttcacacttcatgtgccttactgatgagagtactaactggaaaaaggctgaagagagcaaatatattattaagatgggttggaggattggcgagtttctaaatattaagacactgatcactaaatgaatggatgatctactcgggtcaggattgaaagagaaatatttcaacaccttcctgctatacaatggtcaccagtggtccagttattgttcaatttgatcataaatttgcttcaattcaggagctttgaaggaagtccaaggaaagctctagaaaacagtataaactttcagaggcaaaatccttcaccaatttttccacatactttcatgccttgcctaaaaaaaatgaaaagagagttggtatgtctcatgaatgttcacacagaaggagttggttttcatgtcatctacagcatatgagaaaagctacctttcttttgattatgtacacagatatctaaataaggaagtatgagtttcacatgtatatcaaaaatacaacagttgcttgtattcagtagagttttcttgcccacctattttgtgctgggttctaccttaacccagaagacactatgaaaaacaagacagactccactcaaaatttatatgaacaccactagatacttcctgatcaaacatcagtcaacatactctaaagaataactccaagtcttggccaggcgcagtggctcacacctgtaatcccaacactttgggaggccaaggtgggtggatcatctaaggccgggagttcaagaccagcctgaccaacgtggagaaaccccatctctactaaaaatacaaaattagccgggcgtggtagcgcatggctgtaatcctggctactcaggaggccgaggcagaagaattgcttgaactggggaggcagaggttgcggtgagcccagatcgcgccattgcactccagcctgggtaacaagagcaaaactctgtccaaaaaaaaaaaaataaaataataactccaagcctttaaaaaatatcatctgaaactgttacatcagatttctggcactctactgactgtggaagatagccagctgactggaagatagccagctgattagttccctgaagaaacctgaagacagatacctggttaactagatcaactacactgccaacttgtttgatgctgagagacaatggacttattccatgggggaagggaaaaaagaagtcaatcaccaaatctgaagaagttaacctagatctttgaggtttgatttgcaactttatatgcagagtattatgtgggtattttcccttaaaatattcaaagggatttacatatgggattagctaatgagcctagccaagaccttccctggaggacaggctggtcattgcggaggtcccttctgtgcttcagtgggttcatatcctctagtccgtatgattttcctacgctaatatgtcaagggcaggagaggcagctctgttctcctagcctttgttgacttgtctgcaaagcaggaatctgcccatttgtttccaaggagcaaatgagctcatgagaatgaaagatgttaacttcatgcattctgtgccatctgagcatttcggtattatatgactggtgacccttggcccgtattataaatgcttcctatcctgggagacctcatggatgagtctgagaggaaatttggcaccaaaatcactctcactctggtttccagtagactatagaggcagagaggcatttgagaggctcctgagcaaagtgtccagtgtagcaggagcacttcattaatatttattgagttataattaaataaaaattaatttctgatttctcagtttggaggttaaggctctaaatatattttctaacctctgctaggctaacttaagccaggcctttttcttgccttccctttctcaaaacagtcagcacagactcagtgggagcacagaggagtgtggtcacctccacctggctcaccagagtcttcatagaggaagtgaagcctggaagaaactgggcgggccccagatgaccacagggaaagggcatctcagatggaggaattacccttgacttaaagcagaaaagaaagatttctcagtaactccaaaacttgcttgataggagaatattccctcaaccaattcctaggacaatatttattggtagatcaagaatgtttcctcaataactctagtctagctccatgatcagaactaacacccattaaaaacataaaatgttctttctgaaccggtcttcatggtgcgtgagagcaccaagcagctttggtatgcaggaggagttttgcacagaagagtggcctgctcaaacctgcccactgttctgtaggtgatctggtggatctggaaatttatcccaagacaggaatttcctaatattcgaagacatttgaggctttgggaaattctctgctgtgcatttatttggctcctgtcataagcttgttttttaaagaatgtatcatagctcaagtttttactgctgattttgttaaattctgtatagtatattttttacggaaaggcacagtcagacattcctaatagggctcatgtcagaacttctgttcccaaggcattatctccatagcaaaaattagtgcactgttttcaaaagtgaggtgggaaaatgcttttaagatcatgtgatgttcccctaaaaggggttaatggggtgtattcagggtttgggagggaggaagaagcatgctttagaaaacagtaaatttagggagaaaatgctttgttggttaaatgtcactcaaaaggctgaattcaaatcaattccacaaacatttactgagtacctactgcccctggggacacagagataaattatttagtctcagacacactcattctaacttcccagcacctctactgtctgcagattctttaatttattttggttgtattagctaattaattcgtaaactttaggcacatggatctattctcattatgaaaatggatgccatttgattaaggctgatgactaacaaaatgatttgtgtttactcgaagtgtttttttaaaaatagctactcaaggatagttttccataaatcaagaaggtaaaaaagttcccattttttattgtagaatccattatttaaactacatgtagagacaggttattatttgctatattcaagtttggtcatcaatacccttaaaaatattagaattttatggatgacccagaaatgctttgaaaatctgtgttcctcagcaaatacagagaccatgatcaaaatgcacagaatcactaacattttgatgctagcatggtttcagtctatttggcagaacagaattgattatgctactaaaatttctttttctttttttttttttttttttttgagacagagtcttgctttgtcacccaggctgaagtgcagtggcaggatctcagttcactgcaacctctgcctcccaggttcacgccattctcctgcttcagcctcccgagtagctgggactacaggctcccaccaccatgcccggctaattttttgcatttttagtagagacggggtttcaccgtgttagccaggatggtctcgatctcctgacctcgtgatccgcccgcctcagccttccaaagtgctgggattacaggcgtgagccactgtgcccggactctgattttttttttactaaggtacagtaagaaaagggaaaagtgtacgttttcacttcctgaaatatgtcaggttgaatcaataatagagcacaccagaactcttggctccatttcaacctaaactattcagttctcatcaccccagaggaaattccgcctctgtgctggtcagtaatccccctggattataaaagtttaactaactcactgtgcacaaggcacggccattgccaacattctcttgcaaggtattttcccaagcccttacccaattctgtttccatgattgtgacattggggattaattctgcaagacagaactgtttatattctgtaccttaaaaacacatgcaaacatctcttgccttaagatttctggctttcctatggcccagagtcctagaagtgttttgatatttgtagcagaattttcaagtgtacatccttatcctggatattaacatttttgcatcatattggcagctggacctacagagaatttagtagactgttaacctaataagccttgaatccttttgcaccagtggtgagagaatgtggatcagagccatcacctccatgccccgtcaccctctaacaaccacatttacaacttccccagctctgagacacacttgcctccaccccttccatcaccccattttaagatgaaaataccacaccagcctggaaggaagaagttacttgcccagggccacatagtgagttaagggctgatctagagctaggaagctgtcttcctgaaccataatcctggactcttctaacctctctactcatcgcaaatagagttcattttagtgatttgaaggaagatgggacaagtattttcaaacacctgtaggacaacatggaagtgggaggagacttctactgtagctccccagagaagagagctagggctacagagttgcagttacaaggttgccctctctggcttgatccccaaaggaattttctactccaaaatagaatttttctaggatgctatttctcagtccctggagatactcaaacaaagggcttgtcacaagggtttttgtagaagctattcttcacagaggttgggggagagattaagccaaaggatctctgaggtctttttcaaatctataattatgtggccttttgttcattgacttccatgtgttctagttgatcattacaaacctggcaggccttctcaagggttcagtaattagctgtcatttcccatttgtccagagagtgtccaacacaaaatacccctaagatcttggccaatagagaaatgtcatggaattttagaaatgacagtatctgcggagtttattccaagttatatcatttcaaagatgaagaaacccaggctcagagggagccatcacatccacaccctgtcacccttcgtggccagtgccagacagtagctagttggatgctaaaagtagaatttagatatcttaacaataagcccagcagtctttcaacttcattcgtaaatcatttttgttttgagcatctgtcacgtggcagcacttgcctggatactggagagctgagaaggaatgcgacaggcaagtcctactctcacagtgtatacattcaggaggaacaagacacacagtgccaagtaaataaagtagctgaacttcatcaaatgattttattcttaaagtcattaaagcatgtaatgttcccctttttttgtttcaggggtgtacagattgaagaagtgtaggtgtttatgtggttttagtgacaaaccccatgtgctttcattgattttatgttttatgttaaaacatcaaccgcaaggtaaaatgcatattgtatgttgttggatacgtacttaactggtatgcatcccatgtctttgggtactagtgtatgaattctaatctctgtaaatgaaatgttgtatgtgttaatatatttaatagatgtaacttaataaactggcattgaagactgaagaattttcacactgtca

SEQ ID NO: 196265 - DNA, 2008 bp, Homo sapiens
  Payload ID: 18719
  Gene Name: tumor necrosis factor (ligand) superfamily, member 18
  Uniprot ID: Q9UNG2
  ENST ID: ENST00000404377
  CDS Start-End: 2-601
catgacattgcatccttcacccatcacttgtgaatttttgttttccacagctctcatttctccaaaaatgtgtttgagccacttggaaaatatgcctttaagccattcaagaactcaaggagctcagagatcatcctggaagctgtggctcttttgctcaatagttatgttgctatttctttgctccttcagttggctaatctttatttttctccaattagagactgctaaggagccctgtatggctaagtttggaccattaccctcaaaatggcaaatggcatcttctgaacctccttgcgtgaataaggtgtctgactggaagctggagatacttcagaatggcttatatttaatttatggccaagtggctcccaatgcaaactacaatgatgtagctccttttgaggtgcggctgtataaaaacaaagacatgatacaaactctaacaaacaaatctaaaatccaaaatgtaggagggacttatgaattgcatgttggggacaccatagacttgatattcaactctgagcatcaggttctaaaaaataatacatactggggtatcattttactagcaaatccccaattcatctcctagagacttgatttgatctcctcattcccttcagcacatgtagaggtgccagtgggtggattggagggagaagatattcaatttctagagtttgtctgtctacaaaaatcaacacaaacagaactcctctgcacgtgaattttcatctatcatgcctatctgaaagagactcaggggaagagccaaagacttttggttggatctgcagagatacttcattaatccatgataaaacaaatatggatgacagaggacatgtgcttttcaaagaatctttatctaattcttgaattcatgagtggaaaaatggagttctattcccatggaagatttacctggtatgcaaaaaggatctggggcagtagcctggctttgttctcatattcttgggctgctgtaattcattcttctcatactcccatcttctgagaccctcccaataaaaagtagactgataggatggccacagatatgcctaccataccctactttagatatggtggtgttagaagataaagaacaatctgagaactattggaatagaggtacaagtggcataaaatggaatgtacgctatctggaaatttctcttggttttatcttcctcaggatgcagggtgctttaaaaagccttatcaaaggagtcattccgaaccctcacgtagagctttgtgagaccttactgttggtgtgtgtgtctaaacattgctaattgtaaagaaagagtaaccattagtaatcattaggtttaaccccagaatggtattatcattactggattatgtcatgtaatgatttagtatttttagctagctttccacagtttgcaaagtgctttcgtaaaacagttagcaattctatgaagttaattgggcaggcatttgggggaaaattttagtgatgagaatgtgatagcatagcatagccaactttcctcaactcataggacaagtgactacaagaggcaatgggtagtcccctgcattgcactgtctcagctttagaattgttatttctgctatcgtgttataagactctaaaacttagcgaattcacttttcaggaagcatattcccctttagcccaaggtgagcagagtgaagctacaacagatctttcctttaccagcacactttttttttttttcctgcctgaatcagggagatccaggatgctgttcaggccttatcccaaccaaattcccctcttcactttgcagggcccatcttagtcaaatgtgctaacttctaaaataataaatagcactaattcaaaatttttggactcttaaattagctacttgcaggttcttgttgaaaggtatataatattacattgtaaacaaatttaaaatatttatggatatttgtgaaaagctgcattatgttaaataatattacatgtaaagct

SEQ ID NO: 196266 - DNA, 3470 bp, Homo sapiens
  Payload ID: 18720
  Gene Name: tumor necrosis factor (ligand) superfamily, member 4
  Uniprot ID: P23510
  ENST ID: ENST00000281834
  CDS Start-End: 138-689
ggccctgggacctttgcctattttctgattgataggctttgttttgtctttacctccttctttctggggaaaacttcagttttatcgcacgttccccttttccatatcttcatcttccctctacccagattgtgaagatggaaagggtccaacccctggaagagaatgtgggaaatgcagccaggccaagattcgagaggaacaagctattgctggtggcctctgtaattcagggactggggctgctcctgtgcttcacctacatctgcctgcacttctctgctcttcaggtatcacatcggtatcctcgaattcaaagtatcaaagtacaatttaccgaatataagaaggagaaaggtttcatcctcacttcccaaaaggaggatgaaatcatgaaggtgcagaacaactcagtcatcatcaactgtgatgggttttatctcatctccctgaagggctacttctcccaggaagtcaacattagccttcattaccagaaggatgaggagcccctcttccaactgaagaaggtcaggtctgtcaactccttgatggtggcctctctgacttacaaagacaaagtctacttgaatgtgaccactgacaatacctccctggatgacttccatgtgaatggcggagaactgattcttatccatcaaaatcctggtgaattctgtgtcctttgaggggctgatggcaatatctaaaaccaggcaccagcatgaacaccaagctgggggtggacagggcatggattcttcattgcaagtgaaggagcctcccagctcagccacgtgggatgtgacaagaagcagatcctggccctcccgcccccacccctcagggatatttaaaacttattttatataccagttaatcttatttatccttatattttctaaattgcctagccgtcacaccccaagattgccttgagcctactaggcacctttgtgagaaagaaaaaatagatgcctcttcttcaagatgcattgtttctattggtcaggcaattgtcataataaacttatgtcattgaaaacggtacctgactaccatttgctggaaatttgacatgtgtgtggcattatcaaaatgaagaggagcaaggagtgaaggagtggggttatgaatctgccaaaggtggtatgaaccaacccctggaagccaaagcggcctctccaaggttaaattgattgcagtttgcatattgcctaaatttaaactttctcatttggtgggggttcaaaagaagaatcagcttgtgaaaaatcaggacttgaagagagccgtctaagaaataccacgtgctttttttctttaccattttgctttcccagcctccaaacatagttaatagaaatttcccttcaaagaactgtctggggatgtgatgctttgaaaaatctaatcagtgacttaagagagattttcttgtatacagggagagtgagataacttattgtgaagggttagctttactgtacaggatagcagggaactggacatctcagggtaaaagtcagtacggattttaatagcctggggaggaaaacacattctttgccacagacaggcaaagcaacacatgctcatcctcctgcctatgctgagatacgcactcagctccatgtcttgtacacacagaaacattgctggtttcaagaaatgaggtgatcctattatcaaattcaatctgatgtcaaatagcactaagaagttattgtgccttatgaaaaataatgatctctgtctagaaataccatagaccatatatagtctcacattgataattgaaactagaagggtctataatcagcctatgccagggcttcaatggaatagtatccccttatgtttagttgaaatgtccccttaacttgatataatgtgttatgcttatggcgctgtggacaatctgatttttcatgtcaactttccagatgatttgtaacttctctgtgccaaaccttttataaacataaatttttgagatatgtattttaaaattgtagcacatgtttccctgacattttcaatagaggatacaacatcacagaatctttctggatgattctgtgttatcaaggaattgtactgtgctacaattatctctagaatctccagaaaggtggagggctgttcgcccttacactaaatggtctcagttggatttttttttcctgttttctatttcctcttaagtacaccttcaactatattcccatccctctattttaatctgttatgaaggaaggtaaataaaaatgctaaatagaagaaattgtaggtaaggtaagaggaatcaagttctgagtggctgccaaggcactcacagaatcataatcatggctaaatatttatggagggcctactgtggaccaggcactgggctaaatacttacatttacaagaatcattctgagacagatattcaatgatatctggcttcactactcagaagattgtgtgtgtgtttgtgtgtgtgtgtgtgtgtgtatttcactttttgttattgaccatgttctgcaaaattgcagttactcagtgagtgatatccgaaaaagtaaacgtttatgactataggtaatatttaagaaaatgcatggttcatttttaagtttggaatttttatctatatttctcacagatgtgcagtgcacatgcaggcctaagtatatgttgtgtgtgttgtttgtctttgatgtcatggtcccctctcttaggtgctcactcgctttgggtgcacctggcctgctcttcccatgttggcctctgcaaccacacagggatatttctgctatgcaccagcctcactccaccttccttccatcaaaaatatgtgtgtgtgtctcagtccctgtaagtcatgtccttcacagggagaattaacccttcgatatacatggcagagttttgtgggaaaagaattgaatgaaaagtcaggagatcagaattttaaatttgacttagccactaactagccatgtaaccttgggaaagtcatttcccatttctgggtcttgcttttctttctgttaaatgagaggaatgttaaatatctaacagtttagaatcttatgcttacagtgttatctgtgaatgcacatattaaatgtctatgttcttgttgctatgagtcaaggagtgtaaccttctcctttactatgttgaatgtatttttttctggacaagcttacatcttcctcagccatctttgtgagtccttcaagagcagttatcaattgttagttagatattttctatttagagaatgcttaagggattccaatcccgatccaaatcataatttgttcttaagtatactgggcaggtcccctattttaagtcataattttgtatttagtgctttcctggctctcagagagtattaatattgatattaataatatagttaatagtaatattgctatttacatggaaacaaataaaagatctcagaattc

SEQ ID NO: 196267 - DNA, 3429 bp, Homo sapiens
  Payload ID: 18720
  Gene Name: tumor necrosis factor (ligand) superfamily, member 4
  Uniprot ID: P23510
  ENST ID: ENST00000367718
  CDS Start-End: 246-647
aaaacacaggacacatggctccattcaaggctaactgattgcacaacggctctgagcaggagagagcaaaaggtgaaccacagttgtacagcttgctggtggttggggtcacattggactatcaatatccaggagatgttgagaaaaagaggggatcctttccaacaagtcatccagcaactctgggacagaaggaaagctgtgggaagaaaagcagggtgctggtttctaggacactaaacctcatggtatcacatcggtatcctcgaattcaaagtatcaaagtacaatttaccgaatataagaaggagaaaggtttcatcctcacttcccaaaaggaggatgaaatcatgaaggtgcagaacaactcagtcatcatcaactgtgatgggttttatctcatctccctgaagggctacttctcccaggaagtcaacattagccttcattaccagaaggatgaggagcccctcttccaactgaagaaggtcaggtctgtcaactccttgatggtggcctctctgacttacaaagacaaagtctacttgaatgtgaccactgacaatacctccctggatgacttccatgtgaatggcggagaactgattcttatccatcaaaatcctggtgaattctgtgtcctttgaggggctgatggcaatatctaaaaccaggcaccagcatgaacaccaagctgggggtggacagggcatggattcttcattgcaagtgaaggagcctcccagctcagccacgtgggatgtgacaagaagcagatcctggccctcccgcccccacccctcagggatatttaaaacttattttatataccagttaatcttatttatccttatattttctaaattgcctagccgtcacaccccaagattgccttgagcctactaggcacctttgtgagaaagaaaaaatagatgcctcttcttcaagatgcattgtttctattggtcaggcaattgtcataataaacttatgtcattgaaaacggtacctgactaccatttgctggaaatttgacatgtgtgtggcattatcaaaatgaagaggagcaaggagtgaaggagtggggttatgaatctgccaaaggtggtatgaaccaacccctggaagccaaagcggcctctccaaggttaaattgattgcagtttgcatattgcctaaatttaaactttctcatttggtgggggttcaaaagaagaatcagcttgtgaaaaatcaggacttgaagagagccgtctaagaaataccacgtgctttttttctttaccattttgctttcccagcctccaaacatagttaatagaaatttcccttcaaagaactgtctggggatgtgatgctttgaaaaatctaatcagtgacttaagagagattttcttgtatacagggagagtgagataacttattgtgaagggttagctttactgtacaggatagcagggaactggacatctcagggtaaaagtcagtacggattttaatagcctggggaggaaaacacattctttgccacagacaggcaaagcaacacatgctcatcctcctgcctatgctgagatacgcactcagctccatgtcttgtacacacagaaacattgctggtttcaagaaatgaggtgatcctattatcaaattcaatctgatgtcaaatagcactaagaagttattgtgccttatgaaaaataatgatctctgtctagaaataccatagaccatatatagtctcacattgataattgaaactagaagggtctataatcagcctatgccagggcttcaatggaatagtatccccttatgtttagttgaaatgtccccttaacttgatataatgtgttatgcttatggcgctgtggacaatctgatttttcatgtcaactttccagatgatttgtaacttctctgtgccaaaccttttataaacataaatttttgagatatgtattttaaaattgtagcacatgtttccctgacattttcaatagaggatacaacatcacagaatctttctggatgattctgtgttatcaaggaattgtactgtgctacaattatctctagaatctccagaaaggtggagggctgttcgcccttacactaaatggtctcagttggatttttttttcctgttttctatttcctcttaagtacaccttcaactatattcccatccctctattttaatctgttatgaaggaaggtaaataaaaatgctaaatagaagaaattgtaggtaaggtaagaggaatcaagttctgagtggctgccaaggcactcacagaatcataatcatggctaaatatttatggagggcctactgtggaccaggcactgggctaaatacttacatttacaagaatcattctgagacagatattcaatgatatctggcttcactactcagaagattgtgtgtgtgtttgtgtgtgtgtgtgtgtgtgtatttcactttttgttattgaccatgttctgcaaaattgcagttactcagtgagtgatatccgaaaaagtaaacgtttatgactataggtaatatttaagaaaatgcatggttcatttttaagtttggaatttttatctatatttctcacagatgtgcagtgcacatgcaggcctaagtatatgttgtgtgtgttgtttgtctttgatgtcatggtcccctctcttaggtgctcactcgctttgggtgcacctggcctgctcttcccatgttggcctctgcaaccacacagggatatttctgctatgcaccagcctcactccaccttccttccatcaaaaatatgtgtgtgtgtctcagtccctgtaagtcatgtccttcacagggagaattaacccttcgatatacatggcagagttttgtgggaaaagaattgaatgaaaagtcaggagatcagaattttaaatttgacttagccactaactagccatgtaaccttgggaaagtcatttcccatttctgggtcttgcttttctttctgttaaatgagaggaatgttaaatatctaacagtttagaatcttatgcttacagtgttatctgtgaatgcacatattaaatgtctatgttcttgttgctatgagtcaaggagtgtaaccttctcctttactatgttgaatgtatttttttctggacaagcttacatcttcctcagccatctttgtgagtccttcaagagcagttatcaattgttagttagatattttctatttagagaatgcttaagggattccaatcccgatccaaatcataatttgttcttaagtatactgggcaggtcccctattttaagtcataattttgtatttagtgctttcctggctctcagagagtattaatattgatattaataatatagttaatagtaatattgctatttacatggaaacaaataaaagatctcagaattca

SEQ ID NO: 196268 - DNA, 1906 bp, Homo sapiens
  Payload ID: 18721
  Gene Name: tumor necrosis factor (ligand) superfamily, member 8
  Uniprot ID: P32971
  ENST ID: ENST00000223795
  CDS Start-End: 115-819
ccaagtcacatgattcaggattcagggggagaatccttcttggaacagagatgggcccagaactgaatcagatgaagagagataaggtgtgatgtggggaagactatataaagaatggacccagggctgcagcaagcactcaacggaatggcccctcctggagacacagccatgcatgtgccggcgggctccgtggccagccacctggggaccacgagccgcagctatttctatttgaccacagccactctggctctgtgccttgtcttcacggtggccactattatggtgttggtcgttcagaggacggactccattcccaactcacctgacaacgtccccctcaaaggaggaaattgctcagaagacctcttatgtatcctgaaaagggctccattcaagaagtcatgggcctacctccaagtggcaaagcatctaaacaaaaccaagttgtcttggaacaaagatggcattctccatggagtcagatatcaggatgggaatctggtgatccaattccctggtttgtacttcatcatttgccaactgcagtttcttgtacaatgcccaaataattctgtcgatctgaagttggagcttctcatcaacaagcatatcaaaaaacaggccctggtgacagtgtgtgagtctggaatgcaaacgaaacacgtataccagaatctctctcaattcttgctggattacctgcaggtcaacaccaccatatcagtcaatgtggatacattccagtacatagatacaagcacctttcctcttgagaatgtgttgtccatcttcttatacagtaattcagactgaacagtttctcttggccttcaggaagaaagcgcctctctaccatacagtatttcatccctccaaacacttgggcaaaaagaaaactttagaccaagacaaactacacagggtattaaatagtatacttctccttctgtctcttggaaagatacagctccagggttaaaaagagagtttttagtgaagtatctttcagatagcaggcagggaagcaatgtagtgtggtgggcagagccccacacagaatcagaagggatgaatggatgtcccagcccaacctctaattcactgtatggtcttgatctatttcttctgttttgagagcctccagttaaaatggggctccagtaccagagcagctagcaactctgccctaatgggaaatgaaggggagctgggtgtgagtgtttacactgtgcccttcacgggatacttcttttatctgcagatggcctaatacttagttgtccaagtcgcgatcaaggactctctcacacaggaaacttccctatactggcagatacacttgtgactgaaccatgcccagtttatgcctgtctgactgtcactctggcactaggaggctgatcttgtactccatatgaccccacccctaggaacccccagggaaaaccaggctgggacagccccctgttcctgagatggaaagcacaaatttaatacaccaccacaatggaaaacaagttcaaagacttttacttacagatcctggacagaaagggcataatgagtctgaagggcagtcctccttctctaggttacatgaggcaggaataagaagtcagacagagacagcaagacagttaacaatgtaggtaaagaaatagggtgtggtcactctcaattcactggcaaatgcctgaatggtctgtctgaaggaagcaacagagaagtggggaatccagtctgctaggcaggaaagatgcctctaagttcttgtctctggccagaggtgtggtatagaaccagaaacccatatcaagggtgactaagcccggcttctggtatgagaaattaaacttgtatacaaaatggttgccaaggcaacataaaattataagaattc

SEQ ID NO: 196269 - DNA, 1523 bp, Homo sapiens
  Payload ID: 18721
  Gene Name: tumor necrosis factor (ligand) superfamily, member 8
  ENST ID: ENST00000618336
  CDS Start-End: 293-787
aaccgtcattttcctacgcgccctctgacatcagccaccttctctgtagctagtttctctgcacacaacttaatccctggcaatgaaaaatgaacctctcccccacccttgctgccgcctctcgcctcacgcccccagagaagagtttctccaccaggcagcaggtgaaggtttttttccaagtcacatgattcaggattcagggggagaatccttcttggaacagagatgggcccagaactgaatcagatgaagagagataaggtgtgatgtggggaagactatataaagaatggacccagggctgcagcaagcactcaacggaatggcccctcctggagacacagccatgcatgtgccggcgggctccgtggccagccacctggggaccacgagccgcagctatttctatttgaccacagccactctggctctgtgccttgtcttcacggtggccactattatggtgttggtcgttcagaggacggactccattcccaactcacctgacaacgtccccctcaaaggaggaaattgctcagaagacctcttatgtatcctgaaaagggctccattcaagaagtcatgggcctacctccaagtggcaaagcatctaaacaaaaccaagttgtcttggaacaaagatggcattctccatggagtcagatatcaggatgggaatctggtgatccaattccctgattactgtggcatgatcctccaccattcacactctaccctggactctgggaagggacactgctgccttgaaactctacaaccctgaaccttgatgctggttgctgcagacaagaactgcttctaccctgggtcactgtcactgctaagtggaaagtcatgaacttgatggtaccagtcactctgggcctaaaccgacatagccaggaaacggttcaccccccacaaacagaatcatctagacctgtccatgatttggaatcgtggcccaatacttcctggccccagagagagaaaaaagtctgaccaccccctactcaaagtgccaactcatttccttcccagaattaatcacttcccaaaatgtatgactgtgtgaacatcaattcccttcaggggaaaaccccactcccacctctcaggctgtcatcttaccctatgaccccaacctgacaatcatgcaacagcccattattggtaccttttccaatgtttaggtgactcattcttatctacaatcactttgttgttctaggaaagtttttgacacagcaggcatttgatatatatttcttgattaaatgaaagattaaatgaataccatcttagatgtctgcatagtgctttaaagtttacaccactattctttcaaatagtacaagagagaactaagctgtgtactcaactgggaagaagcagaactgagagtgggagcacctggtattctgatttcttgtctagaactatactatattctgagatcactaaactacaacctcaggcgactctgcctacttttgtaaataaagttttattggaacaca

SEQ ID NO: 196270 - DNA, 1665 bp, Homo sapiens
  Payload ID: 18722
  Gene Name: tumor necrosis factor (ligand) superfamily, member 9
  Uniprot ID: P41273
  ENST ID: ENST00000245817
  CDS Start-End: 39-803
aaaaagcggcgcgctgtgtcttcccgcagtctctcgtcatggaatacgcctctgacgcttcactggaccccgaagccccgtggcctcccgcgccccgcgctcgcgcctgccgcgtactgccttgggccctggtcgcggggctgctgctgctgctgctgctcgctgccgcctgcgccgtcttcctcgcctgcccctgggccgtgtccggggctcgcgcctcgcccggctccgcggccagcccgagactccgcgagggtcccgagctttcgcccgacgatcccgccggcctcttggacctgcggcagggcatgtttgcgcagctggtggcccaaaatgttctgctgatcgatgggcccctgagctggtacagtgacccaggcctggcaggcgtgtccctgacggggggcctgagctacaaagaggacacgaaggagctggtggtggccaaggctggagtctactatgtcttctttcaactagagctgcggcgcgtggtggccggcgagggctcaggctccgtttcacttgcgctgcacctgcagccactgcgctctgctgctggggccgccgccctggctttgaccgtggacctgccacccgcctcctccgaggctcggaactcggccttcggtttccagggccgcttgctgcacctgagtgccggccagcgcctgggcgtccatcttcacactgaggccagggcacgccatgcctggcagcttacccagggcgccacagtcttgggactcttccgggtgacccccgaaatcccagccggactcccttcaccgaggtcggaataacgtccagcctgggtgcagcccacctggacagagtccgaatcctactccatccttcatggagacccctggtgctgggtccctgctgctttctctacctcaaggggcttggcaggggtccctgctgctgacctccccttgaggaccctcctcacccactccttccccaagttggaccttgatatttattctgagcctgagctcagataatatattatatatattatatatatatatatatttctatttaaagaggatcctgagtttgtgaatggacttttttagaggagttgttttgggggggggggggtcttcgacattgccgaggctggtcttgaactcctggacttagacgatcctcctgcctcagcctcccaagcaactgggattcatcctttctattaattcattgtacttatttgcttatttgtgtgtattgagcatctgtaatgtgccagcattgtgcccaggctagggggctatagaaacatctagaaatagactgaaagaaaatctgagttatggtaatacgtgaggaatttaaagactcatccccagcctccacctcctgtgtgatacttgggggctagcttttttctttctttcttttttttgagatggtcttgttctgtcaaccaggctagaatgcagcggtgcaatcatgagtcaatgcagcctccagcctcgacctcccgaggctcaggtgatcctcccatctcagcctctcgagtagctgggaccacagttgtgtgccaccacacttggctaactttttaatttttttgcggagacggtattgctatgttgccaaggttgtttacatgccagtacaatttataataaacactcatttttcctccctctg

SEQ ID NO: 196271 - DNA, 2714 bp, Homo sapiens
  Payload ID: 18723
  Gene Name: tumor necrosis factor receptor superfamily, member 10a
  Uniprot ID: O00220
  ENST ID: ENST00000221132
  CDS Start-End: 66-1472
actccgaatgcgaagttctgtcttgtcatagccaagcacgctgcttcttggattgacctggcaggatggcgccaccaccagctagagtacatctaggtgcgttcctggcagtgactccgaatcccgggagcgcagcgagtgggacagaggcagccgcggccacacccagcaaagtgtggggctcttccgcggggaggattgaaccacgaggcgggggccgaggagcgctccctacctccatgggacagcacggacccagtgcccgggcccgggcagggcgcgccccaggacccaggccggcgcgggaagccagccctcggctccgggtccacaagaccttcaagtttgtcgtcgtcggggtcctgctgcaggtcgtacctagctcagctgcaaccatcaaacttcatgatcaatcaattggcacacagcaatgggaacatagccctttgggagagttgtgtccaccaggatctcatagatcagaacatcctggagcctgtaaccggtgcacagagggtgtgggttacaccaatgcttccaacaatttgtttgcttgcctcccatgtacagcttgtaaatcagatgaagaagagagaagtccctgcaccacgaccaggaacacagcatgtcagtgcaaaccaggaactttccggaatgacaattctgctgagatgtgccggaagtgcagcagagggtgccccagagggatggtcaaggtcaaggattgtacgccctggagtgacatcgagtgtgtccacaaagaatcaggcaatggacataatatatgggtgattttggttgtgactttggttgttccgttgctgttggtggctgtgctgattgtctgttgttgcatcggctcaggttgtggaggggaccccaagtgcatggacagggtgtgtttctggcgcttgggtctcctacgagggcctggggctgaggacaatgctcacaacgagattctgagcaacgcagactcgctgtccactttcgtctctgagcagcaaatggaaagccaggagccggcagatttgacaggtgtcactgtacagtccccaggggaggcacagtgtctgctgggaccggcagaagctgaagggtctcagaggaggaggctgctggttccagcaaatggtgctgaccccactgagactctgatgctgttctttgacaagtttgcaaacatcgtgccctttgactcctgggaccagctcatgaggcagctggacctcacgaaaaatgagatcgatgtggtcagagctggtacagcaggcccaggggatgccttgtatgcaatgctgatgaaatgggtcaacaaaactggacggaacgcctcgatccacaccctgctggatgccttggagaggatggaagagagacatgcaagagagaagattcaggacctcttggtggactctggaaagttcatctacttagaagatggcacaggctctgccgtgtccttggagtgaaagactctttttaccagaggtttcctcttaggtgttaggagttaatacatattaggttttttttttttttaacatgtatacaaagtaaattcttagccaggtgtagtggctcatgcctgtaatcccagcactttgggaggctgaggcgggtggatcacttgaggtcagaagttcaagaccagcctgaccaacatcgtgaaatgccgtctttacaaaaaaatacaaaaattaactggatgtgatggtgtgtgcatatattctcggctactcgggaggctgaggcaggagaatcacttgaacccacgaggcagtgagctgagattgcaccactgcactccagcctgggacacagagcaagactctgtctcaagataaaataaaataaacttgaaagaattattgcccgactgaggctcacatgccaaaggaaaatctggttctcccctgagctggcctccgtgtgtttccttatcatggtggtcaattggaggtgttaatttgaatggattaaggaacacctagaacactggtaaggcattatttctgggacattatttctgggcatgtcttcgagggtgtttccagaggggattggcatgcgatcgggtggactgagtggaaaagacctacccttaatttgggggggcaccgtccgacagactggggagcaagatagaagaaaacaaaaaaaaaaggaaaagcaaatccatctgatctcctggagctgggacactcttctgcctgtggacatcagagtctaggatttctagcccttggactccagggcatacaccagtggcctcccgaaggatctaaggattttggccttgaactaagaattacaccatcggcttccctgggtcttaggtttttgggctggattaagtcctgcttccagcatttcagggtctctgctgtgcagatggcctgttgtggaacttctcaacctccattatcagatgcattaattcctccaataagtcccatttcatatatagtcatttaccccacaacatttcagtcaagggaacagcatataagatggtggccgtccagtaagctaaggttaatttattaattatttaatttatttaccttgagttcaagtcacaattaaagtacatatacctttggaaatttggacttttgtatataaaagtacttttttttggcgggggcagtgggcagctctcatcctaaacaaatgtgttatttggtacctatgcaaagatttggttaaaa

SEQ ID NO: 196272 - DNA, 693 bp, Homo sapiens
  Payload ID: 18723
  Gene Name: tumor necrosis factor receptor superfamily, member 10a
  ENST ID: ENST00000524158
  CDS Start-End: 469-693
cggggtccccggggccaggcaggagcgacccgggcctggaggcagcagagccccctcccgcaggaggctgggcccggggactccaccccgttggctgctgcctggcgcgtctccctcctgcccacacctcacgatgtatcgggaagtttcggaatcgatagagctcaagtcgtacctagctcagctgcaaccatcaaacttcatgatcaatcaattggcacacagcaatgggaacatagccctttgggagagttgtgtccaccaggatctcatagatcagaacatcctggagcctgtaaccggtgcacagagggtgtgggttacaccaatgcttccaacaatttgtttgcttgcctcccatgtacagcttgtaaatcagatgaagaagagagaagtccctgcaccacgaccaggaacacagcatgtcagtgcaaaccaggaactttccggaatgacaattctgctgagatgtgccggaagtgcagcagagggtgccccagagggatggtcaaggtcaaggattgtacgccctggagtgacatcgagtgtgtccacaaagaatcaggcaatggacataatatatgggtgattttggttgtgactttggttgttccgttgctgttggtggctgtgctgattgtctgttgttgcatcggctcaggttgtggaggggaccccaagtgcatggacagg

SEQ ID NO: 196273 - DNA, 978 bp, Homo sapiens
  Payload ID: 18723
  Gene Name: tumor necrosis factor receptor superfamily, member 10a
  ENST ID: ENST00000613472
  CDS Start-End: 1-933
atggcgccaccaccagctagagtacatctagcttgtaaatcagatgaagaagagagaagtccctgcaccacgaccaggaacacagcatgtcagtgcaaaccaggaactttccggaatgacaattctgctgagatgtgccggaagtgcagcagagggtgccccagagggatggtcaaggtcaaggattgtacgccctggagtgacatcgagtgtgtccacaaagaatcaggcaatggacataatatatgggtgattttggttgtgactttggttgttccgttgctgttggtggctgtgctgattgtctgttgttgcatcggctcaggttgtggaggggaccccaagtgcatggacagggtgtgtttctggcgcttgggtctcctacgagggcctggggctgaggacaatgctcacaacgagattctgagcaacgcagactcgctgtccactttcgtctctgagcagcaaatggaaagccaggagccggcagatttgacaggtgtcactgtacagtccccaggggaggcacagtgtctgctgggaccggcagaagctgaagggtctcagaggaggaggctgctggttccagcaaatggtgctgaccccactgagactctgatgctgttctttgacaagtttgcaaacatcgtgccctttgactcctgggaccagctcatgaggcagctggacctcacgaaaaatgagatcgatgtggtcagagctggtacagcaggcccaggggatgccttgtatgcaatgctgatgaaatgggtcaacaaaactggacggaacgcctcgatccacaccctgctggatgccttggagaggatggaagagagacatgcaagagagaagattcaggacctcttggtggactctggaaagttcatctacttagaagatggcacaggctctgccgtgtccttggagtgaaagactctttttaccagaggtttcctcttaggtgttaggagttaa

SEQ ID NO: 196274 - DNA, 4146 bp, Homo sapiens
  Payload ID: 18724
  Gene Name: tumor necrosis factor receptor superfamily, member 10b
  Uniprot ID: O14763
  ENST ID: ENST00000276431
  CDS Start-End: 286-1608
gcgcttgcggaggattgcgttgacgagactcttatttattgtcaccaacctgtggtggaatttgcagttgcacattggatctgattcgccccgccccgaatgacgcctgcccggaggcagtgaaagtacagccgcgccgccccaagtcagcctggacacataaatcagcacgcggccggagaaccccgcaatctctgcgcccacaaaatacaccgacgatgcccgatctactttaagggctgaaacccacgggcctgagagactataagagcgttccctaccgccatggaacaacggggacagaacgccccggccgcttcgggggcccggaaaaggcacggcccaggacccagggaggcgcggggagccaggcctgggccccgggtccccaagacccttgtgctcgttgtcgccgcggtcctgctgttggtctcagctgagtctgctctgatcacccaacaagacctagctccccagcagagagcggccccacaacaaaagaggtccagcccctcagagggattgtgtccacctggacaccatatctcagaagacggtagagattgcatctcctgcaaatatggacaggactatagcactcactggaatgacctccttttctgcttgcgctgcaccaggtgtgattcaggtgaagtggagctaagtccctgcaccacgaccagaaacacagtgtgtcagtgcgaagaaggcaccttccgggaagaagattctcctgagatgtgccggaagtgccgcacagggtgtcccagagggatggtcaaggtcggtgattgtacaccctggagtgacatcgaatgtgtccacaaagaatcaggtacaaagcacagtggggaagtcccagctgtggaggagacggtgacctccagcccagggactcctgcctctccctgttctctctcaggcatcatcataggagtcacagttgcagccgtagtcttgattgtggctgtgtttgtttgcaagtctttactgtggaagaaagtccttccttacctgaaaggcatctgctcaggtggtggtggggaccctgagcgtgtggacagaagctcacaacgacctggggctgaggacaatgtcctcaatgagatcgtgagtatcttgcagcccacccaggtccctgagcaggaaatggaagtccaggagccagcagagccaacaggtgtcaacatgttgtcccccggggagtcagagcatctgctggaaccggcagaagctgaaaggtctcagaggaggaggctgctggttccagcaaatgaaggtgatcccactgagactctgagacagtgcttcgatgactttgcagacttggtgccctttgactcctgggagccgctcatgaggaagttgggcctcatggacaatgagataaaggtggctaaagctgaggcagcgggccacagggacaccttgtacacgatgctgataaagtgggtcaacaaaaccgggcgagatgcctctgtccacaccctgctggatgccttggagacgctgggagagagacttgccaagcagaagattgaggaccacttgttgagctctggaaagttcatgtatctagaaggtaatgcagactctgccatgtcctaagtgtgattctcttcaggaagtcagaccttccctggtttaccttttttctggaaaaagcccaactggactccagtcagtaggaaagtgccacaattgtcacatgaccggtactggaagaaactctcccatccaacatcacccagtggatggaacatcctgtaacttttcactgcacttggcattatttttataagctgaatgtgataataaggacactatggaaatgtctggatcattccgtttgtgcgtactttgagatttggtttgggatgtcattgttttcacagcacttttttatcctaatgtaaatgctttatttatttatttgggctacattgtaagatccatctacacagtcgttgtccgacttcacttgatactatatgatatgaaccttttttgggtggggggtgcggggcagttcactctgtctcccaggctggagtgcaatggtgcaatcttggctcactatagccttgacctctcaggctcaagcgattctcccacctcagccatccaaatagctgggaccacaggtgtgcaccaccacgcccggctaattttttgtattttgtctagatataggggctctctatgttgctcagggtggtctcgaattcctggactcaagcagtctgcccacctcagactcccaaagcggtggaattagaggcgtgagcccccatgcttggccttacctttctacttttataattctgtatgttattattttatgaacatgaagaaactttagtaaatgtacttgtttacatagttatgtgaatagattagataaacataaaaggaggagacatacaatgggggaagaagaagaagtcccctgtaagatgtcactgtctgggttccagccctccctcagatgtactttggcttcaatgattggcaacttctacaggggccagtcttttgaactggacaaccttacaagtatatgagtattatttataggtagttgtttacatatgagtcgggaccaaagagaactggatccacgtgaagtcctgtgtgtggctggtccctacctgggcagtctcatttgcacccatagcccccatctatggacaggctgggacagaggcagatgggttagatcacacataacaatagggtctatgtcatatcccaagtgaacttgagccctgtttgggctcaggagatagaagacaaaatctgtctcccacgtctgccatggcatcaagggggaagagtagatggtgcttgagaatggtgtgaaatggttgccatctcaggagtagatggcccggctcacttctggttatctgtcaccctgagcccatgagctgccttttagggtacagattgcctacttgaggaccttggccgctctgtaagcatctgactcatctcagaaatgtcaattcttaaacactgtggcaacaggacctagaatggctgacgcattaaggttttcttcttgtgtcctgttctattattgttttaagacctcagtaaccatttcagcctctttccagcaaacccttctccatagtatttcagtcatggaaggatcatttatgcaggtagtcattccaggagtttttggtcttttctgtctcaaggcattgtgtgttttgttccgggactggtttgggtgggacaaagttagaattgcctgaagatcacacattcagactgttgtgtctgtggagttttaggagtggggggtgacctttctggtctttgcacttccatcctctcccacttccatctggcatcccacgcgttgtcccctgcacttctggaaggcacagggtgctgctgcctcctggtctttgcctttgctgggccttctgtgcaggacgctcagcctcagggctcagaaggtgccagtccggtcccaggtcccttgtcccttccacagaggccttcctagaagatgcatctagagtgtcagccttatcagtgtttaagatttttcttttatttttaatttttttgagacagaatctcactctctcgcccaggctggagtgcaacggtacgatcttggctcagtgcaacctccgcctcctgggttcaagcgattctcgtgcctcagcctccggagtagctgggattgcaggcacccgccaccacgcctggctaatttttgtatttttagtagagacggggtttcaccatgttggtcaggctggtctcgaactcctgacctcaggtgatccaccttggcctccgaaagtgctgggattacaggcgtgagccaccagccaggccaagctattcttttaaagtaagcttcctgacgacatgaaataattgggggttttgttgtttagttacattaggctttgctatatccccaggccaaatagcatgtgacacaggacagccatagtatagtgtgtcactcgtggttggtgtcctttcatgcttctgccctgtcaaaggtccctatttgaaatgtgttataatacaaacaaggaagcacattgtgtacaaaatacttatgtatttatgaatccatgaccaaattaaatatgaaaccttatataaaaa

SEQ ID NO: 196275 - DNA, 1723 bp, Homo sapiens
  Payload ID: 18724
  Gene Name: tumor necrosis factor receptor superfamily, member 10b
  Uniprot ID: O14763
  ENST ID: ENST00000347739
  CDS Start-End: 128-1363
cataaatcagcacgcggccggagaaccccgcaatctctgcgcccacaaaatacaccgacgatgcccgatctactttaagggctgaaacccacgggcctgagagactataagagcgttccctaccgccatggaacaacggggacagaacgccccggccgcttcgggggcccggaaaaggcacggcccaggacccagggaggcgcggggagccaggcctgggccccgggtccccaagacccttgtgctcgttgtcgccgcggtcctgctgttggtctcagctgagtctgctctgatcacccaacaagacctagctccccagcagagagcggccccacaacaaaagaggtccagcccctcagagggattgtgtccacctggacaccatatctcagaagacggtagagattgcatctcctgcaaatatggacaggactatagcactcactggaatgacctccttttctgcttgcgctgcaccaggtgtgattcaggtgaagtggagctaagtccctgcaccacgaccagaaacacagtgtgtcagtgcgaagaaggcaccttccgggaagaagattctcctgagatgtgccggaagtgccgcacagggtgtcccagagggatggtcaaggtcggtgattgtacaccctggagtgacatcgaatgtgtccacaaagaatcaggcatcatcataggagtcacagttgcagccgtagtcttgattgtggctgtgtttgtttgcaagtctttactgtggaagaaagtccttccttacctgaaaggcatctgctcaggtggtggtggggaccctgagcgtgtggacagaagctcacaacgacctggggctgaggacaatgtcctcaatgagatcgtgagtatcttgcagcccacccaggtccctgagcaggaaatggaagtccaggagccagcagagccaacaggtgtcaacatgttgtcccccggggagtcagagcatctgctggaaccggcagaagctgaaaggtctcagaggaggaggctgctggttccagcaaatgaaggtgatcccactgagactctgagacagtgcttcgatgactttgcagacttggtgccctttgactcctgggagccgctcatgaggaagttgggcctcatggacaatgagataaaggtggctaaagctgaggcagcgggccacagggacaccttgtacacgatgctgataaagtgggtcaacaaaaccgggcgagatgcctctgtccacaccctgctggatgccttggagacgctgggagagagacttgccaagcagaagattgaggaccacttgttgagctctggaaagttcatgtatctagaaggtaatgcagactctgccatgtcctaagtgtgattctcttcaggaagtcagaccttccctggtttaccttttttctggaaaaagcccaactggactccagtcagtaggaaagtgccacaattgtcacatgaccggtactggaagaaactctcccatccaacatcacccagtggatggaacatcctgtaacttttcactgcacttggcattatttttataagctgaatgtgataataaggacactatggaaatgtctggatcattccgtttgtgcgtactttgagatttggtttgggatgtcattgttttcacagcacttttttatcctaatgtaaatgctttatttatttatttgggctacattgtaagatccatctacacagtcgt

SEQ ID NO: 196276 - DNA, 1464 bp, Homo sapiens
  Payload ID: 18724
  Gene Name: tumor necrosis factor receptor superfamily, member 10b
  ENST ID: ENST00000523504
  CDS Start-End: 138-410
agcctggacacataaatcagcacgcggccggagaaccccgcaatctctgcgcccacaaaatacaccgacgatgcccgatctactttaagggctgaaacccacgggcctgagagactataagagcgttccctaccgccatggaacaacggggacagaacgccccggccgcttcgggggcccggaaaaggcacggcccaggacccagggaggcgcggggagccaggcctgggccccgggtccccaagacccttgtgctcgttgtcgccgcggtcctgctgttggacaccatatctcagaagacggtagagattgcatctcctgcaaatatggacaggactatagcactcactggaatgacctccttttctgcttgcgctgcaccaggtgtgattcaggtgaagtggagctaagtccctgcaccacgaccagaaacacagtgtgtcagtgcgaagaaggcaccttccgggaagaagattctcctgagatgtgccggaagtgccgcacagggtgtcccagagggatggtcaaggtcggtgattgtacaccctggagtgacatcgaatgtgtccacaaagaatcaggcatcatcataggagtcacagttgcagccgtagtcttgattgtggctgtgtttgtttgcaagtctttactgtggaagaaagtccttccttacctgaaaggcatctgctcaggtggtggtggggaccctgagcgtgtggacagaagctcacaacgacctggggctgaggacaatgtcctcaatgagatcgtgagtatcttgcagcccacccaggtccctgagcaggaaatggaagtccaggagccagcagagccaacaggtgtcaacatgttgtcccccggggagtcagagcatctgctggaaccggcagaagctgaaaggtctcagaggaggaggctgctggttccagcaaatgaaggtgatcccactgagactctgagacagtgcttcgatgactttgcagacttggtgccctttgactcctgggagccgctcatgaggaagttgggcctcatggacaatgagataaaggtggctaaagctgaggcagcgggccacagggacaccttgtacacgatgctgataaagtgggtcaacaaaaccgggcgagatgcctctgtccacaccctgctggatgccttggagacgctgggagagagacttgccaagcagaagattgaggaccacttgttgagctctggaaagttcatgtatctagaaggtaatgcagactctgccatgtcctaagtgtgattctcttcaggaagtcagaccttccctggtttaccttttttctggaaaaagcccaactggactccagtcagtaggaaagtgccacaattgtcacatgaccggtactggaagaaactctcccatccaacatcacccagtggatggaacatcctgtaacttttcactgcacttggcattatttttataagctg

SEQ ID NO: 196277 - DNA, 1718 bp, Homo sapiens
  Payload ID: 18725
  Gene Name: tumor necrosis factor receptor superfamily, member 10c, decoy without an intracellular domain
  Uniprot ID: O14798
  ENST ID: ENST00000356864
  CDS Start-End: 533-1312
ggagcaggctcaggatgggcctccagtgcctcctctggagctcactacccagactacagcagcgcagtgggcagcgcctcagctccttccccttctgctgcctacagcctggacaggacccggaatcaaaccgcaggccctgggtcaccgctgccggaaagagccagttcctgtccgtccatgcacccaccaccaaaacccaggccttcctggaggtgctaggggaggccatgccccttttctgagtgcttggaagtgactgctgcaagtgacaagtgaccacgccttttcccccgcgggtataaattcagaggcgctgcgctccgattctggcagtgcagctgtgggaacctctccacgcgcacgaactcagccaacgatttctgatagatttttgggagtttgaccagagatgcaaggggtgaaggagcgcttcctaccgttagggaactctggggacagagcgccccggccgcctgatggccgaggcagggtgcgacccaggacccaggacggcgtcgggaaccataccatggcccggatccccaagaccctaaagttcgtcgtcgtcatcgtcgcggtcctgctgccagtcctagcttactctgccaccactgcccggcaggaggaagttccccagcagacagtggccccacagcaacagaggcacagcttcaagggggaggagtgtccagcaggatctcatagatcagaacatactggagcctgtaacccgtgcacagagggtgtggattacaccaacgcttccaacaatgaaccttcttgcttcccatgtacagtttgtaaatcagatcaaaaacataaaagttcctgcaccatgaccagagacacagtgtgtcagtgtaaagaaggcaccttccggaatgaaaactccccagagatgtgccggaagtgtagcaggtgccctagtggggaagtccaagtcagtaattgtacgtcctgggatgatatccagtgtgttgaagaatttggtgccaatgccactgtggaaaccccagctgctgaagagacaatgaacaccagcccggggactcctgccccagctgctgaagagacaatgaacaccagcccggggactcctgccccagctgctgaagagacaatgaccaccagcccggggactcctgccccagctgctgaagagacaatgaccaccagcccggggactcctgccccagctgctgaagagacaatgatcaccagcccggggactcctgcctcttctcattacctctcatgcaccatcgtagggatcatagttctaattgtgcttctgattgtgtttgtttgaaagacttcactgtggaagaaattccttccttacctgaaaggttcaggtaggcgctggctgagggcggggggcgctggacactctctgccctgcctccctctgctgtgttcccacagacagaaacgcctgcccctgccccaagtcctggtgtctccagcctggctctatcttcctccttgtgatcgtcccatccccacatcccgtgcaccccccaggaccctggtctcatcagtccctctcctggagctgggggtccacacatctcccagccaagtccaagagggcagggccagttcctcccatcttcaggcccagccaggcagggggcagtcggctcctcaactgggtgacaagggtgaggatgagaagtggtcacgggatttattcagccttggtcagagcagaa

SEQ ID NO: 196278 - DNA, 1242 bp, Homo sapiens
  Payload ID: 18725
  Gene Name: tumor necrosis factor receptor superfamily, member 10c, decoy without an intracellular domain
  ENST ID: ENST00000397703
  CDS Start-End: 686-1153
gccagccgccctggaggacgtggaggggaggcagccacagtcctggagaggcctgagcctgaacaacatggcttcccccagcgtgagactcgcttgtcctcccaccgcctgctctctcctgatgaccaggttccaggagttatcaaagaacagcctctgagctgcgtggagaaagccatggagacagccagaagaaaacggcaggattagattaacctgtgattcctggctggccacgaggtcacccatggcatggagctgcccacaacgcccttctcagcatgaagcatcctgaaagatccagggccaggttccccaggattggggagttggaagctcattggcactgtcaaatttgaagaagaggcgtgctctgactgcctggacaggacccggaatcaaaccgcaggccctgggtcaccgctgccggaaagagccagttcctgtccgtccatgcacccaccaccaaaacccaggccttcctggaggtgctaggggaggccatgccccttttctgagtgcttggaagtgactgctgcaagtgacaagtgaccacgccttttcccccgcgggtataaattcagaggcgctgcgctccgattctggcagtgcagctgtgggaacctctccacgcgcacgaactcagccaacgatttctgatagatttttgggagtttgaccagagatgcaaggggtgaaggagcgcttcctaccgttagggaactctggggacagagcgccccggccgcctgatggccgaggcagggtgcgacccaggacccaggacggcgtcgggaaccataccatggcccggatccccaagaccctaaagttcgtcgtcgtcatcgtcgcggtcctgctgccagtgagtcccggccgcggtccctggctggggaagagcgcacctggcgccgggagggggcagggagacggggacacggcagggatgcctggccctggtcacctgcggccgggcatgtccgggcaggacgaactcgccgtcggagtcaggggaagaactgggtccccgggctgggcaggagggacccggccgcgagggagcagagaggcggtccccctggctgccccgagcccgcgaagggagggaagttccagaatcgagagagggagggagtcaaggtggaacccatagagtgagcctcctgaagacacagagcggttgcctctctcattaattaattaattagttaataaaattaaccccatgtttacattcttaaa

SEQ ID NO: 196279 - DNA, 894 bp, Homo sapiens
  Payload ID: 18725
  Gene Name: tumor necrosis factor receptor superfamily, member 10c, decoy without an intracellular domain
  ENST ID: ENST00000517558
  CDS Start-End: 202-405
ggcagtgcagctgtgggaacctctccacgcgcacgaactcagccaacgatttctgatagatttttgggagtttgaccagagatgcaaggggtgaaggagcgcttcctaccgttagggaactctggggacagagcgccccggccgcctgatggccgaggcagggtgcgacccaggacccaggacggcgtcgggaaccataccatggcccggatccccaagaccctaaagttcgtcgtcgtcatcgtcgcggtcctgctgccagatctcatagatcagaacatactggagcctgtaacccgtgcacagagggtgtggattacaccaacgcttccaacaatgaaccttcttgcttcccatgtacagtttgtaaatcagatcaaaaacataaaagttcctgcaccatgaccagagacacagtgtgtcagtgtaaagaaggcaccttccggaatgaaaactccccagagatgtgccggaagtgtagcaggtgccctagtggggaagtccaagtcagtaattgtacgtcctgggatgatatccagtgtgttgaagaatttggtgccaatgccactgtggaaaccccagctgctgaagagacaatgaacaccagcccggggactcctgccccagctgctgaagagacaatgaacaccagcccggggactcctgccccagctgctgaagagacaatgaccaccagcccggggactcctgccccagctgctgaagagacaatgaccaccagcccggggactcctgccccagctgctgaagagacaatgatcaccagcccggggactcctgcctcttctcattacctctcatgcaccatcgtagggatcatagttctaattgtgcttctgattgtgtttgtttgaaagacttcactgtggaaga

SEQ ID NO: 196280 - DNA, 3538 bp, Homo sapiens
  Payload ID: 18726
  Gene Name: tumor necrosis factor receptor superfamily, member 10d, decoy with truncated death domain
  Uniprot ID: Q9UBN6
  ENST ID: ENST00000312584
  CDS Start-End: 96-1256
ggcagtgtagctgcgagaacctttgcacgcgcacaaactacggggacgatttctgattgatttttggcgctttcgatccaccctcctcccttctcatgggactttggggacaaagcgtcccgaccgcctcgagcgctcgagcagggcgctatccaggagccaggacagcgtcgggaaccagaccatggctcctggaccccaagatccttaagttcgtcgtcttcatcgtcgcggttctgctgccggtccgggttgactctgccaccatcccccggcaggacgaagttccccagcagacagtggccccacagcaacagaggcgcagcctcaaggaggaggagtgtccagcaggatctcatagatcagaatatactggagcctgtaacccgtgcacagagggtgtggattacaccattgcttccaacaatttgccttcttgcctgctatgtacagtttgtaaatcaggtcaaacaaataaaagttcctgtaccacgaccagagacaccgtgtgtcagtgtgaaaaaggaagcttccaggataaaaactcccctgagatgtgccggacgtgtagaacagggtgtcccagagggatggtcaaggtcagtaattgtacgccccggagtgacatcaagtgcaaaaatgaatcagctgccagttccactgggaaaaccccagcagcggaggagacagtgaccaccatcctggggatgcttgcctctccctatcactaccttatcatcatagtggttttagtcatcattttagctgtggttgtggttggcttttcatgtcggaagaaattcatttcttacctcaaaggcatctgctcaggtggtggaggaggtcccgaacgtgtgcacagagtccttttccggcggcgttcatgtccttcacgagttcctggggcggaggacaatgcccgcaacgagaccctgagtaacagatacttgcagcccacccaggtctctgagcaggaaatccaaggtcaggagctggcagagctaacaggtgtgactgtagagttgccagaggagccacagcgtctgctggaacaggcagaagctgaagggtgtcagaggaggaggctgctggttccagtgaatgacgctgactccgctgacatcagcaccttgctggatgcctcggcaacactggaagaaggacatgcaaaggaaacaattcaggaccaactggtgggctccgaaaagctcttttatgaagaagatgaggcaggctctgctacgtcctgcctgtgaaagaatctcttcaggaaaccagagcttccctcatttaccttttctcctacaaagggaagcagcctggaagaaacagtccagtacttgacccatgccccaacaaactctactatccaatatggggcagcttaccaatggtcctagaactttgttaacgcacttggagtaatttttatgaaatactgcgtgtgataagcaaacgggagaaatttatatcagattcttggctgcatagttatacgattgtgtattaagggtcgttttaggccacatgcggtggctcatgcctgtaatcccagcactttgataggctgaggcaggtggattgcttgagctcgggagtttgagaccagcctcatcaacacagtgaaactccatctcaatttaaaaagaaaaaaagtggttttaggatgtcattctttgcagttcttcatcatgagacaagtctttttttctgcttcttatattgcaagctccatctctactggtgtgtgcatttaatgacatctaactacagatgccgcacagccacaatgctttgccttatagttttttaactttagaacgggattatcttgttattacctgtattttcagtttcggatatttttgacttaatgatgagattatcaagacgtagccctatgctaagtcatgagcatatggacttacgagggttcgacttagagttttgagctttaagataggattattggggcttacccccaccttaattagagaaacatttatattgcttactactgtaggctgtacatctcttttccgatttttgtataatgatgtaaacatggaaaaactttaggaaatgcacttattaggctgtttacatgggttgcctggatacaaatcagcagtcaaaaatgactaaaaatataactagtgacggagggagaaatcctccctctgtgggaggcacttactgcattccagttctccctcctgcgccctgagactggaccagggtttgatggctggcagcttctcaaggggcagcttgtcttacttgttaattttagaggtatatagccatatttatttataaataaatatttatttatttatttataagtagatgtttacatatgcccaggattttgaagagcctggtatctttgggaagccatgtgtctggtttgtcgtgctgggacagtcatgggactgcatcttccgacttgtccacagcagatgaggacagtgagaattaagttagatccgagactgcgaagagcttctctttcaagcgccattacagttgaacgttagtgaatcttgagcctcatttgggctcagggcagagcaggtgtttatctgccccggcatctgccatggcatcaagagggaagagtggacggtgcttgggaatggtgtgaaatggttgccgactcaggcatggatgggcccctctcgcttctggtggtctgtgaactgagtccctgggatgccttttagggcagagattcctgagctgcgttttagggtacagattccctgtttgaggagcttggcccctctgtaagcatctgactcatctcagagatatcaattcttaaacactgtgacaacaggatctaaaatggctgacacatttgtccttgtgtcacgttccattattttatttaaaaacctcagtaatcgttttagcttctttccagcaaactcttctccacagtagcccagtcgtggtaggataaattacggatatagtcattctaggggtttcagtcttttccatctcaaggcattgtgtgttttgttccgggactggtttggctgggacaaagttagaactgcctgaagttcgcacattcagattgttgtgtccatggagttttaggaggggatggcctttccggtcttcgcacttccatcctctcccacttccatctggcgtcccacaccttgtcccctgcacttctggatgacacagggtgctgctgcctcctagtctttgcctttgctgggccttctgtgcaggagacttggtctcaaagctcagagagagccagtccggtcccagctcctttgtcccttcctcagaggccttccttgaagatgcatctagactaccagccttatcagtgtttaagcttattcctttaacataagcttcctgacaacatgaaattgttggggttttttggcgttggttgatttgtttaggttttgctttatacccgggccaaatagcacataacacctggttatatatgaaatactcatatgtttatgaccaaaataaatatgaaacctcatattaaaaa

SEQ ID NO: 196281 - DNA, 3591 bp, Homo sapiens
  Payload ID: 18727
  Gene Name: tumor necrosis factor receptor superfamily, member 11a, NFKB activator
  Uniprot ID: Q9Y6Q6
  ENST ID: ENST00000269485
  CDS Start-End: 67-966
ggcagccgcgcccgctgggccacagaggccgctgaggccgcggcgcccgccagcctgtcccgcgccatggccccgcgcgcccggcggcgccgcccgctgttcgcgctgctgctgctctgcgcgctgctcgcccggctgcaggtggctttgcagatcgctcctccatgtaccagtgagaagcattatgagcatctgggacggtgctgtaacaaatgtgaaccaggaaagtacatgtcttctaaatgcactactacctctgacagtgtatgtctgccctgtggcccggatgaatacttggatagctggaatgaagaagataaatgcttgctgcataaagtttgtgatacaggcaaggccctggtggccgtggtcgccggcaacagcacgaccccccggcgctgcgcgtgcacggctgggtaccactggagccaggactgcgagtgctgccgccgcaacaccgagtgcgcgccgggcctgggcgcccagcacccgttgcagctcaacaaggacacagtgtgcaaaccttgccttgcaggctacttctctgatgccttttcctccacggacaaatgcagaccctggaccaactgtaccttccttggaaagagagtagaacatcatgggacagagaaatccgatgcggtttgcagttcttctctgccagctagaaaaccaccaaatggaaatgtgactggaaacagtaactccacgttcatctccagcgggcaggtgatgaacttcaagggcgacatcatcgtggtctacgtcagccagacctcgcaggagggcgcggcggcggctgcggagcccatgggccgcccggtgcaggaggagaccctggcgcgccgagactccttcgcggggaacggcccgcgcttcccggacccgtgcggcggccccgaggggctgcgggagccggagaaggcctcgaggccggtgcaggagcaaggcggggccaaggcttgagcgccccccatggctgggagcccgaagctcggagccagggctcgcgagggcagcaccgcagcctctgccccagccccggccacccagggatcgatcggtacagtcgaggaagaccacccggcattctctgcccactttgccttccaggaaatgggcttttcaggaagtgaattgatgaggactgtccccatgcccacggatgctcagcagcccgccgcactggggcagatgtctcccctgccactcctcaaactcgcagcagtaatttgtggcactatgacagctatttttatgactatcctgttctgtgggggggggggtctgttttccccccatatttgtattccttttcataacttttcttgatatctttcctccctcttttttaatgtaaaggttttctcaaaaattctcctaaaggtgagggtctctttcttttctcttttccttttttttttctttttttggcaacctggctctggcccaggctagagtgcagtggtgcgattatagcccggtgcagcctctaactcctgggctcaagcaatccaagtgatcctcccacctcaaccttcggagtagctgggatcacagctgcaggccacgcccagcttcctccccccgactccccccccagagacacggtcccaccatgttacccagcctggtctcaaactccccagctaaagcagtcctccagcctcggcctcccaaagtactgggattacaggcgtgagcccccacgctggcctgctttacgtattttcttttgtgcccctgctcacagtgttttagagatggctttcccagtgtgtgttcattgtaaacacttttgggaaagggctaaacatgtgaggcctggagatagttgctaagttgctaggaacatgtggtgggactttcatattctgaaaaatgttctatattctcatttttctaaaagaaagaaaaaaggaaacccgatttatttctcctgaatctttttaagtttgtgtcgttccttaagcagaactaagctcagtatgtgaccttacccgctaggtggttaatttatccatgctggcagaggcactcaggtacttggtaagcaaatttctaaaactccaagttgctgcagcttggcattcttcttattctagaggtctctctggaaaagatggagaaaatgaacaggacatggggctcctggaaagaaagggcccgggaagttcaaggaagaataaagttgaaattttaatttgcattttttttgtctagataagaatagcgtgaatagatcctcttttattcgtaaataatcgtgcatctgtgggttagccttgtagaagtggaaaacattccattttccaatgcatttaaatgtaaagccaaatctgcatgttgtgaatttaagaaaacttattatcctaaaggtgcctttctcttggcatcatcccgcttgtgagaagcctagaggacgctccaggtggaaggaaatcccctgggtggttttatcttttgttacccagtgagcactggttccccgcaaatactggggaaaagcaaaaatacacaagcaagttaaaattaattttgcacatctgggaggttataaaagaaagcactaatagtagtcactgcccagactttactggccacaaatgcccagctgaagagcatgactgtggatcactggtttttccctcctgctggaaatgctggggtggtagcggtcgattaggattttcagtggagaagcacaggacagttctgtaatttatgggactccttagccaacataaagaactgcaggaaataactgcacagccaggaggatccgttggtgggaatttaccgtcattcctgcccttttatttaacatcatccacagagagatgttatacaaatggaggaaaccattataccttttgatatggaatatattacagagttacagttcacaaagtagaatgctgagctgaaaacccgagtttctgctgtgactgtcatctcactgagcacttcgcttttctttgcttttattttttccttctataaaaaggcaataatgataatttataatagtttccctacccagagatattagaagtatgctacagtgaatgttaaagtaccttgagatccttaaatcaaaggtgctatatacataagtaagactctactttcagaaaaaggtaatattatttcctgcactgatccctactaattctatattgatccaaaggcaactcaatgctaaaaaatgtatagaaaatataagtctgtgtctgtgtactgtagagatgtatgtgacaagtgtaaacaaaatgaactgaagcagtaatgaacagttattagggggaacatgataaagagattatattaagcttatgtttcaccataaaatcctttttatggcttactaaaaccgagctcactgtaaaatcatgatccaacttattgctaatctttatgatatgcttattcctaatctttatggtatggtgtcaaccgttcatttgtatcttattgctcattccctggaccacagactagggacagaaaatacttgctttaataatatatatgctgttgatttcacaaaaatttattaaaatacagcctgggtacccagtgaaagagctg

SEQ ID NO: 196282 - DNA, 8147 bp, Homo sapiens
  Payload ID: 18727
  Gene Name: tumor necrosis factor receptor superfamily, member 11a, NFKB activator
  Uniprot ID: Q9Y6Q6
  ENST ID: ENST00000586569
  CDS Start-End: 39-1889
ccgctgaggccgcggcgcccgccagcctgtcccgcgccatggccccgcgcgcccggcggcgccgcccgctgttcgcgctgctgctgctctgcgcgctgctcgcccggctgcaggtggctttgcagatcgctcctccatgtaccagtgagaagcattatgagcatctgggacggtgctgtaacaaatgtgaaccaggaaagtacatgtcttctaaatgcactactacctctgacagtgtatgtctgccctgtggcccggatgaatacttggatagctggaatgaagaagataaatgcttgctgcataaagtttgtgatacaggcaaggccctggtggccgtggtcgccggcaacagcacgaccccccggcgctgcgcgtgcacggctgggtaccactggagccaggactgcgagtgctgccgccgcaacaccgagtgcgcgccgggcctgggcgcccagcacccgttgcagctcaacaaggacacagtgtgcaaaccttgccttgcaggctacttctctgatgccttttcctccacggacaaatgcagaccctggaccaactgtaccttccttggaaagagagtagaacatcatgggacagagaaatccgatgcggtttgcagttcttctctgccagctagaaaaccaccaaatgaaccccatgtttacttgcccggtttaataattctgcttctcttcgcgtctgtggccctggtggctgccatcatctttggcgtttgctataggaaaaaagggaaagcactcacagctaatttgtggcactggatcaatgaggcttgtggccgcctaagtggagataaggagtcctcaggtgacagttgtgtcagtacacacacggcaaactttggtcagcagggagcatgtgaaggtgtcttactgctgactctggaggagaagacatttccagaagatatgtgctacccagatcaaggtggtgtctgtcagggcacatgtgtaggaggtggtccctacgcacaaggcgaagatgccaggatgctctcattggtcagcaagaccgagatagaggaagacagcttcagacagatgcccacagaagatgaatacatggacaggccctcccagcccacagaccagttactgttcctcactgagcctggaagcaaatccacacctcctttctctgaacccctggaggtgggggagaatgacagtttaagccagtgcttcacggggacacagagcacagtgggttcagaaagctgcaactgcactgagcccctgtgcaggactgattggactcccatgtcctctgaaaactacttgcaaaaagaggtggacagtggccattgcccgcactgggcagccagccccagccccaactgggcagatgtctgcacaggctgccggaaccctcctggggaggactgtgaacccctcgtgggttccccaaaacgtggacccttgccccagtgcgcctatggcatgggccttccccctgaagaagaagccagcaggacggaggccagagaccagcccgaggatggggctgatgggaggctcccaagctcagcgagggcaggtgccgggtctggaagctcccctggtggccagtcccctgcatctggaaatgtgactggaaacagtaactccacgttcatctccagcgggcaggtgatgaacttcaagggcgacatcatcgtggtctacgtcagccagacctcgcaggagggcgcggcggcggctgcggagcccatgggccgcccggtgcaggaggagaccctggcgcgccgagactccttcgcggggaacggcccgcgcttcccggacccgtgcggcggccccgaggggctgcgggagccggagaaggcctcgaggccggtgcaggagcaaggcggggccaaggcttgagcgccccccatggctgggagcccgaagctcggagccagggctcgcgagggcagcaccgcagcctctgccccagccccggccacccagggatcgatcggtacagtcgaggaagaccacccggcattctctgcccactttgccttccaggaaatgggcttttcaggaagtgaattgatgaggactgtccccatgcccacggatgctcagcagcccgccgcactggggcagatgtctcccctgccactcctcaaactcgcagcagtaatttgtggcactatgacagctatttttatgactatcctgttctgtgggggggggggtctgttttccccccatatttgtattccttttcataacttttcttgatatctttcctccctcttttttaatgtaaaggttttctcaaaaattctcctaaaggtgagggtctctttcttttctcttttccttttttttttctttttttggcaacctggctctggcccaggctagagtgcagtggtgcgattatagcccggtgcagcctctaactcctgggctcaagcaatccaagtgatcctcccacctcaaccttcggagtagctgggatcacagctgcaggccacgcccagcttcctccccccgactccccccccagagacacggtcccaccatgttacccagcctggtctcaaactccccagctaaagcagtcctccagcctcggcctcccaaagtactgggattacaggcgtgagcccccacgctggcctgctttacgtattttcttttgtgcccctgctcacagtgttttagagatggctttcccagtgtgtgttcattgtaaacacttttgggaaagggctaaacatgtgaggcctggagatagttgctaagttgctaggaacatgtggtgggactttcatattctgaaaaatgttctatattctcatttttctaaaagaaagaaaaaaggaaacccgatttatttctcctgaatctttttaagtttgtgtcgttccttaagcagaactaagctcagtatgtgaccttacccgctaggtggttaatttatccatgctggcagaggcactcaggtacttggtaagcaaatttctaaaactccaagttgctgcagcttggcattcttcttattctagaggtctctctggaaaagatggagaaaatgaacaggacatggggctcctggaaagaaagggcccgggaagttcaaggaagaataaagttgaaattttaatttgcattttttttgtctagataagaatagcgtgaatagatcctcttttattcgtaaataatcgtgcatctgtgggttagccttgtagaagtggaaaacattccattttccaatgcatttaaatgtaaagccaaatctgcatgttgtgaatttaagaaaacttattatcctaaaggtgcctttctcttggcatcatcccgcttgtgagaagcctagaggacgctccaggtggaaggaaatcccctgggtggttttatcttttgttacccagtgagcactggttccccgcaaatactggggaaaagcaaaaatacacaagcaagttaaaattaattttgcacatctgggaggttataaaagaaagcactaatagtagtcactgcccagactttactggccacaaatgcccagctgaagagcatgactgtggatcactggtttttccctcctgctggaaatgctggggtggtagcggtcgattaggattttcagtggagaagcacaggacagttctgtaatttatgggactccttagccaacataaagaactgcaggaaataactgcacagccaggaggatccgttggtgggaatttaccgtcattcctgcccttttatttaacatcatccacagagagatgttatacaaatggaggaaaccattataccttttgatatggaatatattacagagttacagttcacaaagtagaatgctgagctgaaaacccgagtttctgctgtgactgtcatctcactgagcacttcgcttttctttgcttttattttttccttctataaaaaggcaataatgataatttataatagtttccctacccagagatattagaagtatgctacagtgaatgttaaagtaccttgagatccttaaatcaaaggtgctatatacataagtaagactctactttcagaaaaaggtaatattatttcctgcactgatccctactaattctatattgatccaaaggcaactcaatgctaaaaaatgtatagaaaatataagtctgtgtctgtgtactgtagagatgtatgtgacaagtgtaaacaaaatgaactgaagcagtaatgaacagttattagggggaacatgataaagagattatattaagcttatgtttcaccataaaatcctttttatggcttactaaaaccgagctcactgtaaaatcatgatccaacttattgctaatctttatgatatgcttattcctaatctttatggtatggtgtcaaccgttcatttgtatcttattgctcattccctggaccacagactagggacagaaaatacttgctttaataatatatatgctgttgatttcacaaaaatttattaaaatacagcctgggtacccagtgaaagagctgaaatggaaatggagtatcatgtttcctactcacattttactcagctgtcggaaggaagaatgaatttctcaagagcagtttgaatgtgttagatcagaaccttcatgtggtggggaaaatgggattatttcagtgtaacaaaccacccaaagacttagtggcttaaaatagtcaccattggccaggcacagcggttcatgcctcccagtgctttgggaggccaaggcaggaggatcacttgaggacagtagttagagatcaaactgggcaatggagtgagacctcgtctctacaaaaaatacaaaacttatctgggcacggtggtgtgcacctgcagtcctggctactcaggaggctgaggcaggaggatgcttgagtccaggagttcaaggttactgtgagctttgattgggtcagtgcactccagtgtaaaaaaacaaaaataaaaaccaccacttatttagctcccaattctatgggttggatcagcttgggtggttcttcaggcctggtccctcctggcctggtttgcttacccatttacaatgacccggctagttggccgggccaggctgtgtgctctccacctgtctcccatccttccagccacctagctgggcatgctctcatggtggtgtcgagcctgagaacaagcagaaacctgccaggcttcttgaggcctaggctctaactggcatgctgtcacttctgccacattctgtgggccaaagcaggtcacaaaggcagcccagatccaagggatgggggagcagcatatccccccatgggaagagttgcggaatgagagggtagggggtggacacacagaggggaagatggcccccttgccatctgtccaccacagggcactgcgtggagtaaaatgctgcagagaagagtgcattctgggaaaaaaagaggaacatatcccagcccctaaccagtgagtagctccttctctggtgattgaattcccttaatgcacagcactatagattcccacaatgaaagggacacccacgttcatatttaagtgctgtgtcaaaattctttccagagccaaatataggtgatttgggaattgagcctactgtactgcttccacattcctttggcacagaaaactgaaaagtcacaacttctaaaatcaagaaaactggtgagataccttggggtagagaaacctgcatataaacagataaaagatcgagtgttcacccttcacctcagctcaacaaacaaactcttgttacgattatacaagggtgagcttgagcaaaggtgctgtctttggtggaagaaacgtagttttgagttgtttgctctttgacagtctctgatggcatgtgagtctggtgcattgctgtgggctgcgctgggcacaagttgcataacccgcttttggaagaggagacaaagcattcaaagccctaaacactctgttggtgaatcatcatgtttattgagtgtgcttttagtggcagggccctgagcacctgggaaaggagatgaggagcgctggagggttcggagcagagaagacgagacaatgctctgctccaagcgccagaggaggcttctgggaaggggctgtctgtggaatttctgacccccagagccctgctggtgaagtcttgcaaccactaaagctttgccagagaagaggagggacctgacactgggcagtggcggtgccagcagtgagcacaggcggggtctaggtgggatcactgaagccaagccaagtggtgcagggggagccgccctggaccaacacccccatggctgccccactgcggaactgcctactgcggcaaaacaatcctatgtcccccaaggtttcaacaaagaggaggaccgaataaatgtcccagtgggcaggcacacccacaagacttgctgctcctcctgacccacccgcatggctctgcacagctgtgagtccagttttctctcttcctacctccctcttacccagttatcctgaccccagggtgaggttgaaactcatgctaggctaacatctctttccttcatcccattcataaaactggcatacaggaatgttttaaaaaaatctttaagattaccaggagtataaaagttaaaatgacaaaattacaggcctgttaccagatcttcgtactaaccaaggagctggtgacactaccctcttccctgtgtgatagaaaatgcagacgttttgcaggcagacctggttcatgactcagcgctgtgacttgtggacttatcttgtgcagctacatcacttcttagccttgttttcaacatgcgtaagcagaaggtactaatattagtctttagggctggtttgaggatgacgtgagatgagagacaaccaagcactcactggcagttcctagaagattccagtagtagagatctgactgtcctacactactttccctccctgtctctgacacttgttcattcctgggctcaggagccatctcagtcatcatgtcggaccacgtaactataaccaagctctgctgcccacctgggacaccttcccactctttgcaactaggtcggagggacgcaccttctccacagttgacaggactgttatggttgacccaaaagttgtcatcttctgacatgacacactgagggaagtagacttacccaatataacttcacattatactgtcttaaaagactatgattaaaatgggcatcagtgtaggcaacatgtagggcgcaaagaatagccagatgtgaaggttgaaaggctatgtgggctagtttgtcatggtattcctggtgcctctccccgtttgggaagaataacacattgaccaccggctcagaggaggtggcattataggtccaggccccttcaggagggcactggagtcaatgaaagcttttgctctcacccaggctcttggtttctcacgggcaggggtagcccaggaaacaaaggctgtatagactttaagtcgtgagaaaaacgacattcttatggtgaggctcttagagactgtctccatttaagcagcagcagtaaaacatcttaccctaaaatgaagaagcaaatccatttttattggcttttatagcctctctctttcaatgacaaagaaaccattaaaatgaatgtttaaagttcttagaagagctttctctaaatatttactctgtcagtggaaaaataaacattttttacatcgggtctattgagtttgttatatacagtaaaattcaccctttttagatatatagttttatgagttttaacaaaaatacatagttgtgtaaccaccaccatcacaatcaagatatagaatatttcaacatcccaaagttcccatttcccttttcagtcaatcccttccccactacccctagcccctggcaaccattatctgttctctcttcccatagtttcaccttttccaatttgtcgtgtagagttacacagctcatagccatttgagtctggcttctttccacataatgtccttgagatccatcggtgggtacaccagtagttccattttttttctgagtagtagtccattgtatggatgtactgcggtttattcaccaacatatgggttctttcctgtttggggagattacaaataaagctactataaaaactcg

SEQ ID NO: 196283 - DNA, 3809 bp, Homo sapiens
  Payload ID: 18727
  Gene Name: tumor necrosis factor receptor superfamily, member 11a, NFKB activator
  Uniprot ID: Q9Y6Q6
  ENST ID: ENST00000616710
  CDS Start-End: 67-858
ggcagccgcgcccgctgggccacagaggccgctgaggccgcggcgcccgccagcctgtcccgcgccatggccccgcgcgcccggcggcgccgcccgctgttcgcgctgctgctgctctgcgcgctgctcgcccggctgcaggtggctttgcagatcgctcctccatgtaccagtgagaagcattatgagcatctgggacggtgctgtaacaaatgtgaaccaggaaagtacatgtcttctaaatgcactactacctctgacagtgtatgtctgccctgtggcccggatgaatacttggatagctggaatgaagaagataaatgcttgctgcataaagtttgtgatacaggcaaggccctggtggccgtggtcgccggcaacagcacgaccccccggcgctgcgcgtgcacggctgggtaccactggagccaggactgcgagtgctgccgccgcaacaccgagtgcgcgccgggcctgggcgcccagcacccgttgcagctcaacaaggacacagtgtgcaaaccttgccttgcaggctacttctctgatgccttttcctccacggacaaatgcagaccctggaccaactgtaccttccttggaaagagagtagaacatcatgggacagagaaatccgatgcggtttgcagttcttctctgccagctagaaaaccaccaaatgaaccccatgtttacttgcccggtttaataattctgcttctcttcgcgtctgtggccctggtggctgccatcatctttggcgtttgctataggaaaaaagggaaagcactcacagctaatttgtggcactggatcaatgaggcttgtggccgcctaagtggagataaggaaatgtgactggaaacagtaactccacgttcatctccagcgggcaggtgatgaacttcaagggcgacatcatcgtggtctacgtcagccagacctcgcaggagggcgcggcggcggctgcggagcccatgggccgcccggtgcaggaggagaccctggcgcgccgagactccttcgcggggaacggcccgcgcttcccggacccgtgcggcggccccgaggggctgcgggagccggagaaggcctcgaggccggtgcaggagcaaggcggggccaaggcttgagcgccccccatggctgggagcccgaagctcggagccagggctcgcgagggcagcaccgcagcctctgccccagccccggccacccagggatcgatcggtacagtcgaggaagaccacccggcattctctgcccactttgccttccaggaaatgggcttttcaggaagtgaattgatgaggactgtccccatgcccacggatgctcagcagcccgccgcactggggcagatgtctcccctgccactcctcaaactcgcagcagtaatttgtggcactatgacagctatttttatgactatcctgttctgtgggggggggggtctgttttccccccatatttgtattccttttcataacttttcttgatatctttcctccctcttttttaatgtaaaggttttctcaaaaattctcctaaaggtgagggtctctttcttttctcttttccttttttttttctttttttggcaacctggctctggcccaggctagagtgcagtggtgcgattatagcccggtgcagcctctaactcctgggctcaagcaatccaagtgatcctcccacctcaaccttcggagtagctgggatcacagctgcaggccacgcccagcttcctccccccgactccccccccagagacacggtcccaccatgttacccagcctggtctcaaactccccagctaaagcagtcctccagcctcggcctcccaaagtactgggattacaggcgtgagcccccacgctggcctgctttacgtattttcttttgtgcccctgctcacagtgttttagagatggctttcccagtgtgtgttcattgtaaacacttttgggaaagggctaaacatgtgaggcctggagatagttgctaagttgctaggaacatgtggtgggactttcatattctgaaaaatgttctatattctcatttttctaaaagaaagaaaaaaggaaacccgatttatttctcctgaatctttttaagtttgtgtcgttccttaagcagaactaagctcagtatgtgaccttacccgctaggtggttaatttatccatgctggcagaggcactcaggtacttggtaagcaaatttctaaaactccaagttgctgcagcttggcattcttcttattctagaggtctctctggaaaagatggagaaaatgaacaggacatggggctcctggaaagaaagggcccgggaagttcaaggaagaataaagttgaaattttaatttgcattttttttgtctagataagaatagcgtgaatagatcctcttttattcgtaaataatcgtgcatctgtgggttagccttgtagaagtggaaaacattccattttccaatgcatttaaatgtaaagccaaatctgcatgttgtgaatttaagaaaacttattatcctaaaggtgcctttctcttggcatcatcccgcttgtgagaagcctagaggacgctccaggtggaaggaaatcccctgggtggttttatcttttgttacccagtgagcactggttccccgcaaatactggggaaaagcaaaaatacacaagcaagttaaaattaattttgcacatctgggaggttataaaagaaagcactaatagtagtcactgcccagactttactggccacaaatgcccagctgaagagcatgactgtggatcactggtttttccctcctgctggaaatgctggggtggtagcggtcgattaggattttcagtggagaagcacaggacagttctgtaatttatgggactccttagccaacataaagaactgcaggaaataactgcacagccaggaggatccgttggtgggaatttaccgtcattcctgcccttttatttaacatcatccacagagagatgttatacaaatggaggaaaccattataccttttgatatggaatatattacagagttacagttcacaaagtagaatgctgagctgaaaacccgagtttctgctgtgactgtcatctcactgagcacttcgcttttctttgcttttattttttccttctataaaaaggcaataatgataatttataatagtttccctacccagagatattagaagtatgctacagtgaatgttaaagtaccttgagatccttaaatcaaaggtgctatatacataagtaagactctactttcagaaaaaggtaatattatttcctgcactgatccctactaattctatattgatccaaaggcaactcaatgctaaaaaatgtatagaaaatataagtctgtgtctgtgtactgtagagatgtatgtgacaagtgtaaacaaaatgaactgaagcagtaatgaacagttattagggggaacatgataaagagattatattaagcttatgtttcaccataaaatcctttttatggcttactaaaaccgagctcactgtaaaatcatgatccaacttattgctaatctttatgatatgcttattcctaatctttatggtatggtgtcaaccgttcatttgtatcttattgctcattccctggaccacagactagggacagaaaatacttgctttaataatatatatgctgttgatttcacaaaaatttattaaaatacagcctgggtacccagtgaaagagctgaaatggaaatggagtatcatgtttcctactcacattttactcagctgtcgg

SEQ ID NO: 196284 - DNA, 3756 bp, Homo sapiens
  Payload ID: 18727
  Gene Name: tumor necrosis factor receptor superfamily, member 11a, NFKB activator
  Uniprot ID: Q9Y6Q6
  ENST ID: ENST00000617039
  CDS Start-End: 67-1080
ggcagccgcgcccgctgggccacagaggccgctgaggccgcggcgcccgccagcctgtcccgcgccatggccccgcgcgcccggcggcgccgcccgctgttcgcgctgctgctgctctgcgcgctgctcgcccggctgcaggtggctttgcagatcgctcctccatgtaccagtgagaagcattatgagcatctgggacggtgctgtaacaaatgtgaaccaggaaagtacatgtcttctaaatgcactactacctctgacagtgtatgtctgccctgtggcccggatgaatacttggatagctggaatgaagaagataaatgcttgctgcataaagtttgtgatacaggcaaggccctggtggccgtggtcgccggcaacagcacgaccccccggcgctgcgcgtgcacggctgggtaccactggagccaggactgcgagtgctgccgccgcaacaccgagtgcgcgccgggcctgggcgcccagcacccgttgcagctcaacaaggacacagtgtgcaaaccttgccttgcaggctacttctctgatgccttttcctccacggacaaatgcagaccctggaccaactgtaccttccttggaaagagagtagaacatcatgggacagagaaatccgatgcggtttgcagttcttctctgccagctagaaaaccaccaaatgaaccccatgtttacttgcccggtttaataattctgcttctcttcgcgtctgtggccctggtggctgccatcatctttggcgtttgctataggaaaaaagggaaagcactcacaggaaatgtgactggaaacagtaactccacgttcatctccagcgggcaggtgatgaacttcaagggcgacatcatcgtggtctacgtcagccagacctcgcaggagggcgcggcggcggctgcggagcccatgggccgcccggtgcaggaggagaccctggcgcgccgagactccttcgcggggaacggcccgcgcttcccggacccgtgcggcggccccgaggggctgcgggagccggagaaggcctcgaggccggtgcaggagcaaggcggggccaaggcttgagcgccccccatggctgggagcccgaagctcggagccagggctcgcgagggcagcaccgcagcctctgccccagccccggccacccagggatcgatcggtacagtcgaggaagaccacccggcattctctgcccactttgccttccaggaaatgggcttttcaggaagtgaattgatgaggactgtccccatgcccacggatgctcagcagcccgccgcactggggcagatgtctcccctgccactcctcaaactcgcagcagtaatttgtggcactatgacagctatttttatgactatcctgttctgtgggggggggggtctgttttccccccatatttgtattccttttcataacttttcttgatatctttcctccctcttttttaatgtaaaggttttctcaaaaattctcctaaaggtgagggtctctttcttttctcttttccttttttttttctttttttggcaacctggctctggcccaggctagagtgcagtggtgcgattatagcccggtgcagcctctaactcctgggctcaagcaatccaagtgatcctcccacctcaaccttcggagtagctgggatcacagctgcaggccacgcccagcttcctccccccgactccccccccagagacacggtcccaccatgttacccagcctggtctcaaactccccagctaaagcagtcctccagcctcggcctcccaaagtactgggattacaggcgtgagcccccacgctggcctgctttacgtattttcttttgtgcccctgctcacagtgttttagagatggctttcccagtgtgtgttcattgtaaacacttttgggaaagggctaaacatgtgaggcctggagatagttgctaagttgctaggaacatgtggtgggactttcatattctgaaaaatgttctatattctcatttttctaaaagaaagaaaaaaggaaacccgatttatttctcctgaatctttttaagtttgtgtcgttccttaagcagaactaagctcagtatgtgaccttacccgctaggtggttaatttatccatgctggcagaggcactcaggtacttggtaagcaaatttctaaaactccaagttgctgcagcttggcattcttcttattctagaggtctctctggaaaagatggagaaaatgaacaggacatggggctcctggaaagaaagggcccgggaagttcaaggaagaataaagttgaaattttaatttgcattttttttgtctagataagaatagcgtgaatagatcctcttttattcgtaaataatcgtgcatctgtgggttagccttgtagaagtggaaaacattccattttccaatgcatttaaatgtaaagccaaatctgcatgttgtgaatttaagaaaacttattatcctaaaggtgcctttctcttggcatcatcccgcttgtgagaagcctagaggacgctccaggtggaaggaaatcccctgggtggttttatcttttgttacccagtgagcactggttccccgcaaatactggggaaaagcaaaaatacacaagcaagttaaaattaattttgcacatctgggaggttataaaagaaagcactaatagtagtcactgcccagactttactggccacaaatgcccagctgaagagcatgactgtggatcactggtttttccctcctgctggaaatgctggggtggtagcggtcgattaggattttcagtggagaagcacaggacagttctgtaatttatgggactccttagccaacataaagaactgcaggaaataactgcacagccaggaggatccgttggtgggaatttaccgtcattcctgcccttttatttaacatcatccacagagagatgttatacaaatggaggaaaccattataccttttgatatggaatatattacagagttacagttcacaaagtagaatgctgagctgaaaacccgagtttctgctgtgactgtcatctcactgagcacttcgcttttctttgcttttattttttccttctataaaaaggcaataatgataatttataatagtttccctacccagagatattagaagtatgctacagtgaatgttaaagtaccttgagatccttaaatcaaaggtgctatatacataagtaagactctactttcagaaaaaggtaatattatttcctgcactgatccctactaattctatattgatccaaaggcaactcaatgctaaaaaatgtatagaaaatataagtctgtgtctgtgtactgtagagatgtatgtgacaagtgtaaacaaaatgaactgaagcagtaatgaacagttattagggggaacatgataaagagattatattaagcttatgtttcaccataaaatcctttttatggcttactaaaaccgagctcactgtaaaatcatgatccaacttattgctaatctttatgatatgcttattcctaatctttatggtatggtgtcaaccgttcatttgtatcttattgctcattccctggaccacagactagggacagaaaatacttgctttaataatatatatgctgttgatttcacaaaaatttattaaaatacagcctgggtacccagtgaaagagctgaaatggaaatggagtatcatgtttcctactcacattttactcagctgtcgg

SEQ ID NO: 196285 - DNA, 2402 bp, Homo sapiens
  Payload ID: 18728
  Gene Name: tumor necrosis factor receptor superfamily, member 11b
  Uniprot ID: O00300
  ENST ID: ENST00000297350
  CDS Start-End: 380-1585
ggaaacctcagagccccgcggagacagcagccgccttgttcctcagcccggtggcttttttttcccctgctctcccaggggccagacaccaccgccccacccctcacgccccacctccctgggggatcctttccgccccagccctgaaagcgttaaccctggagctttctgcacaccccccgaccgctcccgcccaagcttcctaaaaaagaaaggtgcaaagtttggtccaggatagaaaaatgactgatcaaaggcaggcgatacttcctgttgccgggacgctatatataacgtgatgagcgcacgggctgcggagacgcaccggagcgctcgcccagccgccgcctccaagcccctgaggtttccggggaccacaatgaacaacttgctgtgctgcgcgctcgtgtttctggacatctccattaagtggaccacccaggaaacgtttcctccaaagtaccttcattatgacgaagaaacctctcatcagctgttgtgtgacaaatgtcctcctggtacctacctaaaacaacactgtacagcaaagtggaagaccgtgtgcgccccttgccctgaccactactacacagacagctggcacaccagtgacgagtgtctatactgcagccccgtgtgcaaggagctgcagtacgtcaagcaggagtgcaatcgcacccacaaccgcgtgtgcgaatgcaaggaagggcgctaccttgagatagagttctgcttgaaacataggagctgccctcctggatttggagtggtgcaagctggaaccccagagcgaaatacagtttgcaaaagatgtccagatgggttcttctcaaatgagacgtcatctaaagcaccctgtagaaaacacacaaattgcagtgtctttggtctcctgctaactcagaaaggaaatgcaacacacgacaacatatgttccggaaacagtgaatcaactcaaaaatgtggaatagatgttaccctgtgtgaggaggcattcttcaggtttgctgttcctacaaagtttacgcctaactggcttagtgtcttggtagacaatttgcctggcaccaaagtaaacgcagagagtgtagagaggataaaacggcaacacagctcacaagaacagactttccagctgctgaagttatggaaacatcaaaacaaagaccaagatatagtcaagaagatcatccaagatattgacctctgtgaaaacagcgtgcagcggcacattggacatgctaacctcaccttcgagcagcttcgtagcttgatggaaagcttaccgggaaagaaagtgggagcagaagacattgaaaaaacaataaaggcatgcaaacccagtgaccagatcctgaagctgctcagtttgtggcgaataaaaaatggcgaccaagacaccttgaagggcctaatgcacgcactaaagcactcaaagacgtaccactttcccaaaactgtcactcagagtctaaagaagaccatcaggttccttcacagcttcacaatgtacaaattgtatcagaagttatttttagaaatgataggtaaccaggtccaatcagtaaaaataagctgcttataactggaaatggccattgagctgtttcctcacaattggcgagatcccatggatgagtaaactgtttctcaggcacttgaggctttcagtgatatctttctcattaccagtgactaattttgccacagggtactaaaagaaactatgatgtggagaaaggactaacatctcctccaataaaccccaaatggttaatccaactgtcagatctggatcgttatctactgactatattttcccttattactgcttgcagtaattcaactggaaattaaaaaaaaaaaactagactccattgtgccttactaaatatgggaatgtctaacttaaatagctttgagatttcagctatgctagaggcttttattagaaagccatatttttttctgtaaaagttactaatatatctgtaacactattacagtattgctatttatattcattcagatataagatttgtacatattatcatcctataaagaaacggtatgacttaattttagaaagaaaattatattctgtttattatgacaaatgaaagagaaaatatatatttttaatggaaagtttgtagcatttttctaataggtactgccatatttttctgtgtggagtatttttataattttatctgtataagctgtaatatcattttatagaaaatgcattatttagtcaattgtttaatgttggaaaacatatgaaatataaattatctgaatattagatgctctgagaaattgaatgtaccttatttaaaagattttatggttttataactatataaatgacattattaaagttttcaaattatttttta

SEQ ID NO: 196286 - DNA, 1144 bp, Homo sapiens
  Payload ID: 18728
  Gene Name: tumor necrosis factor receptor superfamily, member 11b
  ENST ID: ENST00000517352
  CDS Start-End: 63-500
agacgcaccggagcgctcgcccagccgccgcctccaagcccctgaggtttccggggaccacaatgaacaacttgctgtgctgcgcgctcgtgtttctggacatctccattaagtggaccacccaggaaacgtttcctccaaagtaccttcattatgacgaagaaacctctcatcagctgttgtgtgacaaatgtcctcctggtacctacctaaaacaacactgtacagcaaagtggaagaccgtgtgcgccccttgccctgaccactactacacagacagctggcacaccagtgacgagtgtctatactgcagccccgtgtgcaaggagctgcagtacgtcaagcaggagtgcaatcgcacccacaaccgcgtgtgcgaatgcaaggaagggcgctaccttgagatagagttctgcttgaaacataggagctgccctcctggatttggagtggtgcaagctggatgcaggagaagacccaagccacagatatgtatctgaagaatgaacaagattcttaggcccggcacggtggctcacatctgtaatctcaagagtttgagaggtcaaggcgggcagatcacctgaggtcaggagttcaagaccagcctggccaacatgatgaaaccctgcctctactaaaaatacaaaaattagcagggcatggtggtgcatgcctgcaaccctagctactcaggaggctgagacaggagaatctcttgaaccctggaggcggaggttgtggaaccccagagcgaaatacagtttgcaaaagatgtccagatgggttcttctcaaatgagacgtcatctaaagcaccctgtagaaaacacacaaattgcagtgtctttggtctcctgctaactcagaaaggaaatgcaacacacgacaacatatgttccggaaacagtgaatcaactcaaaaatgtggaatagatgttaccctgtgtgaggaggcattcttcaggtttgctgttcctacaaagtttacgcctaactggcttagtgtcttggtagacaatttgcctggcaccaaagtaaacgcagagagtgtagagaggataaaacggcaacacagctcacaagaacagactttccagctgctgaagttatggaaacatcaaaacaaagaccaagatatagtc

SEQ ID NO: 196287 - DNA, 1033 bp, Homo sapiens
  Payload ID: 18729
  Gene Name: tumor necrosis factor receptor superfamily, member 12A
  Uniprot ID: Q9NP84
  ENST ID: ENST00000326577
  CDS Start-End: 87-476
aaggcgggggcgggggcggggcggcggccgtgggtccctgccggccggcggcgggcgcagacagcggcgggcgcaggacgtgcactatggctcggggctcgctgcgccggttgctgcggctcctcgtgctggggctctggctggcgttgctgcgctccgtggccggggagcaagcgccaggcaccgccccctgctcccgcggcagctcctggagcgcggacctggacaagtgcatggactgcgcgtcttgcagggcgcgaccgcacagcgacttctgcctgggctgcgctgcagcacctcctgcccccttccggctgctttggcccatccttgggggcgctctgagcctgaccttcgtgctggggctgctttctggctttttggtctggagacgatgccgcaggagagagaagttcaccacccccatagaggagaccggcggagagggctgcccagctgtggcgctgatccagtgacaatgtgccccctgccagccggggctcgcccactcatcattcattcatccattctagagccagtctctgcctcccagacgcggcgggagccaagctcctccaaccacaaggggggtggggggcggtgaatcacctctgaggcctgggcccagggttcaggggaaccttccaaggtgtctggttgccctgcctctggctccagaacagaaagggagcctcacgctggctcacacaaaacagctgacactgactaaggaactgcagcatttgcacaggggaggggggtgccctccttcctagaggccctgggggccaggctgacttggggggcagacttgacactaggccccactcactcagatgtcctgaaattccaccacgggggtcaccctggggggttagggacctatttttaacactagggggctggcccactaggagggctggccctaagatacagacccccccaactccccaaagcggggaggagatatttattttggggagagtttggaggggagggagaatttattaataaaagaatctttaactttaaa

SEQ ID NO: 196288 - DNA, 881 bp, Homo sapiens
  Payload ID: 18729
  Gene Name: tumor necrosis factor receptor superfamily, member 12A
  Uniprot ID: Q9NP84
  ENST ID: ENST00000341627
  CDS Start-End: 40-324
gcggcgggcgcagacagcggcgggcgcaggacgtgcactatggctcggggctcgctgcgccggttgctgcggctcctcgtgctggggctctggctggcgttgctgcgctccgtggccggggagcaagcgccaggcgctgcagcacctcctgcccccttccggctgctttggcccatccttgggggcgctctgagcctgaccttcgtgctggggctgctttctggctttttggtctggagacgatgccgcaggagagagaagttcaccacccccatagaggagaccggcggagagggctgcccagctgtggcgctgatccagtgacaatgtgccccctgccagccggggctcgcccactcatcattcattcatccattctagagccagtctctgcctcccagacgcggcgggagccaagctcctccaaccacaaggggggtggggggcggtgaatcacctctgaggcctgggcccagggttcaggggaaccttccaaggtgtctggttgccctgcctctggctccagaacagaaagggagcctcacgctggctcacacaaaacagctgacactgactaaggaactgcagcatttgcacaggggaggggggtgccctccttcctagaggccctgggggccaggctgacttggggggcagacttgacactaggccccactcactcagatgtcctgaaattccaccacgggggtcaccctggggggttagggacctatttttaacactagggggctggcccactaggagggctggccctaagatacagacccccccaactccccaaagcggggaggagatatttattttggggagagtttggaggggagggagaatttattaataaaagaatctttaactttaaa

SEQ ID NO: 196289 - DNA, 583 bp, Homo sapiens
  Payload ID: 18729
  Gene Name: tumor necrosis factor receptor superfamily, member 12A
  ENST ID: ENST00000574699
  CDS Start-End: 31-315
gcagacagcggcgggcgcaggacgtgcactatggctcggggctcgctgcgccggttgctgcggctcctcgtgctggggctctggctggcgttgctgcgctccgtggccggggagcaagcgccagcctctgacccgaggccccctccccaggcaccgccccctgctcccgcggcagctcctggagcgcggacctggacaagtgcatggactgcgcgtcttgcagggcgcgaccgcacagcgacttctgcctgggctgcgctgcagcacctcctgcccccttccggctgctttggcccatccttgggggcgctctgagcctgaccttcgtgctggggctgctttctggctttttggtctggagacgatgccgcaggagagagaagttcaccacccccatagaggagaccggcggagagggctgcccagctgtggcgctgatccagtgacaatgtgccccctgccagccggggctcgcccactcatcattcattcatccattctagagccagtctctgcctcccagacgcggcgggagccaagctcctccaaccacaaggggggtggggggcggtgaatcacctct

SEQ ID NO: 196290 - DNA, 648 bp, Homo sapiens
  Payload ID: 18729
  Gene Name: tumor necrosis factor receptor superfamily, member 12A
  ENST ID: ENST00000573001
  CDS Start-End: 146-388
ggggaactcacctaaccttcccgagccttcgtttcctactctgcaaaatggagataacaagtctgcattttattatgtaactacgtcctaaggcaccgccccctgctcccgcggcagctcctggagcgcggacctggacaagtgcatggactgcgcgtcttgcagggcgcgaccgcacagcgacttctgcctgggctgcgctgcagcacctcctgcccccttccggctgctttggcccatccttgggggcgctctgagcctgaccttcgtgctggggctgctttctggctttttggtctggagacgatgccgcaggagagagaagttcaccacccccatagaggagaccggcggagagggctgcccagctgtggcgctgatccagtgacaatgtgccccctgccagccggggctcgcccactcatcattcattcatccattctagagccagtctctgcctcccagacgcggcgggagccaagctcctccaaccacaaggggggtggggggcggtgaatcacctctgaggcctgggcccagggttcaggggaaccttccaaggtgtctggttgccctgcctctggctccagaacagaaagggagcctcacgctggctcacacaaaacagctgacactgactaaggaact

SEQ ID NO: 196291 - DNA, 1133 bp, Homo sapiens
  Payload ID: 18729
  Gene Name: tumor necrosis factor receptor superfamily, member 12A
  ENST ID: ENST00000575124
  CDS Start-End: 24-704
gcggcgggcgcaggacgtgcactatggctcggggctcgctgcgccggttgctgcggctcctcgtgctggggctctggctggcgttgctgcgctccgtggccggggagcaagcgccaggtacgcgggactccggggtcggggaaccccgggccggggctcgggagccggactgggtgtctggagaacagcgccgaactgggggaacaggcggatgtggggatctggggtcaggtggccttcaaacagctcgctcccggctgtgggaagttccatcactctccaagcttcattcacaatccgggcctcagtttctcccaccgtccaattggggttggggggggtcttcagttccacaagtccgaagtacttcgaatggagagagaaagcgctgcagcacctcctgcccccttccggctgctttggcccatccttgggggcgctctgagcctgaccttcgtgctggggctgctttctggctttttggtctggagacgatgccgcaggagagagaagttcaccacccccatagaggagaccggcggagagggctgcccagctgtggcgctgatccagtgacaatgtgccccctgccagccggggctcgcccactcatcattcattcatccattctagagccagtctctgcctcccagacgcggcgggagccaagctcctccaaccacaaggggggtggggggcggtgaatcacctctgaggcctgggcccagggttcaggggaaccttccaaggtgtctggttgccctgcctctggctccagaacagaaagggagcctcacgctggctcacacaaaacagctgacactgactaaggaactgcagcatttgcacaggggaggggggtgccctccttcctagaggccctgggggccaggctgacttggggggcagacttgacactaggccccactcactcagatgtcctgaaattccaccacgggggtcaccctggggggttagggacctatttttaacactagggggctggcccactaggagggctggccctaagatacagacccccccaactccccaaagcggggaggagatatttattttggggagagtttggaggggagggagaatttattaataaaagaatctttaactttaaa

SEQ ID NO: 196292 - DNA, 161 bp, Homo sapiens
  Payload ID: 18729
  Gene Name: tumor necrosis factor receptor superfamily, member 12A
  ENST ID: ENST00000575836
  CDS Start-End: 20-161
cgggcgcaggacgtgcactatggctcggggctcgctgcgccggttgctgcggctcctcgtgctggggctctggctggcgttgctgcgctccgtggccggggagcaagcgccagaccccagaatagccgagtcccgcccccagcctctgacccgaggccccc

SEQ ID NO: 196293 - DNA, 1357 bp, Homo sapiens
  Payload ID: 18730
  Gene Name: tumor necrosis factor receptor superfamily, member 13B
  Uniprot ID: O14836
  ENST ID: ENST00000261652
  CDS Start-End: 14-895
agcatcctgagtaatgagtggcctgggccggagcaggcgaggtggccggagccgtgtggaccaggaggagcgctttccacagggcctgtggacgggggtggctatgagatcctgccccgaagagcagtactgggatcctctgctgggtacctgcatgtcctgcaaaaccatttgcaaccatcagagccagcgcacctgtgcagccttctgcaggtcactcagctgccgcaaggagcaaggcaagttctatgaccatctcctgagggactgcatcagctgtgcctccatctgtggacagcaccctaagcaatgtgcatacttctgtgagaacaagctcaggagcccagtgaaccttccaccagagctcaggagacagcggagtggagaagttgaaaacaattcagacaactcgggaaggtaccaaggattggagcacagaggctcagaagcaagtccagctctcccggggctgaagctgagtgcagatcaggtggccctggtctacagcacgctggggctctgcctgtgtgccgtcctctgctgcttcctggtggcggtggcctgcttcctcaagaagaggggggatccctgctcctgccagccccgctcaaggccccgtcaaagtccggccaagtcttcccaggatcacgcgatggaagccggcagccctgtgagcacatcccccgagccagtggagacctgcagcttctgcttccctgagtgcagggcgcccacgcaggagagcgcagtcacgcctgggacccccgaccccacttgtgctggaaggtgggggtgccacaccaggaccacagtcctgcagccttgcccacacatcccagacagtggccttggcattgtgtgtgtgcctgcccaggaggggggcccaggtgcataaatgggggtcagggagggaaaggaggagggagagagatggagaggaggggagagagaaagagaggtggggagaggggagagagatatgaggagagagagacagaggaggcagagagggagagaaacagaggagacagagagggagagagagacagagggagagagagacagaggggaagagaggcagagagggaaagaggcagagaaggaaagagacaggcagagaaggagagaggcagagagggagagaggcagagagggagagaggcagagagacagagagggagagagggacagagagagatagagcaggaggtcggggcactctgagtcccagttcccagtgcagctgtaggtcgtcatcacctaaccacacgtgcaataaagtcctcgtgcctgctgctcacagcccccgagagcccctcctcctggagaataaaacctttggcagctgcccttcctc

SEQ ID NO: 196294 - DNA, 859 bp, Homo sapiens
  Payload ID: 18730
  Gene Name: tumor necrosis factor receptor superfamily, member 13B
  Uniprot ID: O14836
  ENST ID: ENST00000583789
  CDS Start-End: 13-756
gcatcctgagtaatgagtggcctgggccggagcaggcgaggtggccggagccgtgtggaccaggaggagcgctggtcactcagctgccgcaaggagcaaggcaagttctatgaccatctcctgagggactgcatcagctgtgcctccatctgtggacagcaccctaagcaatgtgcatacttctgtgagaacaagctcaggagcccagtgaaccttccaccagagctcaggagacagcggagtggagaagttgaaaacaattcagacaactcgggaaggtaccaaggattggagcacagaggctcagaagcaagtccagctctcccggggctgaagctgagtgcagatcaggtggccctggtctacagcacgctggggctctgcctgtgtgccgtcctctgctgcttcctggtggcggtggcctgcttcctcaagaagaggggggatccctgctcctgccagccccgctcaaggccccgtcaaagtccggccaagtcttcccaggatcacgcgatggaagccggcagccctgtgagcacatcccccgagccagtggagacctgcagcttctgcttccctgagtgcagggcgcccacgcaggagagcgcagtcacgcctgggacccccgaccccacttgtgctggaaggtgggggtgccacaccaggaccacagtcctgcagccttgcccacacatcccagacagtggccttggcattgtgtgtgtgcctgcccaggaggggggcccaggtgcataaatgggggtcagggagggaaaggaggagggagagagatggagaggaggggagagagaaagagaggtggggagaggggagagagatatgaggagagagagacaga

SEQ ID NO: 196295 - DNA, 1266 bp, Homo sapiens
  Payload ID: 18730
  Gene Name: tumor necrosis factor receptor superfamily, member 13B
  ENST ID: ENST00000584950
  CDS Start-End: 13-759
gcatcctgagtaatgagtggcctgggccggagcaggcgaggtggccggagccgtgtggaccaggaggagcgctggtcactcagctgccgcaaggagcaaggcaagttctatgaccatctcctgagggactgcatcagctgtgcctccatctgtggacagcaccctaagcaatgtgcatacttctgtgagaacaagctcaggagcccagtgaaccttccaccagagctcaggagacagcggagtggagaagttgaaaacaattcagacaactcgggaaggtaccaaggattggagcacagaggctcagaagcaagtccagctctcccggggctgaagctgagtgcagatcaggtggccctggtctacagcacgctggggctctgcctgtgtgccgtcctctgctgcttcctggtggcggtggcctgcttcctcaagaagaggggggatccctgctcctgccagccccgctcaaggccccgtcaaagtccggccaagtcttcccaggatcacgcgatggaagccggcagccctgtgagcacatcccccgagccagtggagacctgcagcttctgcttccctgagtgcagggcgcccacgcaggagagcgcagtcacgcctgggacccccgaccccacttgtgctggaaggaaaacgaagccccctcctgtattgacagctgggaattgtggagtccaccgtcctccacctgagacgagcacagggtctccacgaggacagaggctgctttggactcaatagaaaactgggcatcttcatggtcctagaaggatcccaggaggctgatcctatagagacgtctggttcctgaccccaactgcctccaggtgcctggaacagcccatcgtgggccctttaccctcagcaggtggacgccgttggtcctgccagggcaagatggagatggatgagcacccggatatcctgcccacccaggggcaaggcaacatcatcattactaagtatgagcagggacgctgagctggggcagcagtggacacagagcatgagcgtgttgacatctggaaattcaccagtcgtctctgggttgtgtgtgagacagagctgcccgtgtcagtgccctggaggtgaagggaagagcctgtgcctgctgcgtgggagactggtccagggacagggaatcaggagtggttgcaaaggtgtcaggaaataaaatgtactgacaagtggctgaagatgcttggagactggccaaaatataagaacagcaagaaggtgacatggcgg

SEQ ID NO: 196296 - DNA, 600 bp, Homo sapiens
  Payload ID: 18730
  Gene Name: tumor necrosis factor receptor superfamily, member 13B
  ENST ID: ENST00000579315
  CDS Start-End: 44-514
aagcactaatcaaatctaagactagtaataagcatcctgagtaatgagtggcctgggccggagcaggcgaggtggccggagccgtgtggaccaggaggagcgctttccacagggcctgtggacgggggtggctatgagatcctgccccgaagagcagtactgggatcctctgctgggtacctgcatgtcctgcaaaaccatttgcaaccatcagagccagcgcacctgtgcagccttctgcaggtcactcagctgccgcaaggagcaaggcaagttctatgaccatctcctgagggactgcatcagctgtgcctccatctgtggacagcaccctaagcaatgtgcatacttctgtgagaacaagctcaggagcccagtgaaccttccaccagagctcaggagacagcggagtggagaagttgaaaacaattcagacaactcgggaaggtaccaaggattggagcacagaggctcagaagcaagtccaggaaaacgaagccccctcctgtattgacagctgggaattgtggagtccaccgtcctccacctgagacgagcacagggtctccacgaggacagaggctgctttggactcaatag

SEQ ID NO: 196297 - DNA, 3944 bp, Homo sapiens
  Payload ID: 18731
  Gene Name: tumor necrosis factor receptor superfamily, member 13C
  Uniprot ID: Q96RJ3
  ENST ID: ENST00000291232
  CDS Start-End: 46-600
cagctcagcctcagtccccgcagcttgtgcggcggcgtcggcaccatgaggcgagggccccggagcctgcggggcagggacgcgccagcccccacgccctgcgtcccggccgagtgcttcgacctgctggtccgccactgcgtggcctgcgggctcctgcgcacgccgcggccgaaaccggccggggccagcagccctgcgcccaggacggcgctgcagccgcaggagtcggtgggcgcgggggccggcgaggcggcgctgcccctgcccgggctgctctttggcgcccccgcgctgctgggcctggcactggtcctggcgctggtcctggtgggtctggtgagctggaggcggcgacagcggcggcttcgcggcgcgtcctccgcagaggcccccgacggagacaaggacgccccagagcccctggacaaggtcatcattctgtctccgggaatctctgatgccacagctcctgcctggcctcctcctggggaagacccaggaaccaccccacctggccacagtgtccctgtgccagccacagagctgggctccactgaactggtgaccaccaagacggccggccctgagcaacaatagcagggagccggcaggaggtggcccctgccctccctctggacccccagccaggggcttggaaatcaaattcagctcttcactccagcatgcacatgccctctttctgggaccaggctaactctgcagaagcacagacactacagaccacagcattcagcccccatggagtttggtgtgcttgcctttggcttcagacctcaccatctttgacagcccttgaaggtggtagcccagctcctgttcctgtgccttcaaaaggctggggcactatgagtaaaagaccgcttttaaaatggggaaggcaccattaagccaaaatgaatctgaaaaaagaccaagtgggaggatgcctaatttgtagttgggtggttttttgtgtttgtttgattttttttttttttttttttttttttttttgagacgagtcttgctctgtcgccaggctggagtacagtggcgcgatctcgcctcactgtaacctccgactccttggttcaagtgattctcctgcctcagcctcccgaatagctgggattacaggcacgcaccaccacagccagctaatttttgtatttttagtagagacgggatttcaccatgttggccaggatggtctcgatctcctgacctcgtgatccgccctgctcggcctcccaaagtgctgggattacaggcatgagccaccatgcccggccttgttttgtgttttggttttttttgagacagggtcttgctgtatcacgcaggctggagtgcaacgatgggtccccagctaattgcagcctgggctcaagcaatctttctgcttcagcctcctgagtaggtgggactacaggtgctccaccttgcccagctaattttttttttttttttttttttgagacagagtctcgctctgtcgcctaggctggagtgcagtgacgcaatttcggctcacttcaagctccgcctcctgggttcacaccattctcctgcctgagcctcctgagtagctgggactataggcgcccgccatcacgcccggctaattttttttgtatttttagtagagacggggtgtcaccgtattagccaggatggtctcgatctcctgacctcgtgatccgcccgcctcagcctcccaaagtgctaggattacaggcgtgagccaccgtggctggcctttttttttttttaaagacagggtctcggtatgttgcccaggccagtctcaaactcctggcctcaggcagtcctccccgaagggctgggattataggcaggaggcgccgggcctggcctctatttctttaatacctgccctcagagccgtcctgcttttaaactgatgcaaatggcagcagtgaataatcaattcatgggttcgcttgctttgggatttagtacaagattattttaagaaataacaaaggagaaaagattgagctggattttgctgattctcaggtatctgtaccccagggtcaaccctgagattggcccaatctgccagaacctaagatgccattttgaccccagtggcagcttccagagccacaagcctgcatttgggaggaggtgcgcagcctccagggctggactccaaactcgagctgaaggaacatgctggcaggtagctctctcagggtccacctggggttccagctgctccaagacacagcacatttagccataaacatggaagggctgggacctacaggaggctcctttgtgtagaggccagggcaggcgtgtgaccttgaaccaggtggacatgaggtcccttgaactcccttctctctctggcttgttcccctgaagcactggccccccagtgctgggcttatttggccatcctgtgccagccccctggtcacccaccgtcacagtggaagctgctccctcctcttacaatggtgttccttgctctggggtctggggacaagaccatctctttccactcctggacgacactgtgcactcagtcagccgcctcctacctgccctcctgcacagggtcagaacctcctgacctggacttcgccctgggcagcttccttggaacttgttgcagcttagcatctttggaagggagcactggactaggagtcagaaggtggagttctgggtgctgttttcccactcttgggccctgggcatgttctgttctgtgcatcagatgttttctgcctgcctccccctgagctgccaccagagccacctgtagacccctgcttctcctgcccctcctgtcccttgccaggcctctggactcagtgcttcctgtcccaaggacctgttgtgtgcccagcttggaagacagtggccactcacatccaggtctctgcctggctatttgctccatgaacccatctcagatgcccctgcccccagggagccaggtgacagggtgaggtcaagtgacaagcagtaggtgtgggagaggtttggtggggtcaggcccacatgggcccagccatccactccccttccatctggagttgggggagtctgagctgctcctggccaccccatctgccccaccccatcttttcctggccaccccagctcccaccccatcttctcctggccaccccatctcccaccccatcttctcttgacaccccatctcccaccccatcttctcctggccaccccatctcccaccccatcttctcctggccaccccatcttctcctggccaccccatctcccccaccccatcttctcctggacacccccatctcccaccccatcttttgctacagccagggttagctcagcaggtgaaaaccccgagggtgggtgaaacccctctggggctcagacatgcaaaccttgggcatctctctgtcccagctggccccgccagccggtaggaagtttcccctgagttctcagttttttcttctgaaaaatgaggggttgtatgcaaggttctcctcctggcctgtggtccccagagaagggcaggaaggaaccttagataattctcatatgcatttaacagacgaggaaactgagacccagagccgtcacatcaatacctcatttgatcttcataagagcacctggaggaggggggtggggtgtttgtgtttgtttaaatttttttttgtgaaaaaaatgaagataggcattttgtagacaatctggaagttctggaccggaatccatgatgtagtcagggaagaaatgacccgtgtccagtaaccccaggcctcgagtgtgtggtgtatttttctacataattgtaatcattctatacatacaaattcatgtcttgaccatcatattaatatttggtaagtttctctctctttagagactccacaataaagttttcaacatggtaaggttttcca

SEQ ID NO: 196298 - DNA, 1707 bp, Homo sapiens
  Payload ID: 18732
  Gene Name: tumor necrosis factor receptor superfamily, member 14
  Uniprot ID: Q92956
  ENST ID: ENST00000355716
  CDS Start-End: 300-1151
ccttcataccggcccttcccctcggctttgcctggacagctcctgcctcccgcagggcccacctgtgtcccccagcgccgctccacccagcaggcctgagcccctctctgctgccagacaccccctgctgcccactctcctgctgctcgggttctgaggcacagcttgtcacaccgaggcggattctctttctctttctctttctcttctggcccacagccgcagcaatggcgctgagttcctctgctggagttcatcctgctagctgggttcccgagctgccggtctgagcctgaggcatggagcctcctggagactgggggcctcctccctggagatccacccccaaaaccgacgtcttgaggctggtgctgtatctcaccttcctgggagccccctgctacgccccagctctgccgtcctgcaaggaggacgagtacccagtgggctccgagtgctgccccaagtgcagtccaggttatcgtgtgaaggaggcctgcggggagctgacgggcacagtgtgtgaaccctgccctccaggcacctacattgcccacctcaatggcctaagcaagtgtctgcagtgccaaatgtgtgacccagccatgggcctgcgcgcgagccggaactgctccaggacagagaacgccgtgtgtggctgcagcccaggccacttctgcatcgtccaggacggggaccactgcgccgcgtgccgcgcttacgccacctccagcccgggccagagggtgcagaagggaggcaccgagagtcaggacaccctgtgtcagaactgccccccggggaccttctctcccaatgggaccctggaggaatgtcagcaccagaccaagtgcagctggctggtgacgaaggccggagctgggaccagcagctcccactgggtatggtggtttctctcagggagcctcgtcatcgtcattgtttgctccacagttggcctaatcatatgtgtgaaaagaagaaagccaaggggtgatgtagtcaaggtgatcgtctccgtccagcggaaaagacaggaggcagaaggtgaggccacagtcattgaggccctgcaggcccctccggacgtcaccacggtggccgtggaggagacaataccctcattcacggggaggagcccaaaccactgacccacagactctgcaccccgacgccagagatacctggagcgacggctgctgaaagaggctgtccacctggcggaaccaccggagcccggaggcttgggggctccgccctgggctggcttccgtctcctccagtggagggagaggtggggcccctgctggggtagagctggggacgccacgtgccattcccatgggccagtgagggcctggggcctctgttctgctgtggcctgagctccccagagtcctgaggaggagcgccagttgcccctcgctcacagaccacacacccagccctcctgggccagcccagagggcccttcagaccccagctgtctgcgcgtctgactcttgtggcctcagcaggacaggccccgggcactgcctcacagccaaggctggactgggttggctgcagtgtggtgtttagtggataccacatcggaagtgattttctaaattggatttgaattcggctcctgttttctatttgtcatgaaacagtgtatttggggagatgctgtgggaggatgtaaatatcttgtttctcctcaaa

SEQ ID NO: 196299 - DNA, 896 bp, Homo sapiens
  Payload ID: 18732
  Gene Name: tumor necrosis factor receptor superfamily, member 14
  ENST ID: ENST00000409119
  CDS Start-End: 121-702
ccccggggagcagccgagggtccctgagtgtgtgagtgagccgcagcaatggcgctgagttcctctgctggagttcatcctgctagctgggttcccgagctgccggtctgagcctgaggcatggagcctcctggagactgggggcctcctccctggagatccacccccaaaaccgacgtcttgaggctggtgctgtatctcaccttcctgggagccccctgctacgccccagctctgccgtcctgcaaggaggacgagtacccagtgggctccgagtgctgccccaagtgcagtccaggttatcgtgtgaaggaggcctgcggggagctgacgggcacagtgtgtgaaccctgccctccaggcacctacattgcccacctcaatggcctaagcaagtgtctgcagtgccaaatgtgtgacccagccatgggcctgcgcgcgagccggaactgctccaggacagagaacgccgtgtgtggctgcagcccaggccacttctgcatcgtccaggacggggaccactgcgccgcgtgccgcgcttacgccacctccagcccgggccagagggtgcagaagggaggcaccgagagtcaggacaccctgtgtcagaactgccccccggggaccttctctcccaatgggaccctggaggaatgtcagcaccagaccaaccgagcttggaaaagtcagacagacctctgaggtctcatcctggagctgccaccagcccagcctccctgggacctgtcttcactgcctggggccctgggagccagggaggctccctgaggctgagtgaacactgggcgctgcacctgcctctcccacgtcctcggccccactcccgcaggtgcagctggctggtgacgaaggccggagctgggaccagcagctcc

SEQ ID NO: 196300 - DNA, 1225 bp, Homo sapiens
  Payload ID: 18732
  Gene Name: tumor necrosis factor receptor superfamily, member 14
  ENST ID: ENST00000435221
  CDS Start-End: 532-1225
ctggtgcctgccttggggctccgggactgtgggctgtctccatccggaggtctccctaccaccaggctctgtggggcagggaagcccagtggggtgcagggagccaggaagctggggtggggtcagggcagggtccacagggagaccgggcgaggctggcagccttcccagtccgcgcagcgtctctgcagggggagcaagagctgcccttccacccctcccaggggacgggtaggggcactctgggcttttcccaccccctcacgcagggacacaggcctggtgggtctatgactgaaattggccagaccgcattctggtggttttattcggaagggaagtttaccctgttcagcagaagctgagatgggaacaggaaacccacagggcccctttattcggcaaaaatgtcagtcagcgccccggggagcagccgagggtccctgagtgtccgcagcaatggcgctgagttcctctgctggagttcatcctgctagctgggttcccgagctgccggtctgagcctgaggcatggagcctcctggagactgggggcctcctccctggagatccacccccaaaaccgacgtcttgaggctggtgctgtatctcaccttcctgggagccccctgctacgccccagctctgccgtcctgcaaggaggacgagtacccagtgggctccgagtgctgccccaagtgcagtccaggttatcgtgtgaaggaggcctgcggggagctgacgggcacagtgtgtgaaccctgccctccaggcacctacattgcccacctcaatggcctaagcaagtgtctgcagtgccaaatgtgtgacccagccatgggcctgcgcgcgagccggaactgctccaggacagagaacgccgtgtgtggctgcagcccaggccacttctgcatcgtccaggacggggaccactgcgccgcgtgccgcgcttacgccacctccagcccgggccagagggtgcagaagggaggcaccgagagtcaggacaccctgtgtcagaactgccccccggggaccttctctcccaatgggaccctggaggaatgtcagcaccagaccaagtgcagctggctggtgacgaaggccggagctgggaccagcagctcccactgggtatggtggtttctctcagggagcctcgtcatcgtcattgtttgctccacagttggcctaatcatatgtgtgaaaagaagaaagccaaggg

SEQ ID NO: 196301 - DNA, 827 bp, Homo sapiens
  Payload ID: 18732
  Gene Name: tumor necrosis factor receptor superfamily, member 14
  ENST ID: ENST00000451778
  CDS Start-End: 134-827
agcgtctctgcagggggagcaagagctgcccttccacccctcccaggggacggccgcagcaatggcgctgagttcctctgctggagttcatcctgctagctgggttcccgagctgccggtctgagcctgaggcatggagcctcctggagactgggggcctcctccctggagatccacccccaaaaccgacgtcttgaggctggtgctgtatctcaccttcctgggagccccctgctacgccccagctctgccgtcctgcaaggaggacgagtacccagtgggctccgagtgctgccccaagtgcagtccaggttatcgtgtgaaggaggcctgcggggagctgacgggcacagtgtgtgaaccctgccctccaggcacctacattgcccacctcaatggcctaagcaagtgtctgcagtgccaaatgtgtgacccagccatgggcctgcgcgcgagccggaactgctccaggacagagaacgccgtgtgtggctgcagcccaggccacttctgcatcgtccaggacggggaccactgcgccgcgtgccgcgcttacgccacctccagcccgggccagagggtgcagaagggaggcaccgagagtcaggacaccctgtgtcagaactgccccccggggaccttctctcccaatgggaccctggaggaatgtcagcaccagaccaagtgcagctggctggtgacgaaggccggagctgggaccagcagctcccactgggtatggtggtttctctcagggagcctcgtcatcgtcattgtttgctccacagttggcctaatcatatgtgtgaaaagaagaaagccaaggg

SEQ ID NO: 196302 - DNA, 660 bp, Homo sapiens
  Payload ID: 18732
  Gene Name: tumor necrosis factor receptor superfamily, member 14
  ENST ID: ENST00000426449
  CDS Start-End: 110-660
ctgggacctgctctgggcaagcacaggcgccgcagcaatggcgctgagttcctctgctggagttcatcctgctagctgggttcccgagctgccggtctgagcctgaggcatggagcctcctggagactgggggcctcctccctggagatccacccccaaaaccgacgtcttgaggctggtgctgtatctcaccttcctgggagccccctgctacgccccagctctgccgtcctgcaaggaggacgagtacccagtgggctccgagtgctgccccaagtgcagtccaggttatcgtgtgaaggaggcctgcggggagctgacgggcacagtgtgtgaaccctgccctccaggcacctacattgcccacctcaatggcctaagcaagtgtctgcagtgccaaatgtgtgacccagccatgggcctgcgcgcgagccggaactgctccaggacagagaacgccgtgtgtggctgcagcccaggccacttctgcatcgtccaggacggggaccactgcgccgcgtgccgcgcttacgccacctccagcccgggccagagggtgcagaagggaggcaccgagagtcaggacaccctgtgtcagaactgccccccggggaccttctctcccaatgggaccctggaggaatgtcagcaccagaccaa

SEQ ID NO: 196303 - DNA, 834 bp, Homo sapiens
  Payload ID: 18732
  Gene Name: tumor necrosis factor receptor superfamily, member 14
  ENST ID: ENST00000434817
  CDS Start-End: 141-834
cgagggactcactggtgcctgccttggggctccgggactgtgggctgtctccatccggagccgcagcaatggcgctgagttcctctgctggagttcatcctgctagctgggttcccgagctgccggtctgagcctgaggcatggagcctcctggagactgggggcctcctccctggagatccacccccaaaaccgacgtcttgaggctggtgctgtatctcaccttcctgggagccccctgctacgccccagctctgccgtcctgcaaggaggacgagtacccagtgggctccgagtgctgccccaagtgcagtccaggttatcgtgtgaaggaggcctgcggggagctgacgggcacagtgtgtgaaccctgccctccaggcacctacattgcccacctcaatggcctaagcaagtgtctgcagtgccaaatgtgtgacccagccatgggcctgcgcgcgagccggaactgctccaggacagagaacgccgtgtgtggctgcagcccaggccacttctgcatcgtccaggacggggaccactgcgccgcgtgccgcgcttacgccacctccagcccgggccagagggtgcagaagggaggcaccgagagtcaggacaccctgtgtcagaactgccccccggggaccttctctcccaatgggaccctggaggaatgtcagcaccagaccaagtgcagctggctggtgacgaaggccggagctgggaccagcagctcccactgggtatggtggtttctctcagggagcctcgtcatcgtcattgtttgctccacagttggcctaatcatatgtgtgaaaagaagaaagccaaggg

SEQ ID NO: 196304 - DNA, 1707 bp, Homo sapiens; identical to SEQ ID NO: 196298
  Payload ID: 18732
  Gene Name: tumor necrosis factor receptor superfamily, member 14
  Uniprot ID: Q92956
  ENST ID: ENST00000621877
  CDS Start-End: 300-1151

SEQ ID NO: 196305 - DNA, 896 bp, Homo sapiens; identical to SEQ ID NO: 196299
  Payload ID: 18732
  Gene Name: tumor necrosis factor receptor superfamily, member 14
  ENST ID: ENST00000625695
  CDS Start-End: 121-702

SEQ ID NO: 196306 - DNA, 827 bp, Homo sapiens; identical to SEQ ID NO: 196301
  Payload ID: 18732
  Gene Name: tumor necrosis factor receptor superfamily, member 14
  ENST ID: ENST00000629075
  CDS Start-End: 134-827

SEQ ID NO: 196307 - DNA, 674 bp, Homo sapiens
  Payload ID: 18732
  Gene Name: tumor necrosis factor receptor superfamily, member 14
  ENST ID: ENST00000629209
  CDS Start-End: 1-76
tgggaccctggaggaatgtcagcaccagaccaattggcctaatcatatgtgtgaaaagaagaaagccaaggggtgatgtagtcaaggtgatcgtctccgtccaggccaagtgtggagaaatcaatgatgttgacgatgaggctccctgagagaaatcacacccagcgggagctgctgctcccaggtctggcctcggtcaccagccacctgctgcatccgcgggagtggggccgaggacatgggagtggcaggtgcagcccccggtactcactcagccccagggagtgtccctggctcccagggctctgggaggtgagggcaggtcccgggggaggctgggttagtggcagctccgggatgagacctcagaggtctgtctgacttgtccaagcccggctatggggaggtggggggaaggaaggaagaggagagaaataaggagaggctgggcaaagaagacaggacggcagagggagaggggagagaagtgggaggcagccagcagcgcagggccctgagagtatttcagcggcaccgctgtcctgggccgcccggtgccacatctttgaaaacagttgtttaatttaagcttgtccactcagtagctgttgaatgtgggaggttatcttgttctattcaagttgctataaaaataaaaactaccatagactggg

SEQ ID NO: 196308 - DNA, 660 bp, Homo sapiens; identical to SEQ ID NO: 196302
  Payload ID: 18732
  Gene Name: tumor necrosis factor receptor superfamily, member 14
  ENST ID: ENST00000628337
  CDS Start-End: 110-660

SEQ ID NO: 196309 - DNA, 434 bp, Homo sapiens
  Payload ID: 18732
  Gene Name: tumor necrosis factor receptor superfamily, member 14
  ENST ID: ENST00000482602
  CDS Start-End: 1-76
tgggaccctggaggaatgtcagcaccagaccaattggcctaatcatatgtgtgaaaagaagaaagccaaggggtgatgtagtcaaggtgatcgtctccgtccaggccaagtgtggagaaatcaatgatgttgacgatgaggctccctgagagaaatcacacccagcgggagctgctgctcccaggtctggcctcggtcaccagccacctgctgcatccgcgggagtggggccgaggacatgggagtggcaggtgcagcccccggtactcactcagccccagggagtgtccctggctcccagggctctgggaggtgagggcaggtcccgggggaggctgggttagtggcagctccgggatgagacctcagaggtctgtctgacttgtccaagcccggctatggggaggtggggggaaggaaggaagaggagagaa

SEQ ID NO: 196310 - DNA, 1225 bp, Homo sapiens; identical to SEQ ID NO: 196300
  Payload ID: 18732
  Gene Name: tumor necrosis factor receptor superfamily, member 14
  ENST ID: ENST00000629542
  CDS Start-End: 532-1225

SEQ ID NO: 196311 - DNA, 834 bp, Homo sapiens; identical to SEQ ID NO: 196303
  Payload ID: 18732
  Gene Name: tumor necrosis factor receptor superfamily, member 14
  ENST ID: ENST00000631202
  CDS Start-End: 141-834

SEQ ID NO: 196312 - DNA, 994 bp, Homo sapiens
  Payload ID: 18733
  Gene Name: tumor necrosis factor receptor superfamily, member 17
  Uniprot ID: Q02223
  ENST ID: ENST00000053243
  CDS Start-End: 219-773
aagactcaaacttagaaacttgaattagatgtggtattcaaatccttagctgccgcgaagacacagacagcccccgtaagaacccacgaagcaggcgaagttcattgttctcaacattctagctgctcttgctgcatttgctctggaattcttgtagagatattacttgtccttccaggctgttctttctgtagctcccttgttttctttttgtgatcatgttgcagatggctgggcagtgctcccaaaatgaatattttgacagtttgttgcatgcttgcataccttgtcaacttcgatgttcttctaatactcctcctctaacatgtcagcgttattgtaatgcaagtgtgaccaattcagtgaaaggaacgaatgcgattctctggacctgtttgggactgagcttaataatttctttggcagttttcgtgctaatgtttttgctaaggaagataaactctgaaccattaaaggacgagtttaaaaacacaggatcaggtctcctgggcatggctaacattgacctggaaaagagcaggactggtgatgaaattattcttccgagaggcctcgagtacacggtggaagaatgcacctgtgaagactgcatcaagagcaaaccgaaggtcgactctgaccattgctttccactcccagctatggaggaaggcgcaaccattcttgtcaccacgaaaacgaatgactattgcaagagcctgccagctgctttgagtgctacggagatagagaaatcaatttctgctaggtaattaaccatttcgactcgagcagtgccactttaaaaatcttttgtcagaatagatgatgtgtcagatctctttaggatgactgtatttttcagttgccgatacagctttttgtcctctaactgtggaaactctttatgttagatatatttctctaggttactgttgggagcttaatggtagaaacttccttggtttcatgattaaactcttttttttcctga

SEQ ID NO: 196313 - DNA, 668 bp, Homo sapiens
  Payload ID: 18733
  Gene Name: tumor necrosis factor receptor superfamily, member 17
  Uniprot ID: Q02223
  ENST ID: ENST00000396495
  CDS Start-End: 113-520
gttctcaacattctagctgctcttgctgcatttgctctggaattcttgtagagatattacttgtccttccaggctgttctttctgtagctcccttgttttctttttgtgatcatgttgcagatggctgggcagtgctcccaaaatgaatattttgacagtttgttgcatgcttgcataccttgtcaacttcgatgttcttctaatactcctcctctaacatgtcagcgttattgtaatgcaagatcaggtctcctgggcatggctaacattgacctggaaaagagcaggactggtgatgaaattattcttccgagaggcctcgagtacacggtggaagaatgcacctgtgaagactgcatcaagagcaaaccgaaggtcgactctgaccattgctttccactcccagctatggaggaaggcgcaaccattcttgtcaccacgaaaacgaatgactattgcaagagcctgccagctgctttgagtgctacggagatagagaaatcaatttctgctaggtaattaaccatttcgactcgagcagtgccactttaaaaatcttttgtcagaatagatgatgtgtcagatctctttaggatgactgtatttttcagttgccgatacagctttttgtcctctaactgtggaaactctttatgttagatatatt

SEQ ID NO: 196314 - DNA, 511 bp, Homo sapiens
  Payload ID: 18733
  Gene Name: tumor necrosis factor receptor superfamily, member 17
  ENST ID: ENST00000562385
  CDS Start-End: 1-401
cccaaaatgaatattttgacagtttgttgcatgcttgcataccttgtcaacttcgatgttcttctaatactcctcctctaacatgtcagcgttattgtaatgcaagtgtgaccaattcagtgaaaggaacgaatgcgattctctggacctgtttgggactgagcttaataatttctttggcagttttcgtgctaatgtttttgctaaggaagataaactctgaaccattaaaggacgagtttaaaaacacagagatggagtctcgctctgtggcccaggctggagtgcagtggcgtgatctcaactcactgcagcctctgcctcttgggttcaaacaattctcccatctcagcctcctgagtaactgggactataggatcaggtctcctgggcatggctaacattgacctggaaaagagcaggactggtgatgaaattattcttccgagaggcctcgagtacacggtggaagaatgcacctgtgaagactgcatcaagagcaaaccgaagg

SEQ ID NO: 196315 - DNA, 851 bp, Homo sapiens
  Payload ID: 18734
  Gene Name: tumor necrosis factor receptor superfamily, member 18
  Uniprot ID: Q9Y5U5
  ENST ID: ENST00000328596
  CDS Start-End: 1-768
atggcacagcacggggcgatgggcgcgtttcgggccctgtgcggcctggcgctgctgtgcgcgctcagcctgggtcagcgccccaccgggggtcccgggtgcggccctgggcgcctcctgcttgggacgggaacggacgcgcgctgctgccgggttcacacgacgcgctgctgccgcgattacccgggcgaggagtgctgttccgagtgggactgcatgtgtgtccagcctgaattccactgcggagacccttgctgcacgacctgccggcaccacccttgtcccccaggccagggggtacagtcccaggggaaattcagttttggcttccagtgtatcgactgtgcctcggggaccttctccgggggccacgaaggccactgcaaaccttggacagactgctgctggaggtgccgccgtcgaccgaagacgccagaagctgccagttccccgaggaagagcggggcgagcgatcggcagaggagaaggggcggctgggagacctgtgggtgtgagcctggccgtcctccggggccaccgaccgcagccagcccctccccaggagctccccaggccgcaggggctctgcgttctgctctgggccgggccctgctcccctggcagcagaagtgggtgcaggaaggtggcagtgaccagcgccctggaccatgcagttcggcggccgcggctgggccctgcaggagggagagagagacacagtcatggcccccttcctcccttgctggccctgatggggtggggtcttaggacgggaggctgtgtccgtgggtgtgcagtgcccagcacgggacccggctgcaggggaccttcaataaacacttgtccagtga

SEQ ID NO: 196316 - DNA, 705 bp, Homo sapiens
  Payload ID: 18734
  Gene Name: tumor necrosis factor receptor superfamily, member 18
  Uniprot ID: Q9Y5U5
  ENST ID: ENST00000379265
  CDS Start-End: 1-705
atggcacagcacggggcgatgggcgcgtttcgggccctgtgcggcctggcgctgctgtgcgcgctcagcctgggtcagcgccccaccgggggtcccgggtgcggccctgggcgcctcctgcttgggacgggaacggacgcgcgctgctgccgggttcacacgacgcgctgctgccgcgattacccgggcgaggagtgctgttccgagtgggactgcatgtgtgtccagcctgaattccactgcggagacccttgctgcacgacctgccggcaccacccttgtcccccaggccagggggtacagtcccaggggaaattcagttttggcttccagtgtatcgactgtgcctcggggaccttctccgggggccacgaaggccactgcaaaccttggacagactgcacccagttcgggtttctcactgtgttccctgggaacaagacccacaacgctgtgtgcgtcccagggtccccgccggcagagccgcttgggtggctgaccgtcgtcctcctggccgtggccgcctgcgtcctcctcctgacctcggcccagcttggactgcacatctggcagctgaggaagacccagctgctgctggaggtgccgccgtcgaccgaagacgccagaagctgccagttccccgaggaagagcggggcgagcgatcggcagaggagaaggggcggctgggagacctgtgggtgtga

SEQ ID NO: 196317 - DNA, 1179 bp, Homo sapiens
  Payload ID: 18734
  Gene Name: tumor necrosis factor receptor superfamily, member 18
  Uniprot ID: Q9Y5U5
  ENST ID: ENST00000379268
  CDS Start-End: 121-846
cacgcacttcacctgggtcgggattctcaggtcatgaacggtcccagccacctccgggcagggcgggtgaggacggggacggggcgtgtccaactggctgtgggctcttgaaacccgagcatggcacagcacggggcgatgggcgcgtttcgggccctgtgcggcctggcgctgctgtgcgcgctcagcctgggtcagcgccccaccgggggtcccgggtgcggccctgggcgcctcctgcttgggacgggaacggacgcgcgctgctgccgggttcacacgacgcgctgctgccgcgattacccgggcgaggagtgctgttccgagtgggactgcatgtgtgtccagcctgaattccactgcggagacccttgctgcacgacctgccggcaccacccttgtcccccaggccagggggtacagtcccaggggaaattcagttttggcttccagtgtatcgactgtgcctcggggaccttctccgggggccacgaaggccactgcaaaccttggacagactgcacccagttcgggtttctcactgtgttccctgggaacaagacccacaacgctgtgtgcgtcccagggtccccgccggcagagccgcttgggtggctgaccgtcgtcctcctggccgtggccgcctgcgtcctcctcctgacctcggcccagcttggactgcacatctggcagctgaggagtcagtgcatgtggccccgagagacccagctgctgctggaggtgccgccgtcgaccgaagacgccagaagctgccagttccccgaggaagagcggggcgagcgatcggcagaggagaaggggcggctgggagacctgtgggtgtgagcctggccgtcctccggggccaccgaccgcagccagcccctccccaggagctccccaggccgcaggggctctgcgttctgctctgggccgggccctgctcccctggcagcagaagtgggtgcaggaaggtggcagtgaccagcgccctggaccatgcagttcggcggccgcggctgggccctgcaggagggagagagagacacagtcatggcccccttcctcccttgctggccctgatggggtggggtcttaggacgggaggctgtgtccgtgggtgtgcagtgcccagcacgggacccggctgcaggggaccttcaataaacacttgtccag

SEQ ID NO: 196318 - DNA, 727 bp, Homo sapiens
  Payload ID: 18734
  Gene Name: tumor necrosis factor receptor superfamily, member 18
  ENST ID: ENST00000486728
  CDS Start-End: 218-727
atggccccaggagaaagagacagctggataaacccagggtccagactcccagccaggagccctctgctccctggagccaactgtgggtggagaacggacaacctcactcccctggagggccgaggggaggcctggggaggagggggcctcagcccagctgctggggggctggcctgtctcctgcccaggcgaggagtgctgttccgagtgggactgcatgtgtgtccagcctgaattccactgcggagacccttgctgcacgacctgccggcaccacccttgtcccccaggccagggggtacagtcccaggggaaattcagttttggcttccagtgtatcgactgtgcctcggggaccttctccgggggccacgaaggccactgcaaaccttggacagactgcacccagttcgggtttctcactgtgttccctgggaacaagacccacaacgctgtgtgcgtcccagggtccccgccggcagagccgcttgggtggctgaccgtcgtcctcctggccgtggccgcctgcgtcctcctcctgacctcggcccagcttggactgcacatctggcagctgaggagtcagtgcatgtggccccgagagacccagctgctgctggaggtgccgccgtcgaccgaagacgccagaagctgccagttccccgaggaagagcggggcgagcgatcggcagaggagaaggggcggctgggagacctgtgggtgtga

SEQ ID NO: 196319 - DNA, 3276 bp, Homo sapiens
  Payload ID: 18735
  Gene Name: tumor necrosis factor receptor superfamily, member 19
  Uniprot ID: Q9NS68
  ENST ID: ENST00000248484
  CDS Start-End: 514-1767
gcagttcagcgagatgaaagggataaagcagaacccgctggcactaggaaaagcttccaacacacagtccacaacacagcttgggaaccaaaaaagctacagatccagccactcagcccaagcatgggagaactaccagcattgcctcattgcaaaaaagaggaggaaaacaacgtgatccatgtttaacaaaagagtctgtggactaggaggtgggagggtaactacctgctgaaagtgaactttctttgatatccatgcatatatataaactcagccctgcctttgatgttcagcaactgattcactgatcagattacaggcatttcatctccctgctcgtctgcctttgatctgcatggttaattttattttcctggatttgaagtttcgtctgggcttgtgctgacatacatttttgggaaggtagaagcatttggcacagaagtgctgccaggagaaactaagttgctgaacggaactctccaacaataaatacatttgataagaaagatggctttaaaagtgctactagaacaagagaaaacgtttttcactcttttagtattactaggctatttgtcatgtaaagtgacttgtgaatcaggagactgtagacagcaagaattcagggatcggtctggaaactgtgttccctgcaaccagtgtgggccaggcatggagttgtctaaggaatgtggcttcggctatggggaggatgcacagtgtgtgacgtgccggctgcacaggttcaaggaggactggggcttccagaaatgcaagccctgtctggactgcgcagtggtgaaccgctttcagaaggcaaattgttcagccaccagtgatgccatctgcggggactgcttgccaggattttataggaagacgaaacttgtcggctttcaagacatggagtgtgtgccttgtggagaccctcctcctccttacgaaccgcactgtgccagcaaggtcaacctcgtgaagatcgcgtccacggcctccagcccacgggacacggcgctggctgccgttatctgcagcgctctggccaccgtcctgctggccctgctcatcctctgtgtcatctattgtaagagacagtttatggagaagaaacccagctggtctctgcggtcacaggacattcagtacaacggctctgagctgtcgtgttttgacagacctcagctccacgaatatgcccacagagcctgctgccagtgccgccgtgactcagtgcagacctgcgggccggtgcgcttgctcccatccatgtgctgtgaggaggcctgcagccccaacccggcgactcttggttgtggggtgcattctgcagccagtcttcaggcaagaaacgcaggcccagccggggagatggtgccgactttcttcggatccctcacgcagtccatctgtggcgagttttcagatgcctggcctctgatgcagaatcccatgggtggtgacaacatctctttttgtgactcttatcctgaactcactggagaagacattcattctctcaatccagaacttgaaagctcaacgtctttggattcaaatagcagtcaagatttggttggtggggctgttccagtccagtctcattctgaaaactttacagcagctactgatttatctagatataacaacacactggtagaatcagcatcaactcaggatgcactaactatgagaagccagctagatcaggagagtggtgctgtcatccacccagccactcagacgtccctccaggaagcttaaagaacctgcttctttctgcagtagaagcgtgtgctggaacccaaagagtactcctttgttaggcttatggactgagcagtctggaccttgcatggcttctggggcaaaaataaatctgaaccaaactgacggcatttgaagcctttcagccagttgcttctgagccagaccagctgtaagctgaaacctcaatgaataacaagaaaagactccaggccgactcatgatactctgcatctttcctacatgagaagcttctctgccacaaaagtgacttcaaagacggatgggttgagctggcagcctatgagattgtggacatataacaagaaacagaaatgccctcatgcttattttcatggtgattgtggttttacaagactgaagacccagagtatactttttctttccagaaataatttcataccgcctatgaaatatcagataaattaccttagcttttatgtagaatgggttcaaaagtgagtgtttctatttgagaaggacactttttcatcatctaaactgattcgcataggtggttagaatggccctcatattgcctgcctaaatcttgggtttattagatgaagtttactgaatcagaggaatcagacagaggaggatagctctttccagaatccacacttctgacctcagcctcggtctcatgaacacccgctgatctcaggagaacacctgggctagggaatgtggtcgagaaagggcagcccattgcccagaattaacacatattgtagagacttgtatgcaaaggttggcatatttatatgaaaattagttgctatagaaacatttgttgcatctgtccctctgcctgagcttagaaggttatagaaaaagggtatttataaacataaatgaccttttacttgcattgtatcttatactaaaggctttagaaattacaacatatcaggttcccctactactgaagtagccttccgtgagaacacaccacatgttaggactagaagaaaatgcacaatttgtaggggtttggatgaagcagctgtaactgccctagtgtagtttgaccaggacattgtcgtgctccttccaattgtgtaagattagttagcacatcatctcctactttagccatccggtgttggatttaagaggacggtgcttctttctattaaagtgctccatcccctaccatctacacattagcattgtctctagagctaagacagaaattaaccccgttcagtcacaaagcagggaatggttcatttactcttaatctttatgccctggagaagacctacttgaacagggcatattttttagacttctgaacatcagtatgttcgagggtactatgatattttggtttggaattgccctgcccaagtcactgtcttttaacttttaaactgaatattaaaatgtatctgtctttcctagtatgtttttatcttctcatgtattatccatggttttctctgtttgtgacagattagtaaaatttaatgagccctc

SEQ ID NO: 196320 - DNA, 1625 bp, Homo sapiens
  Payload ID: 18735
  Gene Name: tumor necrosis factor receptor superfamily, member 19
  Uniprot ID: Q9NS68
  ENST ID: ENST00000382258
  CDS Start-End: 205-1476
gttgccgggctacgggagagcgcggagccctgcgctgggaggtgcacggtgtgcacgctggactggacccccatgcaaccccgcgccctgcgccttaaccaggactgctccgcgcgcccctgagcctcgggctccggcccggacctgcagcctcccaggtggctgggaagaactctccaacaataaatacatttgataagaaagatggctttaaaagtgctactagaacaagagaaaacgtttttcactcttttagtattactaggctatttgtcatgtaaagtgacttgtgaatcaggagactgtagacagcaagaattcagggatcggtctggaaactgtgttccctgcaaccagtgtgggccaggcatggagttgtctaaggaatgtggcttcggctatggggaggatgcacagtgtgtgacgtgccggctgcacaggttcaaggaggactggggcttccagaaatgcaagccctgtctggactgcgcagtggtgaaccgctttcagaaggcaaattgttcagccaccagtgatgccatctgcggggactgcttgccaggattttataggaagacgaaacttgtcggctttcaagacatggagtgtgtgccttgtggagaccctcctcctccttacgaaccgcactgtgccagcaaggtcaacctcgtgaagatcgcgtccacggcctccagcccacgggacacggcgctggctgccgttatctgcagcgctctggccaccgtcctgctggccctgctcatcctctgtgtcatctattgtaagagacagtttatggagaagaaacccagctggtctctgcggtcacaggacattcagtacaacggctctgagctgtcgtgttttgacagacctcagctccacgaatatgcccacagagcctgctgccagtgccgccgtgactcagtgcagacctgcgggccggtgcgcttgctcccatccatgtgctgtgaggaggcctgcagccccaacccggcgactcttggttgtggggtgcattctgcagccagtcttcaggcaagaaacgcaggcccagccggggagatggtgccgactttcttcggatccctcacgcagtccatctgtggcgagttttcagatgcctggcctctgatgcagaatcccatgggtggtgacaacatctctttttgtgactcttatcctgaactcactggagaagacattcattctctcaatccagaacttgaaagctcaacgtctttggattcaaatagcagtcaagatttggttggtggggctgttccagtccagtctcattctgaaaactttacagcagctactgatttatctagatataacaacacactggtagaatcagcatcaactcaggatgcactaactatgagaagccagctagatcaggagagtggtgctgtcatccacccagccactcagacgtccctccaggtaaggcagcgactgggttccctgtgaacacagcactgacttacagtagatcagaactctgttcccagcataagatttgggggaacctgatgagttttttttttgcatctttaataatttcttgtatgttgtagagtatgttttaaaataaatttcaagtatttttttaaaaaact

SEQ ID NO: 196321 - DNA, 4151 bp, Homo sapiens
  Payload ID: 18735
  Gene Name: tumor necrosis factor receptor superfamily, member 19
  Uniprot ID: Q9NS68
  ENST ID: ENST00000382263
  CDS Start-End: 185-1438
cgcggagccctgcgctgggaggtgcacggtgtgcacgctggactggacccccatgcaaccccgcgccctgcgccttaaccaggactgctccgcgcgcccctgagcctcgggctccggcccggacctgcagcctcccaggtggctgggaagaactctccaacaataaatacatttgataagaaagatggctttaaaagtgctactagaacaagagaaaacgtttttcactcttttagtattactaggctatttgtcatgtaaagtgacttgtgaatcaggagactgtagacagcaagaattcagggatcggtctggaaactgtgttccctgcaaccagtgtgggccaggcatggagttgtctaaggaatgtggcttcggctatggggaggatgcacagtgtgtgacgtgccggctgcacaggttcaaggaggactggggcttccagaaatgcaagccctgtctggactgcgcagtggtgaaccgctttcagaaggcaaattgttcagccaccagtgatgccatctgcggggactgcttgccaggattttataggaagacgaaacttgtcggctttcaagacatggagtgtgtgccttgtggagaccctcctcctccttacgaaccgcactgtgccagcaaggtcaacctcgtgaagatcgcgtccacggcctccagcccacgggacacggcgctggctgccgttatctgcagcgctctggccaccgtcctgctggccctgctcatcctctgtgtcatctattgtaagagacagtttatggagaagaaacccagctggtctctgcggtcacaggacattcagtacaacggctctgagctgtcgtgttttgacagacctcagctccacgaatatgcccacagagcctgctgccagtgccgccgtgactcagtgcagacctgcgggccggtgcgcttgctcccatccatgtgctgtgaggaggcctgcagccccaacccggcgactcttggttgtggggtgcattctgcagccagtcttcaggcaagaaacgcaggcccagccggggagatggtgccgactttcttcggatccctcacgcagtccatctgtggcgagttttcagatgcctggcctctgatgcagaatcccatgggtggtgacaacatctctttttgtgactcttatcctgaactcactggagaagacattcattctctcaatccagaacttgaaagctcaacgtctttggattcaaatagcagtcaagatttggttggtggggctgttccagtccagtctcattctgaaaactttacagcagctactgatttatctagatataacaacacactggtagaatcagcatcaactcaggatgcactaactatgagaagccagctagatcaggagagtggtgctgtcatccacccagccactcagacgtccctccaggaagcttaaagaacctgcttctttctgcagtagaagcgtgtgctggaacccaaagagtactcctttgttaggcttatggactgagcagtctggaccttgcatggcttctggggcaaaaataaatctgaaccaaactgacggcatttgaagcctttcagccagttgcttctgagccagaccagctgtaagctgaaacctcaatgaataacaagaaaagactccaggccgactcatgatactctgcatctttcctacatgagaagcttctctgccacaaaagtgacttcaaagacggatgggttgagctggcagcctatgagattgtggacatataacaagaaacagaaatgccctcatgcttattttcatggtgattgtggttttacaagactgaagacccagagtatactttttctttccagaaataatttcataccgcctatgaaatatcagataaattaccttagcttttatgtagaatgggttcaaaagtgagtgtttctatttgagaaggacactttttcatcatctaaactgattcgcataggtggttagaatggccctcatattgcctgcctaaatcttgggtttattagatgaagtttactgaatcagaggaatcagacagaggaggatagctctttccagaatccacacttctgacctcagcctcggtctcatgaacacccgctgatctcaggagaacacctgggctagggaatgtggtcgagaaagggcagcccattgcccagaattaacacatattgtagagacttgtatgcaaaggttggcatatttatatgaaaattagttgctatagaaacatttgttgcatctgtccctctgcctgagcttagaaggttatagaaaaagggtatttataaacataaatgaccttttacttgcattgtatcttatactaaaggctttagaaattacaacatatcaggttcccctactactgaagtagccttccgtgagaacacaccacatgttaggactagaagaaaatgcacaatttgtaggggtttggatgaagcagctgtaactgccctagtgtagtttgaccaggacattgtcgtgctccttccaattgtgtaagattagttagcacatcatctcctactttagccatccggtgttggatttaagaggacggtgcttctttctattaaagtgctccatcccctaccatctacacattagcattgtctctagagctaagacagaaattaaccccgttcagtcacaaagcagggaatggttcatttactcttaatctttatgccctggagaagacctacttgaacagggcatattttttagacttctgaacatcagtatgttcgagggtactatgatattttggtttggaattgccctgcccaagtcactgtcttttaacttttaaactgaatattaaaatgtatctgtctttcctagtatgtttttatcttctcatgtattatccatggttttctctgtttgtgacagattagtaaaatttaatgagccctctttcttgtggccgtttctccatagttttaggttttgatatgtgtttactagcttgcctgtgtctggtacatctcatgacctcaattccctcacctgaaataggaaatgagaatgtttcattgtagccccaagcggtcatgtcaacctagtgcctagtcataattaattgacttttcctgtattacttctttttttaagtataaaccaatgatcctttggtagtcaagaactcttaggaacattgccttttggacatgtaaaatatttaggatttgaccacacaatggctatgaaaatgcaagtagtttcctcgcgtgacctcaccatgattcacatacgtgccactgtttgaaatctggtctgtttgcatttctgttatgacagagagatgatgtttgcatttctgttatgacagagagatgatgaaagtaggcagggctgtgttcctttgtgtagcctgtatatattttccatatgtagagccctgattaacttcaaggacaaacactggctggagaaagccagactgatgggaatgagactttggccaaaaatcccaaaacatcattttcaatcagtagagaagtgcttagggttgaaaattgatttcatttgctactgaatttggtaaatcctgggtaacttttatcaagatgaagacattttaccctacctactctagaaatatacaacaatgttatattttacactccttggaaacatttgaggaaaaaaatgcaatttgcacttcactttgttggaatatcccatagcactcaataaactcagctgctagagtgccgatgtcaggagggctgtgtcgggtaatgcgtgtggctgaatgggcataaccactgtggcttcttgtgctgcagaagctcgttgacaagactgaggaggatttcaagagcaaccaagtaaagtcatgaattttctaattttgtgtatatggaatatatttttaaatagagatttttctactttagataatgtgttaatattgctattacctaggttaagcactattgtctgtgctagtaagaaaaagaaaggaaaaccatcattgctttatagtagcttatatcaatttagatttcatcattactattttgcatactggaatttataaatgtgtaaattatcattttcttagttttgtaataccttttttatttgtgaataaaattatcacctggtattctta

SEQ ID NO: 196322 - DNA, 4277 bp, Homo sapiens
  Payload ID: 18735
  Gene Name: tumor necrosis factor receptor superfamily, member 19
  Uniprot ID: Q9NS68
  ENST ID: ENST00000403372
  CDS Start-End: 696-1553
gcagttcagcgagatgaaagggataaagcagaacccgctggcactaggaaaagcttccaacacacagtccacaacacagcttgggaaccaaaaaagctacagatccagccactcagcccaagcatgggagaactaccagcattgcctcattgcaaaaaagaggaggaaaacaacgtgatccatgtttaacaaaagagtctgtggactaggaggtgggagggtaactacctgctgaaagtgaactttctttgatatccatgcatatatataaactcagccctgcctttgatgttcagcaactgattcactgatcagattacaggcatttcatctccctgctcgtctgcctttgatctgcatggttaattttattttcctggatttgaagtttcgtctgggcttgtgctgacatacatttttgggaaggtagaagcatttggcacagaagtgctgccaggagaaactaagttgctgaacgggaatgtggcttcggctatggggaggatgcacagtgtgtgacgtgccggctgcacaggttcaaggaggactggggcttccagaaatgcaagccctgtctggactgcgcagtggtgaaccgctttcagaaggcaaattgttcagccaccagtgatgccatctgcggggactgcttgccaggattttataggaagacgaaacttgtcggctttcaagacatggagtgtgtgccttgtggagaccctcctcctccttacgaaccgcactgtgccagcaaggtcaacctcgtgaagatcgcgtccacggcctccagcccacgggacacggcgctggctgccgttatctgcagcgctctggccaccgtcctgctggccctgctcatcctctgtgtcatctattgtaagagacagtttatggagaagaaacccagctggtctctgcggtcacaggacattcagtacaacggctctgagctgtcgtgttttgacagacctcagctccacgaatatgcccacagagcctgctgccagtgccgccgtgactcagtgcagacctgcgggccggtgcgcttgctcccatccatgtgctgtgaggaggcctgcagccccaacccggcgactcttggttgtggggtgcattctgcagccagtcttcaggcaagaaacgcaggcccagccggggagatggtgccgactttcttcggatccctcacgcagtccatctgtggcgagttttcagatgcctggcctctgatgcagaatcccatgggtggtgacaacatctctttttgtgactcttatcctgaactcactggagaagacattcattctctcaatccagaacttgaaagctcaacgtctttggattcaaatagcagtcaagatttggttggtggggctgttccagtccagtctcattctgaaaactttacagcagctactgatttatctagatataacaacacactggtagaatcagcatcaactcaggatgcactaactatgagaagccagctagatcaggagagtggtgctgtcatccacccagccactcagacgtccctccaggaagcttaaagaacctgcttctttctgcagtagaagcgtgtgctggaacccaaagagtactcctttgttaggcttatggactgagcagtctggaccttgcatggcttctggggcaaaaataaatctgaaccaaactgacggcatttgaagcctttcagccagttgcttctgagccagaccagctgtaagctgaaacctcaatgaataacaagaaaagactccaggccgactcatgatactctgcatctttcctacatgagaagcttctctgccacaaaagtgacttcaaagacggatgggttgagctggcagcctatgagattgtggacatataacaagaaacagaaatgccctcatgcttattttcatggtgattgtggttttacaagactgaagacccagagtatactttttctttccagaaataatttcataccgcctatgaaatatcagataaattaccttagcttttatgtagaatgggttcaaaagtgagtgtttctatttgagaaggacactttttcatcatctaaactgattcgcataggtggttagaatggccctcatattgcctgcctaaatcttgggtttattagatgaagtttactgaatcagaggaatcagacagaggaggatagctctttccagaatccacacttctgacctcagcctcggtctcatgaacacccgctgatctcaggagaacacctgggctagggaatgtggtcgagaaagggcagcccattgcccagaattaacacatattgtagagacttgtatgcaaaggttggcatatttatatgaaaattagttgctatagaaacatttgttgcatctgtccctctgcctgagcttagaaggttatagaaaaagggtatttataaacataaatgaccttttacttgcattgtatcttatactaaaggctttagaaattacaacatatcaggttcccctactactgaagtagccttccgtgagaacacaccacatgttaggactagaagaaaatgcacaatttgtaggggtttggatgaagcagctgtaactgccctagtgtagtttgaccaggacattgtcgtgctccttccaattgtgtaagattagttagcacatcatctcctactttagccatccggtgttggatttaagaggacggtgcttctttctattaaagtgctccatcccctaccatctacacattagcattgtctctagagctaagacagaaattaaccccgttcagtcacaaagcagggaatggttcatttactcttaatctttatgccctggagaagacctacttgaacagggcatattttttagacttctgaacatcagtatgttcgagggtactatgatattttggtttggaattgccctgcccaagtcactgtcttttaacttttaaactgaatattaaaatgtatctgtctttcctagtatgtttttatcttctcatgtattatccatggttttctctgtttgtgacagattagtaaaatttaatgagccctctttcttgtggccgtttctccatagttttaggttttgatatgtgtttactagcttgcctgtgtctggtacatctcatgacctcaattccctcacctgaaataggaaatgagaatgtttcattgtagccccaagcggtcatgtcaacctagtgcctagtcataattaattgacttttcctgtattacttctttttttaagtataaaccaatgatcctttggtagtcaagaactcttaggaacattgccttttggacatgtaaaatatttaggatttgaccacacaatggctatgaaaatgcaagtagtttcctcgcgtgacctcaccatgattcacatacgtgccactgtttgaaatctggtctgtttgcatttctgttatgacagagagatgatgtttgcatttctgttatgacagagagatgatgaaagtaggcagggctgtgttcctttgtgtagcctgtatatattttccatatgtagagccctgattaacttcaaggacaaacactggctggagaaagccagactgatgggaatgagactttggccaaaaatcccaaaacatcattttcaatcagtagagaagtgcttagggttgaaaattgatttcatttgctactgaatttggtaaatcctgggtaacttttatcaagatgaagacattttaccctacctactctagaaatatacaacaatgttatattttacactccttggaaacatttgaggaaaaaaatgcaatttgcacttcactttgttggaatatcccatagcactcaataaactcagctgctagagtgccgatgtcaggagggctgtgtcgggtaatgcgtgtggctgaatgggcataaccactgtggcttcttgtgctgcagaagctcgttgacaagactgaggaggatttcaagagcaaccaagtaaagtcatgaattttctaattttgtgtatatggaatatatttttaaatagagatttttctactttagataatgtgttaatattgctattacctaggttaagcactattgtctgtgctagtaagaaaaagaaaggaaaaccatcattgctttatagtagcttatatcaatttagatttcatcattactattttgcatactggaatttataaatgtgtaaattatcattttcttagttttgtaataccttttttatttgtgaataaaattatcacctggtattcttatttatgtgttc

SEQ ID NO: 196323 - DNA, 2223 bp, Homo sapiens
  Payload ID: 18736
  Gene Name: tumor necrosis factor receptor superfamily, member 1A
  Uniprot ID: P19438
  ENST ID: ENST00000162749
  CDS Start-End: 301-1668
ctccagctcttcctgtcccgctgttgcaacactgcctcactcttcccctcccaccttctctcccctcctctctgctttaattttctcagaattctctggactgaggctccagttctggcctttggggttcaagatcactgggaccaggccgtgatctctatgcccgagtctcaaccctcaactgtcaccccaaggcacttgggacgtcctggacagaccgagtcccgggaagccccagcactgccgctgccacactgccctgagcccaaatgggggagtgagaggccatagctgtctggcatgggcctctccaccgtgcctgacctgctgctgccactggtgctcctggagctgttggtgggaatatacccctcaggggttattggactggtccctcacctaggggacagggagaagagagatagtgtgtgtccccaaggaaaatatatccaccctcaaaataattcgatttgctgtaccaagtgccacaaaggaacctacttgtacaatgactgtccaggcccggggcaggatacggactgcagggagtgtgagagcggctccttcaccgcttcagaaaaccacctcagacactgcctcagctgctccaaatgccgaaaggaaatgggtcaggtggagatctcttcttgcacagtggaccgggacaccgtgtgtggctgcaggaagaaccagtaccggcattattggagtgaaaaccttttccagtgcttcaattgcagcctctgcctcaatgggaccgtgcacctctcctgccaggagaaacagaacaccgtgtgcacctgccatgcaggtttctttctaagagaaaacgagtgtgtctcctgtagtaactgtaagaaaagcctggagtgcacgaagttgtgcctaccccagattgagaatgttaagggcactgaggactcaggcaccacagtgctgttgcccctggtcattttctttggtctttgccttttatccctcctcttcattggtttaatgtatcgctaccaacggtggaagtccaagctctactccattgtttgtgggaaatcgacacctgaaaaagagggggagcttgaaggaactactactaagcccctggccccaaacccaagcttcagtcccactccaggcttcacccccaccctgggcttcagtcccgtgcccagttccaccttcacctccagctccacctatacccccggtgactgtcccaactttgcggctccccgcagagaggtggcaccaccctatcagggggctgaccccatccttgcgacagccctcgcctccgaccccatccccaacccccttcagaagtgggaggacagcgcccacaagccacagagcctagacactgatgaccccgcgacgctgtacgccgtggtggagaacgtgcccccgttgcgctggaaggaattcgtgcggcgcctagggctgagcgaccacgagatcgatcggctggagctgcagaacgggcgctgcctgcgcgaggcgcaatacagcatgctggcgacctggaggcggcgcacgccgcggcgcgaggccacgctggagctgctgggacgcgtgctccgcgacatggacctgctgggctgcctggaggacatcgaggaggcgctttgcggccccgccgccctcccgcccgcgcccagtcttctcagatgaggctgcgcccctgcgggcagctctaaggaccgtcctgcgagatcgccttccaaccccacttttttctggaaaggaggggtcctgcaggggcaagcaggagctagcagccgcctacttggtgctaacccctcgatgtacatagcttttctcagctgcctgcgcgccgccgacagtcagcgctgtgcgcgcggagagaggtgcgccgtgggctcaagagcctgagtgggtggtttgcgaggatgagggacgctatgcctcatgcccgttttgggtgtcctcaccagcaaggctgctcgggggcccctggttcgtccctgagcctttttcacagtgcataagcagttttttttgtttttgttttgttttgttttgtttttaaatcaatcatgttacactaatagaaacttggcactcctgtgccctctgcctggacaagcacatagcaagctgaactgtcctaaggcaggggcgagcacggaacaatggggccttcagctggagctgtggacttttgtacatacactaaaattctgaagttaaagctctgctcttgga

SEQ ID NO: 196324 - DNA, 1339 bp, Homo sapiens
  Payload ID: 18736
  Gene Name: tumor necrosis factor receptor superfamily, member 1A
  Uniprot ID: P19438
  ENST ID: ENST00000366159
  CDS Start-End: 35-691
caaatgggggagtgagaggccatagctgtctggcatgggcctctccaccgtgcctgacctgctgctgccactggtgctcctggagctgttggtgggaatatacccctcaggggttattggactggtccctcacctaggggacagggagaagagagatagtgtgtgtccccaaggaaaatatatccaccctcaaaataattcgatttgctgtaccaagtgccacaaaggaacctacttgtacaatgactgtccaggcccggggcaggatacggactgcagggagtgtgagagcggctccttcaccgcttcagaaaaccacctcagacactgcctcagctgctccaaatgccgaaaggaaatgggtcaggtggagatctcttcttgcacagtggaccgggacaccgtgtgtggctgcaggaagaaccagtaccggcattattggagtgaaaaccttttccagtgcttcaattgcagcctctgcctcaatgggaccgtgcacctctcctgccaggagaaacagaacaccgtgtgcacctgccatgcaggtttctttctaagagaaaacgagtgtgtctcctgtagtaaagtcctgctctgtcgcccaggctggaatgcagtggcgcgatctcggctcactgcaacctctgcctcccagattcaagcaattctcctgcttcagcctcccaagtagctgggattacaggcacgtgccaccatgcctggctaatttttgtatttttagtagagatggggtttcaccatcttggtcaggctggtctcaaactcctggtgatccacctgcctctgcctcccaaagtgctgggattacagccgtgagccactgcacccagccggcttcatctcttcttgaaatcacttttataccattctatgtggttctcaccatgagcttgagtggtgggctaaagtgcctctccctgctttcagcttcctgctgggaactcactctctcaagttccttccagcaccaccccatagagttcccatcactccacactgtccagtgacaactcccaacatggaagatctgctagttctacagggtgctctctggctgccccagtaacatgtgtttttaaatttttcacatgcatgtttgaccccgactccccgaagtcaggtactgtaactagcagtgtcatttaagaaaaagccctttaacctctctttgccaaaggattcttatcagcaaaacagtgatgaaacaacaatcccataacagctagctggctaccttctcaagcacttattaaatgaggcataatgattttgcttaatcctcaatcctgagaggtgggcgatccctgtggtgatgagg

SEQ ID NO: 196325 - DNA, 1034 bp, Homo sapiens
  Payload ID: 18736
  Gene Name: tumor necrosis factor receptor superfamily, member 1A
  ENST ID: ENST00000440083
  CDS Start-End: 272-1034
cactgcctcactcttcccctcccaccttctctcccctcctctctgctttaattttctcagaattctctggactgaggctccagttctggcctttggggttcaagatcactgggaccaggccgtgatctctatgcccgagtctcaaccctcaactgtcaccccaaggcacttgggacgtcctggacagaccgagtcccgggaagccccagcactgccgctgccacactgccctgagcccaaatgggggagtgagaggccatagctgtctggcatgggcctctccaccgtgcctgacctgctgctgccactggtgctcctggagctgttggtgggaatatacccctcaggggttattggactggtccctcacctaggggacagggagaagagagatagtgtgtgtccccaaggaaaatatatccaccctcaaaataattcgatttgctgtaccaagtgccacaaaggaacctacttgtacaatgactgtccaggcccggggcaggatacggactgcagggagtgtgagagcggctccttcaccgcttcagaaaaccacctcagacactgcctcagctgctccaaatgccgaaaggaaatgggtcaggtggagatctcttcttgcacagtggaccgggacaccgtgtgtggctgcaggaagaaccagtaccggcattattggagtgaaaaccttttccagtgcttcaattgcagcctctgcctcaatgggaccgtgcacctctcctgtgagcgcagctctcctgaggccaagccctctccccaccccaggggttggccccttccccatgcggtggcacttcctttccttccccctcctgtattctgtgggtctgacaaccaactcctctctggccgcccccaccctgtccctcgtcacttcctctgtcctgtggggtgggggtgcaggcgcttctcctttagctgtgccgcacttctccctacaggccaggagaaacagaacaccgtgtgcacctgccatgcaggtttctttctaagagaaaacgagtgtgtctcct

SEQ ID NO: 196326 - DNA, 1527 bp, Homo sapiens
  Payload ID: 18736
  Gene Name: tumor necrosis factor receptor superfamily, member 1A
  ENST ID: ENST00000540022
  CDS Start-End: 214-1452
agaattctctggactgaggctccagttctggcctttggggttcaagatcactgggaccaggccgtgatctctatgcccgagtctcaaccctcaactgtcaccccaaggcacttgggacgtcctggacagaccgagtcccgggaagccccagcactgccgctgccacactgccctgagcccaaatgggggagtgagaggccatagctgtctggcatgggcctctccaccgtgcctgacctgctgctgccactggtgctcctggagctgttggtgggaatatacccctcaggggttattggactggtccctcacctaggggacagggagaagagagatagtgtgtgtccccaaggaaaatatatccaccctcaaaataattcgatttgctgtaccaagtgccacaaagaaatgggtcaggtggagatctcttcttgcacagtggaccgggacaccgtgtgtggctgcaggaagaaccagtaccggcattattggagtgaaaaccttttccagtgcttcaattgcagcctctgcctcaatgggaccgtgcacctctcctgccaggagaaacagaacaccgtgtgcacctgccatgcaggtttctttctaagagaaaacgagtgtgtctcctgtagtaactgtaagaaaagcctggagtgcacgaagttgtgcctaccccagattgagaatgttaagggcactgaggactcaggcaccacagtgctgttgcccctggtcattttctttggtctttgccttttatccctcctcttcattggtttaatgtatcgctaccaacggtggaagtccaagctctactccattgtttgtgggaaatcgacacctgaaaaagagggggagcttgaaggaactactactaagcccctggccccaaacccaagcttcagtcccactccaggcttcacccccaccctgggcttcagtcccgtgcccagttccaccttcacctccagctccacctatacccccggtgactgtcccaactttgcggctccccgcagagaggtggcaccaccctatcagggggctgaccccatccttgcgacagccctcgcctccgaccccatccccaacccccttcagaagtgggaggacagcgcccacaagccacagagcctagacactgatgaccccgcgacgctgtacgccgtggtggagaacgtgcccccgttgcgctggaaggaattcgtgcggcgcctagggctgagcgaccacgagatcgatcggctggagctgcagaacgggcgctgcctgcgcgaggcgcaatacagcatgctggcgacctggaggcggcgcacgccgcggcgcgaggccacgctggagctgctgggacgcgtgctccgcgacatggacctgctgggctgcctggaggacatcgaggaggcgctttgcggccccgccgccctcccgcccgcgcccagtcttctcagatgaggctgcgcccctgcgggcagctctaaggaccgtcctgcgagatcgccttccaaccccacttttttctggaaagga

SEQ ID NO: 196327 - DNA, 571 bp, Homo sapiens
  Payload ID: 18736
  Gene Name: tumor necrosis factor receptor superfamily, member 1A
  ENST ID: ENST00000543048
  CDS Start-End: 191-406
agttctggcctttggggttcaagatcactgggaccaggccgtgatctctatgcccgagtctcaaccctcaactgtcaccccaaggcacttgggacgtcctggacagaccgagtcccgggaagccccagcactgccgctgccacactgccctgagcccaaatgggggagtgagaggccatagctgtctggcatgggcctctccaccgtgcctgacctgctgctgccactggtgctcctggagctgttggtgggaatatacccctcaggggttattggactggtccctcacctaggggacagggagaagagagatagtgtgtgtccccaaggaaaatatatccaccctcaaaataattcgatttgctgtaccaagtgccacaaaggaacctacttgtacaatgactaaccagtaccggcattattggagtgaaaaccttttccagtgcttcaattgcagcctctgcctcaatgggaccgtgcacctctcctgccaggagaaacagaacaccgtgtgcacctgccatgcaggtttctttctaagagaaaacgagtgtgtctcctgtagtaagtg

SEQ ID NO: 196328 - DNA, 2069 bp, Homo sapiens
  Payload ID: 18736
  Gene Name: tumor necrosis factor receptor superfamily, member 1A
  ENST ID: ENST00000534885
  CDS Start-End: 301-669
ctccagctcttcctgtcccgctgttgcaacactgcctcactcttcccctcccaccttctctcccctcctctctgctttaattttctcagaattctctggactgaggctccagttctggcctttggggttcaagatcactgggaccaggccgtgatctctatgcccgagtctcaaccctcaactgtcaccccaaggcacttgggacgtcctggacagaccgagtcccgggaagccccagcactgccgctgccacactgccctgagcccaaatgggggagtgagaggccatagctgtctggcatgggcctctccaccgtgcctgacctgctgctgccactggaacctacttgtacaatgactgtccaggcccggggcaggatacggactgcagggagtgtgagagcggctccttcaccgcttcagaaaaccacctcagacactgcctcagctgctccaaatgccgaaaggaaatgggtcaggtggagatctcttcttgcacagtggaccgggacaccgtgtgtggctgcaggaagaaccagtaccggcattattggagtgaaaaccttttccagtgcttcaattgcagcctctgcctcaatgggaccgtgcacctctcctgccaggagaaacagaacaccgtgtgcacctgccatgcaggtttctttctaagagaaaacgagtgtgtctcctgtagtaactgtaagaaaagcctggagtgcacgaagttgtgcctaccccagattgagaatgttaagggcactgaggactcaggcaccacagtgctgttgcccctggtcattttctttggtctttgccttttatccctcctcttcattggtttaatgtatcgctaccaacggtggaagtccaagctctactccattgtttgtgggaaatcgacacctgaaaaagagggggagcttgaaggaactactactaagcccctggccccaaacccaagcttcagtcccactccaggcttcacccccaccctgggcttcagtcccgtgcccagttccaccttcacctccagctccacctatacccccggtgactgtcccaactttgcggctccccgcagagaggtggcaccaccctatcagggggctgaccccatccttgcgacagccctcgcctccgaccccatccccaacccccttcagaagtgggaggacagcgcccacaagccacagagcctagacactgatgaccccgcgacgctgtacgccgtggtggagaacgtgcccccgttgcgctggaaggaattcgtgcggcgcctagggctgagcgaccacgagatcgatcggctggagctgcagaacgggcgctgcctgcgcgaggcgcaatacagcatgctggcgacctggaggcggcgcacgccgcggcgcgaggccacgctggagctgctgggacgcgtgctccgcgacatggacctgctgggctgcctggaggacatcgaggaggcgctttgcggccccgccgccctcccgcccgcgcccagtcttctcagatgaggctgcgcccctgcgggcagctctaaggaccgtcctgcgagatcgccttccaaccccacttttttctggaaaggaggggtcctgcaggggcaagcaggagctagcagccgcctacttggtgctaacccctcgatgtacatagcttttctcagctgcctgcgcgccgccgacagtcagcgctgtgcgcgcggagagaggtgcgccgtgggctcaagagcctgagtgggtggtttgcgaggatgagggacgctatgcctcatgcccgttttgggtgtcctcaccagcaaggctgctcgggggcccctggttcgtccctgagcctttttcacagtgcataagcagttttttttgtttttgttttgttttgttttgtttttaaatcaatcatgttacactaatagaaacttggcactcctgtgccctctgcctggacaagcacatagcaagctgaactgtcctaaggcaggggcgagcacggaacaatggggccttcagctggagctgtggacttttgtacatacactaaaattctgaagttaaagctctgctcttgga

SEQ ID NO: 196329 - DNA, 1063 bp, Homo sapiens
  Payload ID: 18736
  Gene Name: tumor necrosis factor receptor superfamily, member 1A
  ENST ID: ENST00000539372
  CDS Start-End: 169-1063
gatcactgggaccaggccgtgatctctatgcccgagtctcaaccctcaactgtcaccccaaggcacttgggacgtcctggacagaccgagtcccgggaagccccagcactgccgctgccacactgccctgagcccaaatgggggagtgagaggccatagctgtctggcatgggcctctccaccgtgcctgacctgctgctgccactggtgctcctggagctgttggtgggaatatacccctcaggggttattggactggtccctcacctaggggacagggagaagagagatagtgtgtgtccccaaggaaaatatatccaccctcaaaataattcgatttgctgtaccaagtgccacaaaggaacctacttgtacaatgactgtccaggcccggggcaggatacggactgcagggagtgtgagagcggctccttcaccgcttcagaaaaccacctcagacactgcctcagctgctccaaatgccgaaaggaaatgggtcaggtggagatctcttcttgcacagtggaccgggacaccgtgtgtggctgcaggaagaaccagtaccggcattattggagtgaaaaccttttccagtgcttcaattgcagcctctgcctcaatgggaccgtgcacctctcctgccaggagaaacagaacaccgtgtgcacctgccatgcaggtttctttctaagagaaaacgagtgtgtctcctgtagtaactgtaagaaaagcctggagtgcacgaagttgtgcctaccccagattgagaatgttaagggcactgaggactcaggcaccacagtgctgttgcccctggtcattttctttggtctttgccttttatccctcctcttcattggtttaatgtatcgctaccaacggtggaagtccaagctctactccattggtgagtgggggctttgggagggagagggagctggtgggggtgagggaggacatgggtgggtgcgatggacatgtgtggagggaggtgaggagtgtcccctcagttcataccgctggggactctgggcagaaggtggccctggatggctggggagat

SEQ ID NO: 196330 - DNA, 1531 bp, Homo sapiens
  Payload ID: 18736
  Gene Name: tumor necrosis factor receptor superfamily, member 1A
  ENST ID: ENST00000543995
  CDS Start-End: 191-409
agttctggcctttggggttcaagatcactgggaccaggccgtgatctctatgcccgagtctcaaccctcaactgtcaccccaaggcacttgggacgtcctggacagaccgagtcccgggaagccccagcactgccgctgccacactgccctgagcccaaatgggggagtgagaggccatagctgtctggcatgggcctctccaccgtgcctgacctgctgctgccactggtgctcctggagctgttggtgggaatatacccctcaggggttattggactggtccctcacctaggggacagggagaagagagatagtgtgtgtccccaaggaaaatatatccaccctcaaaataattcgatttgctgtaccaagtgccacaaagaaccagtaccggcattattggagtgaaaaccttttccagtgcttcaattgcagcctctgcctcaatgggaccgtgcacctctcctgccaggagaaacagaacaccgtgtgcacctgccatgcaggtttctttctaagagaaaacgagtgtgtctcctgtagtaactgtaagaaaagcctggagtgcacgaagttgtgcctaccccagattgagaatgttaagggcactgaggactcaggcaccacagtgctgttgcccctggtcattttctttggtctttgccttttatccctcctcttcattggtttaatgtatcgctaccaacggtggaagtccaagctctactccattgtttgtgggaaatcgacacctgaaaaagagggggagcttgaaggaactactactaagcccctggccccaaacccaagcttcagtcccactccaggcttcacccccaccctgggcttcagtcccgtgcccagttccaccttcacctccagctccacctatacccccggtgactgtcccaactttgcggctccccgcagagaggtggcaccaccctatcagggggctgaccccatccttgcgacagccctcgcctccgaccccatccccaacccccttcagaagtgggaggacagcgcccacaagccacagagcctagacactgatgaccccgcgacgctgtacgccgtggtggagaacgtgcccccgttgcgctggaaggaattcgtgcggcgcctagggctgagcgaccacgagatcgatcggctggagctgcagaacgggcgctgcctgcgcgaggcgcaatacagcatgctggcgacctggaggcggcgcacgccgcggcgcgaggccacgctggagctgctgggacgcgtgctccgcgacatggacctgctgggctgcctggaggacatcgaggaggcgctttgcggccccgccgccctcccgcccgcgcccagtcttctcagatgaggctgcgcccctgcgggcagctctaaggaccgtcctgcgagatcgccttccaaccccacttttttctggaaaggaggggtcctgcaggggcaagcaggagctagcagccgcctacttggtgctaacccctcgatgtacatagcttttctcagctgcctgcgcgccgc

SEQ ID NO: 196331 - DNA, 581 bp, Homo sapiens
  Payload ID: 18736
  Gene Name: tumor necrosis factor receptor superfamily, member 1A
  ENST ID: ENST00000536194
  CDS Start-End: 228-581
gctttaattttctcagaattctctggactgaggctccagttctggcctttggggttcaagatcactgggaccaggccgtgatctctatgcccgagtctcaaccctcaactgtcaccccaaggcacttgggacgtcctggacagaccgagtcccgggaagccccagcactgccgctgccacactgccctgagcccaaatgggggagtgagaggccatagctgtctggcatgggcctctccaccgtgcctgacctgctgctgccactggtgctcctggagctgttggtgggaatatacccctcaggggttattggactggtccctcacctaggggacagggagaagagagatagtgtgtgtccccaaggaaaatatatccaccctcaaaataattcgatttgctgtaccaagtgccacaaaggcccggggcaggatacggactgcagggagtgtgagagcggctccttcaccgcttcagaaaaccacctcagacactgcctcagctgctccaaatgccgaaaggaaatgggtcaggtggagatctcttcttgcacagtggaccgggacaccgtgtgtggctgc

SEQ ID NO: 196332 - DNA, 3683 bp, Homo sapiens
  Payload ID: 18737
  Gene Name: tumor necrosis factor receptor superfamily, member 1B
  Uniprot ID: P20333
  ENST ID: ENST00000376259
  CDS Start-End: 90-1475
gcgagcgcagcggagcctggagagaaggcgctgggctgcgagggcgcgagggcgcgagggcagggggcaaccggaccccgcccgcacccatggcgcccgtcgccgtctgggccgcgctggccgtcggactggagctctgggctgcggcgcacgccttgcccgcccaggtggcatttacaccctacgccccggagcccgggagcacatgccggctcagagaatactatgaccagacagctcagatgtgctgcagcaaatgctcgccgggccaacatgcaaaagtcttctgtaccaagacctcggacaccgtgtgtgactcctgtgaggacagcacatacacccagctctggaactgggttcccgagtgcttgagctgtggctcccgctgtagctctgaccaggtggaaactcaagcctgcactcgggaacagaaccgcatctgcacctgcaggcccggctggtactgcgcgctgagcaagcaggaggggtgccggctgtgcgcgccgctgcgcaagtgccgcccgggcttcggcgtggccagaccaggaactgaaacatcagacgtggtgtgcaagccctgtgccccggggacgttctccaacacgacttcatccacggatatttgcaggccccaccagatctgtaacgtggtggccatccctgggaatgcaagcatggatgcagtctgcacgtccacgtcccccacccggagtatggccccaggggcagtacacttaccccagccagtgtccacacgatcccaacacacgcagccaactccagaacccagcactgctccaagcacctccttcctgctcccaatgggccccagccccccagctgaagggagcactggcgacttcgctcttccagttggactgattgtgggtgtgacagccttgggtctactaataataggagtggtgaactgtgtcatcatgacccaggtgaaaaagaagcccttgtgcctgcagagagaagccaaggtgcctcacttgcctgccgataaggcccggggtacacagggccccgagcagcagcacctgctgatcacagcgccgagctccagcagcagctccctggagagctcggccagtgcgttggacagaagggcgcccactcggaaccagccacaggcaccaggcgtggaggccagtggggccggggaggcccgggccagcaccgggagctcagattcttcccctggtggccatgggacccaggtcaatgtcacctgcatcgtgaacgtctgtagcagctctgaccacagctcacagtgctcctcccaagccagctccacaatgggagacacagattccagcccctcggagtccccgaaggacgagcaggtccccttctccaaggaggaatgtgcctttcggtcacagctggagacgccagagaccctgctggggagcaccgaagagaagcccctgccccttggagtgcctgatgctgggatgaagcccagttaaccaggccggtgtgggctgtgtcgtagccaaggtgggctgagccctggcaggatgaccctgcgaaggggccctggtccttccaggcccccaccactaggactctgaggctctttctgggccaagttcctctagtgccctccacagccgcagcctccctctgacctgcaggccaagagcagaggcagcgagttgtggaaagcctctgctgccatggcgtgtccctctcggaaggctggctgggcatggacgttcggggcatgctggggcaagtccctgactctctgtgacctgccccgcccagctgcacctgccagcctggcttctggagcccttgggttttttgtttgtttgtttgtttgtttgtttgtttctccccctgggctctgccccagctctggcttccagaaaaccccagcatccttttctgcagaggggctttctggagaggagggatgctgcctgagtcacccatgaagacaggacagtgcttcagcctgaggctgagactgcgggatggtcctggggctctgtgcagggaggaggtggcagccctgtagggaacggggtccttcaagttagctcaggaggcttggaaagcatcacctcaggccaggtgcagtggctcacgcctatgatcccagcactttgggaggctgaggcgggtggatcacctgaggttaggagttcgagaccagcctggccaacatggtaaaaccccatctctactaaaaatacagaaattagccgggcgtggtggcgggcacctatagtcccagctactcagaagcctgaggctgggaaatcgtttgaacccgggaagcggaggttgcagggagccgagatcacgccactgcactccagcctgggcgacagagcgagagtctgtctcaaaagaaaaaaaaaagcaccgcctccaaatgccaacttgtccttttgtaccatggtgtgaaagtcagatgcccagagggcccaggcaggccaccatattcagtgctgtggcctgggcaagataacgcacttctaactagaaatctgccaattttttaaaaaagtaagtaccactcaggccaacaagccaacgacaaagccaaactctgccagccacatccaaccccccacctgccatttgcaccctccgccttcactccggtgtgcctgcagccccgcgcctccttccttgctgtcctaggccacaccatctcctttcagggaatttcaggaactagagatgactgagtcctcgtagccatctctctactcctacctcagcctagaccctcctcctcccccagaggggtgggttcctcttccccactccccaccttcaattcctgggccccaaacgggctgccctgccactttggtacatggccagtgtgatcccaagtgccagtcttgtgtctgcgtctgtgttgcgtgtcgtgggtgtgtgtagccaaggtcggtaagttgaatggcctgccttgaagccactgaagctgggattcctccccattagagtcagccttccccctcccagggccagggccctgcagaggggaaaccagtgtagccttgcccggattctgggaggaagcaggttgaggggctcctggaaaggctcagtctcaggagcatggggataaaggagaaggcatgaaattgtctagcagagcaggggcagggtgataaattgttgataaattccactggacttgagcttggcagctgaactattggagggtgggagagcccagccattaccatggagacaagaagggttttccaccctggaatcaagatgtcagactggctggctgcagtgacgtgcacctgtactcaggaggctgaggggaggatcactggagcccaggagtttgaggctgcagcgagctatgatcgcgccactacactccagcctgagcaacagagtgagaccctgtctcttaaagaaaaaaaaagtcagactgctgggactggccaggtttctgcccacattggacccacatgaggacatgatggagcgcacctgccccctggtggacagtcctgggagaacctcaggcttccttggcatcacagggcagagccgggaagcgatgaatttggagactctgtggggccttggttcccttgtgtgtgtgtgttgatcccaagacaatgaaagtttgcactgtatgctggacggcattcctgcttatcaataaacctgtttgttttacacgtcga

SEQ ID NO: 196333 - DNA, 557 bp, Homo sapiens
  Payload ID: 18737
  Gene Name: tumor necrosis factor receptor superfamily, member 1B
  ENST ID: ENST00000536782
  CDS Start-End: 90-557
gcgagcgcagcggagcctggagagaaggcgctgggctgcgagggcgcgagggcgcgagggcagggggcaaccggaccccgcccgcacccatggcgcccgtcgccgtctgggccgcgctggccgtcggactggagctctgggctgcggcgcacgccttgcccgcccaggtggcatttacaccctacgccccggagcccgggagcacatgccggctcagagaatactatgaccagacagctcagatgtgctgcagcaaatgctcgccgggccaacatgcaaaagtcttctgtaccaagacctcggacaccgtgtgtgactcctgtgaggacagcacatacacccagctctggaactgggttcccgagtgcttgagctgtggctcccgctgtagctctgaccaggtggaaactcaagcctgcactcgggaacagaaccgcatctgcacctgcaggcccggctggtactgcgcgctgagcaagcaggaggggtgccggctgtgcgcgccgctgcgcaagtgccgcccgggcttcggcgtggccagaccagacctctcctag

SEQ ID NO: 196334 - DNA, 3595 bp, Homo sapiens
  Payload ID: 18738
  Gene Name: tumor necrosis factor receptor superfamily, member 21
  Uniprot ID: O75509
  ENST ID: ENST00000296861
  CDS Start-End: 395-2362
agtccctcgccgaccagtctgggcagcggaggagggtggttggcagtggctggaagcttcgctatgggaagtcgttcctttgctctctcgcgcccagtcctcctccctggttctcctcagccgctgtcggaggagagcacccggagacgcgggctgcagtcgcggcggcttctccccgcctgggcggccgcgccgctgggcaggtgctgagcgcccctagagcctcccttgccgcctccctcctctgcccggccgcagcagtgcacatggggtgttggaggtagatgggctcccggcccgggaggcggcggtggatgcggcgctgggcagaagcagccgccgattccagctgccccgcgcgccccgggcgcccctgcgagtccccggttcagccatggggacctctccgagcagcagcaccgccctcgcctcctgcagccgcatcgcccgccgagccacagccacgatgatcgcgggctcccttctcctgcttggattccttagcaccaccacagctcagccagaacagaaggcctcgaatctcattggcacataccgccatgttgaccgtgccaccggccaggtgctaacctgtgacaagtgtccagcaggaacctatgtctctgagcattgtaccaacacaagcctgcgcgtctgcagcagttgccctgtggggacctttaccaggcatgagaatggcatagagaaatgccatgactgtagtcagccatgcccatggccaatgattgagaaattaccttgtgctgccttgactgaccgagaatgcacttgcccacctggcatgttccagtctaacgctacctgtgccccccatacggtgtgtcctgtgggttggggtgtgcggaagaaagggacagagactgaggatgtgcggtgtaagcagtgtgctcggggtaccttctcagatgtgccttctagtgtgatgaaatgcaaagcatacacagactgtctgagtcagaacctggtggtgatcaagccggggaccaaggagacagacaacgtctgtggcacactcccgtccttctccagctccacctcaccttcccctggcacagccatctttccacgccctgagcacatggaaacccatgaagtcccttcctccacttatgttcccaaaggcatgaactcaacagaatccaactcttctgcctctgttagaccaaaggtactgagtagcatccaggaagggacagtccctgacaacacaagctcagcaagggggaaggaagacgtgaacaagaccctcccaaaccttcaggtagtcaaccaccagcaaggcccccaccacagacacatcctgaagctgctgccgtccatggaggccactgggggcgagaagtccagcacgcccatcaagggccccaagaggggacatcctagacagaacctacacaagcattttgacatcaatgagcatttgccctggatgattgtgcttttcctgctgctggtgcttgtggtgattgtggtgtgcagtatccggaaaagctcgaggactctgaaaaaggggccccggcaggatcccagtgccattgtggaaaaggcagggctgaagaaatccatgactccaacccagaaccgggagaaatggatctactactgcaatggccatggtatcgatatcctgaagcttgtagcagcccaagtgggaagccagtggaaagatatctatcagtttctttgcaatgccagtgagagggaggttgctgctttctccaatgggtacacagccgaccacgagcgggcctacgcagctctgcagcactggaccatccggggccccgaggccagcctcgcccagctaattagcgccctgcgccagcaccggagaaacgatgttgtggagaagattcgtgggctgatggaagacaccacccagctggaaactgacaaactagctctcccgatgagccccagcccgcttagcccgagccccatccccagccccaacgcgaaacttgagaattccgctctcctgacggtggagccttccccacaggacaagaacaagggcttcttcgtggatgagtcggagccccttctccgctgtgactctacatccagcggctcctccgcgctgagcaggaacggttcctttattaccaaagaaaagaaggacacagtgttgcggcaggtacgcctggacccctgtgacttgcagcctatctttgatgacatgctccactttctaaatcctgaggagctgcgggtgattgaagagattccccaggctgaggacaaactagaccggctattcgaaattattggagtcaagagccaggaagccagccagaccctcctggactctgtttatagccatcttcctgacctgctgtagaacatagggatactgcattctggaaattactcaatttagtggcagggtggttttttaattttcttctgtttctgatttttgttgtttggggtgtgtgtgtgtgtttgtgtgtgtgtgtgtgtgtgtgtgtgtgtgtgtgtttaacagagaatatggccagtgcttgagttctttctccttctctctctctcttttttttttaaataactcttctgggaagttggtttataagcctttgccaggtgtaactgttgtgaaatacccaccactaaagttttttaagttccatattttctccattttgccttcttatgtattttcaagattattctgtgcactttaaatttacttaacttaccataaatgcagtgtgacttttcccacacactggattgtgaggctcttaacttcttaaaagtataatggcatcttgtgaatcctataagcagtctttatgtctcttaacattcacacctactttttaaaaacaaatattattactatttttattattgtttgtcctttataaattttcttaaagattaagaaaatttaagaccccattgagttactgtaatgcaattcaactttgagttatcttttaaatatgtcttgtatagttcatattcatggctgaaacttgaccacactattgctgattgtatggttttcacctggacaccgtgtagaatgcttgattacttgtactcttcttatgctaatatgctctgggctggagaaatgaaatcctcaagccatcaggatttgctatttaagtggcttgacaactgggccaccaaagaacttgaacttcaccttttaggatttgagctgttctggaacacattgctgcactttggaaagtcaaaatcaagtgccagtggcgccctttccatagagaatttgcccagctttgctttaaaagatgtcttgttttttatatacacataatcaataggtccaatctgctctcaaggccttggtcctggtgggattccttcaccaattactttaattaaaaatggctgcaactgtaagaacccttgtctgatatatttgcaactatgctcccatttacaaatgtaccttctaatgctcagttgccaggttccaatgcaaaggtggcgtggactccctttgtgtgggtggggtttgtgggtagtggtgaaggaccgatatcagaaaaatgccttcaagtgtactaatttattaataaacattaggtgtttgtta

SEQ ID NO: 196335 - DNA, 1119 bp, Homo sapiens
  Payload ID: 18739
  Gene Name: tumor necrosis factor receptor superfamily, member 25
  Uniprot ID: Q93038
  ENST ID: ENST00000348333
  CDS Start-End: 1-1119
atggagcagcggccgcggggctgcgcggcggtggcggcggcgctcctcctggtgctgctgggggcccgggcccagggcggcactcgtagccccaggtgtgactgtgccggtgacttccacaagaagattggtctgttttgttgcagaggctgcccagcggcctcccaggtggcgctggagaactgttcagcagtggccgacacccgctgtggctgtaagccaggctggtttgtggagtgccaggtcagccaatgtgtcagcagttcacccttctactgccaaccatgcctagactgcggggccctgcaccgccacacacggctactctgttcccgcagagatactgactgtgggacctgcctgcctggcttctatgaacatggcgatggctgcgtgtcctgccccacgagcaccctggggagctgtccagagcgctgtgccgctgtctgtggctggaggcagatgttctgggtccaggtgctcctggctggccttgtggtccccctcctgcttggggccaccctgacctacacataccgccactgctggcctcacaagcccctggttactgcagatgaagctgggatggaggctctgaccccaccaccggccacccatctgtcacccttggacagcgcccacacccttctagcacctcctgacagcagtgagaagatctgcaccgtccagttggtgggtaacagctggacccctggctaccccgagacccaggaggcgctctgcccgcaggtgacatggtcctgggaccagttgcccagcagagctcttggccccgctgctgcgcccacactctcgccagagtccccagccggctcgccagccatgatgctgcagccgggcccgcagctctacgacgtgatggacgcggtcccagcgcggcgctggaaggagttcgtgcgcacgctggggctgcgcgaggcagagatcgaagccgtggaggtggagatcggccgcttccgagaccagcagtacgagatgctcaagcgctggcgccagcagcagcccgcgggcctcggagccgtttacgcggccctggagcgcatggggctggacggctgcgtggaagacttgcgcagccgcctgcagcgcggcccgtga

SEQ ID NO: 196336 - DNA, 705 bp, Homo sapiens
  Payload ID: 18739
  Gene Name: tumor necrosis factor receptor superfamily, member 25
  Uniprot ID: Q93038
  ENST ID: ENST00000351748
  CDS Start-End: 1-705
atggagcagcggccgcggggctgcgcggcggtggcggcggcgctcctcctggtgctgctgggggcccgggcccagggcggcactcgtagccccaggtgtgactgtgccggtgacttccacaagaagattggtctgttttgttgcagaggctgcccagcggatgaagctgggatggaggctctgaccccaccaccggccacccatctgtcacccttggacagcgcccacacccttctagcacctcctgacagcagtgagaagatctgcaccgtccagttggtgggtaacagctggacccctggctaccccgagacccaggaggcgctctgcccgcaggtgacatggtcctgggaccagttgcccagcagagctcttggccccgctgctgcgcccacactctcgccagagtccccagccggctcgccagccatgatgctgcagccgggcccgcagctctacgacgtgatggacgcggtcccagcgcggcgctggaaggagttcgtgcgcacgctggggctgcgcgaggcagagatcgaagccgtggaggtggagatcggccgcttccgagaccagcagtacgagatgctcaagcgctggcgccagcagcagcccgcgggcctcggagccgtttacgcggccctggagcgcatggggctggacggctgcgtggaagacttgcgcagccgcctgcagcgcggcccgtga

SEQ ID NO: 196337 - DNA, 1441 bp, Homo sapiens
  Payload ID: 18739
  Gene Name: tumor necrosis factor receptor superfamily, member 25
  Uniprot ID: Q93038
  ENST ID: ENST00000351959
  CDS Start-End: 69-1211
ctgaaggcggaaccacgacgggcagagagcacggagccgggaagcccctgggcgcccgtcggagggctatggagcagcggccgcggggctgcgcggcggtggcggcggcgctcctcctggtgctgctgggggcccgggcccagggcggcactcgtagccccaggtgtgactgtgccggtgacttccacaagaagattggtctgttttgttgcagaggctgcccagcggggcactacctgaaggccccttgcacggagccctgcggcaactccacctgccttgtgtgtccccaagacaccttcttggcctgggagaaccaccataattctgaatgtgcccgctgccaggcctgtgatgagcaggcctcccaggtggcgctggagaactgttcagcagtggccgacacccgctgtggctgtaagccaggctggtttgtggagtgccaggtcagccaatgtgtcagcagttcacccttctactgccaaccatgcctagactgcggggccctgcaccgccacacacggctactctgttcccgcagagatactgactgtgggacctgcctgcctggcttctatgaacatggcgatggctgcgtgtcctgccccacgagcaccctggggagctgtccagagcgctgtgccgctgtctgtggctggaggcagaatgaagctgggatggaggctctgaccccaccaccggccacccatctgtcacccttggacagcgcccacacccttctagcacctcctgacagcagtgagaagatctgcaccgtccagttggtgggtaacagctggacccctggctaccccgagacccaggaggcgctctgcccgcaggtgacatggtcctgggaccagttgcccagcagagctcttggccccgctgctgcgcccacactctcgccagagtccccagccggctcgccagccatgatgctgcagccgggcccgcagctctacgacgtgatggacgcggtcccagcgcggcgctggaaggagttcgtgcgcacgctggggctgcgcgaggcagagatcgaagccgtggaggtggagatcggccgcttccgagaccagcagtacgagatgctcaagcgctggcgccagcagcagcccgcgggcctcggagccgtttacgcggccctggagcgcatggggctggacggctgcgtggaagacttgcgcagccgcctgcagcgcggcccgtgacacggcgcccacttgccacctaggcgctctggtggcccttgcagaagccctaagtacggttacttatgcgtgtagacattttatgtcacttattaagccgctggcacggccctgcgtagcagcaccagccggccccacccctgctcgcccctatcgctccagccaaggcgaagaagcacgaacgaatgtcgagagggggtgaagacatttctcaacttctcggccggagt

SEQ ID NO: 196338 - DNA, 1625 bp, Homo sapiens
  Payload ID: 18739
  Gene Name: tumor necrosis factor receptor superfamily, member 25
  Uniprot ID: Q93038
  ENST ID: ENST00000356876
  CDS Start-End: 89-1342
cgggccctgcgggcgcggggctgaaggcggaaccacgacgggcagagagcacggagccgggaagcccctgggcgcccgtcggagggctatggagcagcggccgcggggctgcgcggcggtggcggcggcgctcctcctggtgctgctgggggcccgggcccagggcggcactcgtagccccaggtgtgactgtgccggtgacttccacaagaagattggtctgttttgttgcagaggctgcccagcggggcactacctgaaggccccttgcacggagccctgcggcaactccacctgccttgtgtgtccccaagacaccttcttggcctgggagaaccaccataattctgaatgtgcccgctgccaggcctgtgatgagcaggcctcccaggtggcgctggagaactgttcagcagtggccgacacccgctgtggctgtaagccaggctggtttgtggagtgccaggtcagccaatgtgtcagcagttcacccttctactgccaaccatgcctagactgcggggccctgcaccgccacacacggctactctgttcccgcagagatactgactgtgggacctgcctgcctggcttctatgaacatggcgatggctgcgtgtcctgccccacgagcaccctggggagctgtccagagcgctgtgccgctgtctgtggctggaggcagatgttctgggtccaggtgctcctggctggccttgtggtccccctcctgcttggggccaccctgacctacacataccgccactgctggcctcacaagcccctggttactgcagatgaagctgggatggaggctctgaccccaccaccggccacccatctgtcacccttggacagcgcccacacccttctagcacctcctgacagcagtgagaagatctgcaccgtccagttggtgggtaacagctggacccctggctaccccgagacccaggaggcgctctgcccgcaggtgacatggtcctgggaccagttgcccagcagagctcttggccccgctgctgcgcccacactctcgccagagtccccagccggctcgccagccatgatgctgcagccgggcccgcagctctacgacgtgatggacgcggtcccagcgcggcgctggaaggagttcgtgcgcacgctggggctgcgcgaggcagagatcgaagccgtggaggtggagatcggccgcttccgagaccagcagtacgagatgctcaagcgctggcgccagcagcagcccgcgggcctcggagccgtttacgcggccctggagcgcatggggctggacggctgcgtggaagacttgcgcagccgcctgcagcgcggcccgtgacacggcgcccacttgccacctaggcgctctggtggcccttgcagaagccctaagtacggttacttatgcgtgtagacattttatgtcacttattaagccgctggcacggccctgcgtagcagcaccagccggccccacccctgctcgcccctatcgctccagccaaggcgaagaagcacgaacgaatgtcgagagggggtgaagacatttctcaacttctcggccggagtttggctgagatcgcggtattaaatctgtgaaagaaaacaaaacaaaacaaaaa

SEQ ID NO: 196339 - DNA, 1632 bp, Homo sapiens
  Payload ID: 18739
  Gene Name: tumor necrosis factor receptor superfamily, member 25
  Uniprot ID: Q93038
  ENST ID: ENST00000377782
  CDS Start-End: 69-1349
ctgaaggcggaaccacgacgggcagagagcacggagccgggaagcccctgggcgcccgtcggagggctatggagcagcggccgcggggctgcgcggcggtggcggcggcgctcctcctggtgctgctgggggcccgggcccagggcggcactcgtagccccaggtgtgactgtgccggtgacttccacaagaagattggtctgttttgttgcagaggctgcccagcggggcactacctgaaggccccttgcacggagccctgcggcaactccacctgccttgtgtgtccccaagacaccttcttggcctgggagaaccaccataattctgaatgtgcccgctgccaggcctgtgatgagcaggcctcccaggtggcgctggagaactgttcagcagtggccgacacccgctgtggctgtaagccaggctggtttgtggagtgccaggtcagccaatgtgtcagcagttcacccttctactgccaaccatgcctagactgcggggccctgcaccgccacacacggctactctgttcccgcagagatactgactgtgggacctgcctgcctggcttctatgaacatggcgatggctgcgtgtcctgccccacgccacccccgtcccttgcaggagcaccctggggagctgtccagagcgctgtgccgctgtctgtggctggaggcagagtaggtgtgttctgggtccaggtgctcctggctggccttgtggtccccctcctgcttggggccaccctgacctacacataccgccactgctggcctcacaagcccctggttactgcagatgaagctgggatggaggctctgaccccaccaccggccacccatctgtcacccttggacagcgcccacacccttctagcacctcctgacagcagtgagaagatctgcaccgtccagttggtgggtaacagctggacccctggctaccccgagacccaggaggcgctctgcccgcaggtgacatggtcctgggaccagttgcccagcagagctcttggccccgctgctgcgcccacactctcgccagagtccccagccggctcgccagccatgatgctgcagccgggcccgcagctctacgacgtgatggacgcggtcccagcgcggcgctggaaggagttcgtgcgcacgctggggctgcgcgaggcagagatcgaagccgtggaggtggagatcggccgcttccgagaccagcagtacgagatgctcaagcgctggcgccagcagcagcccgcgggcctcggagccgtttacgcggccctggagcgcatggggctggacggctgcgtggaagacttgcgcagccgcctgcagcgcggcccgtgacacggcgcccacttgccacctaggcgctctggtggcccttgcagaagccctaagtacggttacttatgcgtgtagacattttatgtcacttattaagccgctggcacggccctgcgtagcagcaccagccggccccacccctgctcgcccctatcgctccagccaaggcgaagaagcacgaacgaatgtcgagagggggtgaagacatttctcaacttctcggccggagtttggctgagatcgcggtattaaatctgtgaaagaaaacaaaacaaaacaaaaa

SEQ ID NO: 196340 - DNA, 1198 bp, Homo sapiens
  Payload ID: 18739
  Gene Name: tumor necrosis factor receptor superfamily, member 25
  Uniprot ID: Q93038
  ENST ID: ENST00000414040
  CDS Start-End: 1-657
atggagcagcggccgcggggctgcgcggcggtggcggcggcgctcctcctggtgctgctgggggcccgggcccagggcggcactcgtagccccaggtgtgactgtgccggtgacttccacaagaagattggtctgttttgttgcagaggctgcccagcggggcactacctgaaggccccttgcacggagccctgcggcaactccacctgccttgtgtgtccccaagacaccttcttggcctgggagaaccaccataattctgaatgtgcccgctgccaggcctgtgatgagcaggcctcccaggtggcgctggagaactgttcagcagtggccgacacccgctgtggctgtaagccaggctggtttgtggagtgccaggtcagccaatgtgtcagcagttcacccttctactgccaaccatgcctagactgcggggccctgcaccgccacacacggctactctgttcccgcagagatactgactgtgggacctgcctgcctggcttctatgaacatggcgatggctgcgtgtcctgccccactgttctgggtccaggtgctcctggctggccttgtggtccccctcctgcttggggccaccctgacctacacataccgccactgctggcctcacaagcccctggttactgcagatgaagctgggatggaggctctgaccccaccaccggccacccatctgtcacccttggacagcgcccacacccttctagcacctcctgacagcagtgagaagatctgcaccgtccagttggtgggtaacagctggacccctggctaccccgagacccaggaggcgctctgcccgcaggtgacatggtcctgggaccagttgcccagcagagctcttggccccgctgctgcgcccacactctcgccagagtccccagccggctcgccagccatgatgctgcagccgggcccgcagctctacgacgtgatggacgcggtcccagcgcggcgctggaaggagttcgtgcgcacgctggggctgcgcgaggcagagatcgaagccgtggaggtggagatcggccgcttccgagaccagcagtacgagatgctcaagcgctggcgccagcagcagcccgcgggcctcggagccgtttacgcggccctggagcgcatggggctggacggctgcgtggaagacttgcgcagccgcctgcagcgcggcccgtga

SEQ ID NO: 196341 - DNA, 838 bp, Homo sapiens
  Payload ID: 18739
  Gene Name: tumor necrosis factor receptor superfamily, member 25
  Uniprot ID: Q93038
  ENST ID: ENST00000502730
  CDS Start-End: 1-381
atggagcagcggccgcggggctgcgcggcggtggcggcggcgctcctcctggtgctgctgggggcccgggcccagggcggcactcgtagccccaggtgtgactgtgccggtgacttccacaagaagattggtctgttttgttgcagaggctgcccagcggcctcccaggtggcgctggagaactgttcagcagtggccgacacccgctgtggctgtaagccaggctggtttgtggagtgccaggtcagccaatgtgtcagcagttcacccttctactgccaaccatgcctagactgcggggccctgcaccgccacacacggctactctgccacccatctgtcacccttggacagcgcccacacccttctagcacctcctgacagcagtgagaagatctgcaccgtccagttggtgggtaacagctggacccctggctaccccgagacccaggaggcgctctgcccgcaggtgacatggtcctgggaccagttgcccagcagagctcttggccccgctgctgcgcccacactctcgccagagtccccagccggctcgccagccatgatgctgcagccgggcccgcagctctacgacgtgatggacgcggtcccagcgcggcgctggaaggagttcgtgcgcacgctggggctgcgcgaggcagagatcgaagccgtggaggtggagatcggccgcttccgagaccagcagtacgagatgctcaagcgctggcgccagcagcagcccgcgggcctcggagccgtttacgcggccctggagcgcatggggctggacggctgcgtggaagacttgcgcagccgcctgcagcgcggcccgtga

SEQ ID NO: 196342 - DNA, 952 bp, Homo sapiens
  Payload ID: 18739
  Gene Name: tumor necrosis factor receptor superfamily, member 25
  Uniprot ID: Q93038
  ENST ID: ENST00000502588
  CDS Start-End: 1-411
atggagcagcggccgcggggctgcgcggcggtggcggcggcgctcctcctggtgctgctgggggcccgggcccagggcggcactcgtagccccaggtgtgactgtgccggtgacttccacaagaagattggtctgttttgttgcagaggctgcccagcggcctcccaggtggcgctggagaactgttcagcagtggccgacacccgctgtggctgtaagccaggctggtttgtggagtgccaggtcagccaatgtgtcagcagttcacccttctactgccaaccatgcctagactgcggggccctgcaccgccacacacggctactctgttcccgcagagatactgactgtgggacctgcctgcctggcttctatgaacatggcgatggctgcgtgtcctgccccacatgaagctgggatggaggctctgaccccaccaccggccacccatctgtcacccttggacagcgcccacacccttctagcacctcctgacagcagtgagaagatctgcaccgtccagttggtgggtaacagctggacccctggctaccccgagacccaggaggcgctctgcccgcaggtgacatggtcctgggaccagttgcccagcagagctcttggccccgctgctgcgcccacactctcgccagagtccccagccggctcgccagccatgatgctgcagccgggcccgcagctctacgacgtgatggacgcggtcccagcgcggcgctggaaggagttcgtgcgcacgctggggctgcgcgaggcagagatcgaagccgtggaggtggagatcggccgcttccgagaccagcagtacgagatgctcaagcgctggcgccagcagcagcccgcgggcctcggagccgtttacgcggccctggagcgcatggggctggacggctgcgtggaagacttgcgcagccgcctgcagcgcggcccgtga

SEQ ID NO: 196343 - DNA, 1087 bp, Homo sapiens
  Payload ID: 18739
  Gene Name: tumor necrosis factor receptor superfamily, member 25
  Uniprot ID: Q93038
  ENST ID: ENST00000510563
  CDS Start-End: 1-546
atggagcagcggccgcggggctgcgcggcggtggcggcggcgctcctcctggtgctgctgggggcccgggcccagggcggcactcgtagccccaggtgtgactgtgccggtgacttccacaagaagattggtctgttttgttgcagaggctgcccagcggggcactacctgaaggccccttgcacggagccctgcggcaactccacctgccttgtgtgtccccaagacaccttcttggcctgggagaaccaccataattctgaatgtgcccgctgccaggcctgtgatgagcaggcctcccaggtggcgctggagaactgttcagcagtggccgacacccgctgtggctgtaagccaggctggtttgtggagtgccaggtcagccaatgtgtcagcagttcacccttctactgccaaccatgcctagactgcggggccctgcaccgccacacacggctactctgttcccgcagagatactgactgtgggacctgcctgcctggcttctatgaacatggcgatggctgcgtgtcctgccccacatgaagctgggatggaggctctgaccccaccaccggccacccatctgtcacccttggacagcgcccacacccttctagcacctcctgacagcagtgagaagatctgcaccgtccagttggtgggtaacagctggacccctggctaccccgagacccaggaggcgctctgcccgcaggtgacatggtcctgggaccagttgcccagcagagctcttggccccgctgctgcgcccacactctcgccagagtccccagccggctcgccagccatgatgctgcagccgggcccgcagctctacgacgtgatggacgcggtcccagcgcggcgctggaaggagttcgtgcgcacgctggggctgcgcgaggcagagatcgaagccgtggaggtggagatcggccgcttccgagaccagcagtacgagatgctcaagcgctggcgccagcagcagcccgcgggcctcggagccgtttacgcggccctggagcgcatggggctggacggctgcgtggaagacttgcgcagccgcctgcagcgcggcccgtga

SEQ ID NO: 196344 - DNA, 1726 bp, Homo sapiens
  Payload ID: 18739
  Gene Name: tumor necrosis factor receptor superfamily, member 25
  Uniprot ID: Q93038
  ENST ID: ENST00000485036
  CDS Start-End: 69-902
ctgaaggcggaaccacgacgggcagagagcacggagccgggaagcccctgggcgcccgtcggagggctatggagcagcggccgcggggctgcgcggcggtggcggcggcgctcctcctggtgctgctgggggcccgggcccagggcggcactcgtagccccaggtgtgactgtgccggtgacttccacaagaagattggtctgttttgttgcagaggctgcccagcggggcactacctgaaggccccttgcacggagccctgcggcaactccacctgccttgtgtgtccccaagacaccttcttggcctgggagaaccaccataattctgaatgtgcccgctgccaggcctgtgatgagcaggcctcccaggtggcgctggagaactgttcagcagtggccgacacccgctgtggctgtaagccaggctggtttgtggagtgccaggtcagccaatgtgtcagcagttcacccttctactgccaaccatgcctagactgcggggccctgcaccgccacacacggctactctgttcccgcagagatactgactgtgggacctgcctgcctggcttctatgaacatggcgatggctgcgtgtcctgccccacgccacccccgtcccttgcaggagcaccctggggagctgtccagagcgctgtgccgctgtctgtggctggaggcagagtaggtggtgtgctgggaatgcgagtgggagaactgggatggaccgaggggaggcgggtgaggaggggggcaaccacccaacacccaccagctgctttcagtgttctgggtccaggtgctcctggctggccttgtggtccccctcctgcttggggccaccctgacctacacataccgccactgctggcctcacaagcccctggttactgcagatgaagctgggatggaggctctgaccccaccaccggccacccatctgtcacccttggacagcgcccacacccttctagcacctcctgacagcagtgagaagatctgcaccgtccagttggtgggtaacagctggacccctggctaccccgagacccaggaggcgctctgcccgcaggtgacatggtcctgggaccagttgcccagcagagctcttggccccgctgctgcgcccacactctcgccagagtccccagccggctcgccagccatgatgctgcagccgggcccgcagctctacgacgtgatggacgcggtcccagcgcggcgctggaaggagttcgtgcgcacgctggggctgcgcgaggcagagatcgaagccgtggaggtggagatcggccgcttccgagaccagcagtacgagatgctcaagcgctggcgccagcagcagcccgcgggcctcggagccgtttacgcggccctggagcgcatggggctggacggctgcgtggaagacttgcgcagccgcctgcagcgcggcccgtgacacggcgcccacttgccacctaggcgctctggtggcccttgcagaagccctaagtacggttacttatgcgtgtagacattttatgtcacttattaagccgctggcacggccctgcgtagcagcaccagccggccccacccctgctcgcccctatcgctccagccaaggcgaagaagcacgaacgaatgtcgagagggggtgaagacatttctcaacttctcggccggagtttggctgagatcgcggtattaaatctgtgaaagaaaacaaaacaaaacaaaaa

SEQ ID NO: 196345 - DNA, 1706 bp, Homo sapiens
  Payload ID: 18739
  Gene Name: tumor necrosis factor receptor superfamily, member 25
  ENST ID: ENST00000480393
  CDS Start-End: 69-830
ctgaaggcggaaccacgacgggcagagagcacggagccgggaagcccctgggcgcccgtcggagggctatggagcagcggccgcggggctgcgcggcggtggcggcggcgctcctcctggtgctgctgggggcccgggcccagggcggcactcgtagccccaggtgtgactgtgccggtgacttccacaagaagattggtctgttttgttgcagaggctgcccagcggggcactacctgaaggccccttgcacggagccctgcggcaactccacctgccttgtgtgtccccaagacaccttcttggcctgggagaaccaccataattctgaatgtgcccgctgccaggcctgtgatgagcaggcctcccaggtggcgctggagaactgttcagcagtggccgacacccgctgtggctgtaagccaggctggtttgtggagtgccaggtcagccaatgtgtcagcagttcacccttctactgccaaccatgcctagactgcggggccctgcaccgccacacacggctactctgttcccgcagagatactgactgtgggacctgcctgcctggcttctatgaacatggcgatggctgcgtgtcctgccccacgagcaccctggggagctgtccagagcgctgtgccgctgtctgtggctggaggcagagtaggtggtgtgctgggaatgcgagtgggagaactgggatggaccgaggggaggcgggtgaggaggggggcaaccacccaacacccaccagctgctttcagtgttctgggtccaggtgctcctggctggccttgtggtccccctcctgcttggggccaccctgacctacacataccgccactgctggcctcacaagcccctggttactgcagatgaagctgggatggaggctctgaccccaccaccggccacccatctgtcacccttggacagcgcccacacccttctagcacctcctgacagcagtgagaagatctgcaccgtccagttggtgggtaacagctggacccctggctaccccgagacccaggaggcgctctgcccgcaggtgacatggtcctgggaccagttgcccagcagagctcttggccccgctgctgcgcccacactctcgccagagtccccagccggctcgccagccatgatgctgcagccgggcccgcagctctacgacgtgatggacgcggtcccagcgcggcgctggaaggagttcgtgcgcacgctggggctgcgcgaggcagagatcgaagccgtggaggtggagatcggccgcttccgagaccagcagtacgagatgctcaagcgctggcgccagcagcagcccgcgggcctcggagccgtttacgcggccctggagcgcatggggctggacggctgcgtggaagacttgcgcagccgcctgcagcgcggcccgtgacacggcgcccacttgccacctaggcgctctggtggcccttgcagaagccctaagtacggttacttatgcgtgtagacattttatgtcacttattaagccgctggcacggccctgcgtagcagcaccagccggccccacccctgctcgcccctatcgctccagccaaggcgaagaagcacgaacgaatgtcgagagggggtgaagacatttctcaacttctcggccggagtttggctgagatcgcggtattaaatctgtgaaagaaaacaaaacaaaacaaaaa

SEQ ID NO: 196346 - DNA, 764 bp, Homo sapiens
  Payload ID: 18739
  Gene Name: tumor necrosis factor receptor superfamily, member 25
  ENST ID: ENST00000481401
  CDS Start-End: 629-764
ggaggagacgcagcagggagaggccccacgtgggcagctgcgctgagagtcagcagcacctgtcccccaggcgctcctcctggtgctgctgggggcccgggcccagggcggcactcgtagccccaggtgtgactgtgccggtgacttccacaagaagattggtctgttttgttgcagaggctgcccagcggggcactacctgaaggccccttgcacggagccctgcggcaactccacctgccttgtgtgtccccaagacaccttcttggcctgggagaaccaccataattctgaatgtgcccgctgccaggcctgtgatgagcaggcctcccaggtggcgctggagaactgttcagcagtggccgacacccgctgtggctgtaagccaggctggtttgtggagtgccaggtcagccaatgtgtcagcagttcacccttctactgccaaccatgcctagactgcggggccctgcaccgccacacacggctactctgttcccgcagagatactgactgtgggacctgcctgcctggcttctatgaacatggcgatggctgcgtgtcctgccccacgagcaccctggggagctgtccagagcgctgtgccgctgtctgtggctggaggcagatgttctgggtccaggtgctcctggctggccttgtggtccccctcctgcttggggccaccctgacctacacataccgccactgctggcctcacaagcccctggttactgatgaagctgggatggaggctctgaccc

SEQ ID NO: 196347 - DNA, 1068 bp, Homo sapiens
  Payload ID: 18740
  Gene Name: tumor necrosis factor receptor superfamily, member 4
  Uniprot ID: P43489
  ENST ID: ENST00000379236
  CDS Start-End: 6-839
cgaggatgtgcgtgggggctcggcggctgggccgcgggccgtgtgcggctctgctcctcctgggcctggggctgagcaccgtgacggggctccactgtgtcggggacacctaccccagcaacgaccggtgctgccacgagtgcaggccaggcaacgggatggtgagccgctgcagccgctcccagaacacggtgtgccgtccgtgcgggccgggcttctacaacgacgtggtcagctccaagccgtgcaagccctgcacgtggtgtaacctcagaagtgggagtgagcggaagcagctgtgcacggccacacaggacacagtctgccgctgccgggcgggcacccagcccctggacagctacaagcctggagttgactgtgccccctgccctccagggcacttctccccaggcgacaaccaggcctgcaagccctggaccaactgcaccttggctgggaagcacaccctgcagccggccagcaatagctcggacgcaatctgtgaggacagggaccccccagccacgcagccccaggagacccagggccccccggccaggcccatcactgtccagcccactgaagcctggcccagaacctcacagggaccctccacccggcccgtggaggtccccgggggccgtgcggttgccgccatcctgggcctgggcctggtgctggggctgctgggccccctggccatcctgctggccctgtacctgctccggagggaccagaggctgccccccgatgcccacaagccccctgggggaggcagtttccggacccccatccaagaggagcaggccgacgcccactccaccctggccaagatctgacctgggcccaccaaggtggacgctgggccccgccaggctggagcccggagggtctgctgggcgagcagggcaggtgcaggccgcctgccccgccacgctcctgggccaactctgcaccgttctaggtgccgatggctgcctccggctctctgcttacgtatgccatgcatacctcctgccccgcgggaccacaataaaaaccttggcagacgggagtctccgaccggca

SEQ ID NO: 196348 - DNA, 1124 bp, Homo sapiens
  Payload ID: 18741
  Gene Name: tumor necrosis factor receptor superfamily, member 6b, decoy
  Uniprot ID: O95407
  ENST ID: ENST00000369996
  CDS Start-End: 101-1003
tccgcaggcggaccgggggcaaaggaggtggcatgtcggtcaggcacagcagggtcctgtgtccgcgctgagccgcgctctccctgctccagcaaggaccatgagggcgctggaggggccaggcctgtcgctgctgtgcctggtgttggcgctgcctgccctgctgccggtgccggctgtacgcggagtggcagaaacacccacctacccctggcgggacgcagagacaggggagcggctggtgtgcgcccagtgccccccaggcacctttgtgcagcggccgtgccgccgagacagccccacgacgtgtggcccgtgtccaccgcgccactacacgcagttctggaactacctagagcgctgccgctactgcaacgtcctctgcggggagcgtgaggaggaggcacgggcttgccacgccacccacaaccgtgcctgccgctgccgcaccggcttcttcgcgcacgctggtttctgcttggagcacgcatcgtgtccacctggtgccggcgtgattgccccgggcacccccagccagaacacgcagtgccagccgtgccccccaggcaccttctcagccagcagctccagctcagagcagtgccagccccaccgcaactgcacggccctgggcctggccctcaatgtgccaggctcttcctcccatgacaccctgtgcaccagctgcactggcttccccctcagcaccagggtaccaggagctgaggagtgtgagcgtgccgtcatcgactttgtggctttccaggacatctccatcaagaggctgcagcggctgctgcaggccctcgaggccccggagggctggggtccgacaccaagggcgggccgcgcggccttgcagctgaagctgcgtcggcggctcacggagctcctgggggcgcaggacggggcgctgctggtgcggctgctgcaggcgctgcgcgtggccaggatgcccgggctggagcggagcgtccgtgagcgcttcctccctgtgcactgatcctggccccctcttatttattctacatccttggcaccccacttgcactgaaagaggcttttttttaaatagaagaaatgaggtttcttaaagcttatttttataaagctttttcataaaa

SEQ ID NO: 196349 - DNA, 3686 bp, Homo sapiens
  Payload ID: 18742
  Gene Name: tumor necrosis factor receptor superfamily, member 8
  Uniprot ID: P28908
  ENST ID: ENST00000263932
  CDS Start-End: 223-2010
atacgggagaactaaggctgaaacctcggaggaacaaccacttttgaagtgacttcgcggcgtgcgttgggtgcggactaggtggccgcggcgggagtgtgctggagcctgaagtccacgcgcgcggctgagaaccgccgggaccgcacgtgggcgccgcgcgcttcccccgcttcccaggtgggcgccggccgccaggccacctcacgtccggccccggggatgcgcgtcctcctcgccgcgctgggactgctgttcctgggggcgctacgagccttcccacaggatcgacccttcgaggacacctgtcatggaaaccccagccactactatgacaaggctgtcaggaggtgctgttaccgctgccccatggggctgttcccgacacagcagtgcccacagaggcctactgactgcaggaagcagtgtgagcctgactactacctggatgaggccgaccgctgtacagcctgcgtgacttgttctcgagacgacctcgtggagaagacgccgtgtgcatggaactcctcccgtgtctgcgaatgtcgacccggcatgttctgttccacgtctgccgtcaactcctgtgcccgctgcttcttccattctgtctgtccggcagggatgattgtcaagttcccaggcacggcgcagaagaacacggtctgtgagccggcttccccaggggtcagccctgcctgtgccagcccagagaactgcaaggaaccctccagtggcaccatcccccaggccaagcccaccccggtgtccccagcaacctccagtgccagcaccatgcctgtaagagggggcacccgcctcgcccaggaagctgcttctaaactgacgagggctcccgactctccctcctctgtgggaaggcctagttcagatccaggtctgtccccaacacagccatgcccagaggggtctggtgattgcagaaagcagtgtgagcccgactactacctggacgaggccggccgctgcacggcctgcgtgagctgttctcgagatgaccttgtggagaagacgccatgtgcatggaactcctcccgcacctgcgaatgtcgacctggcatgatctgtgccacatcagccaccaactcctgtgcccgctgtgtcccctacccaatctgtgcagcagagacggtcaccaagccccaggatatggctgagaaggacaccacctttgaggcgccacccctggggacccagccggactgcaaccccaccccagagaatggcgaggcgcctgccagcaccagccccactcagagcttgctggtggactcccaggccagtaagacgctgcccatcccaaccagcgctcccgtcgctctctcctccacggggaagcccgttctggatgcagggccagtgctcttctgggtgatcctggtgttggttgtggtggtcggctccagcgccttcctcctgtgccaccggagggcctgcaggaagcgaattcggcagaagctccacctgtgctacccggtccagacctcccagcccaagctagagcttgtggattccagacccaggaggagctcaacgcagctgaggagtggtgcgtcggtgacagaacccgtcgcggaagagcgagggttaatgagccagccactgatggagacctgccacagcgtgggggcagcctacctggagagcctgccgctgcaggatgccagcccggccgggggcccctcgtcccccagggaccttcctgagccccgggtgtccacggagcacaccaataacaagattgagaaaatctacatcatgaaggctgacaccgtgatcgtggggaccgtgaaggctgagctgccggagggccggggcctggcggggccagcagagcccgagttggaggaggagctggaggcggaccataccccccactaccccgagcaggagacagaaccgcctctgggcagctgcagcgatgtcatgctctcagtggaagaggaagggaaagaagaccccttgcccacagctgcctctggaaagtgaggcctgggctgggctggggctaggagggcagcagggtggcctctgggaggccaggatggcactgttggcaccgaggttgggggcagaggcccatctggcctgaactgaggctccagcatctagtggtggaccggccggtcactgcaggggtctggtggtctctgcttgcatccccaacttagctgtcccctgacccagagcctaggggatccggggcttgtacagaagagacagtccaaggggactggatcccagcagtgatgttggttgaggcagcaaacagatggcaggatgggcactgccgagaacagcattggtcccagagccctgggcatcagaccttaaccaccaggcccacagcccagcgagggagaggtcgtgaggccagctcccggggcccctgtaaccctactctcctctctccctggacctcagaggtgacacccattgggcccttccggcatgcccccagttactgtaaatgtggcccccagtgggcatggagccagtgcctgtggttgtttctccagagtcaaaagggaagtcgagggatggggcgtcgtcagctggcactgtctctgctgcagcggccacactgtactctgcactggtgtgagggcccctgcctggactgtgggaccctcctggtgctgcccaccttccctgtcctgtagccccctcggtgggcccagggcctagggcccaggatcaagtcactcatctcagaatgtccccaccaatccccgccacagcaggcgcctcgggtcccagatgtctgcagccctcagcagctgcagaccgcccctcaccaacccagagaacctgctttactttgcccagggacttcctccccatgtgaacatggggaacttcgggccctgcctggagtccttgaccgctctctgtgggccccacccactctgtcctgggaaatgaagaagcatcttccttaggtctgccctgcttgcaaatccactagcaccgaccccaccacctggttccggctctgcacgctttggggtgtggatgtcgagaggcaccacggcctcacccaggcatctgctttactctggaccataggaaacaagaccgtttggaggtttcatcaggattttgggtttttcacatttcacgctaaggagtagtggccctgacttccggtcggctggccagctgactccctagggccttcagacgtgtatgcaaatgagtgatggataaggatgagtcttggagttgcgggcagcctggagactcgtggacttaccgcctggaggcaggcccgggaaggctgctgtttactcatcgggcagccacgtgctctctggaggaagtgatagtttctgaaaccgctcagatgttttggggaaagttggagaagccgtggccttgcgagaggtggttacaccagaacctggacattggccagaagaagcttaagtgggcagacactgtttgcccagtgtttgtgcaaggatggagtgggtgtctctgcatcacccacagccgcagctgtaaggcacgctggaaggcacacgcctgccaggcagggcagtctggcgcccatgatgggagggattgacatgtttcaacaaaataatgcacttccttacctagtggcccttcacacaacttttgaatctctaaaaatccataaaatccttaaagaactgtaa

SEQ ID NO: 196350 - DNA, 3593 bp, Homo sapiens
  Payload ID: 18742
  Gene Name: tumor necrosis factor receptor superfamily, member 8
  Uniprot ID: P28908
  ENST ID: ENST00000417814
  CDS Start-End: 468-1919
atacgggagaactaaggctgaaacctcggaggaacaaccacttttgaagtgacttcgcggcgtgcgttgggtgcggactaggtggccgcggcgggagtgtgctggagcctgaagtccacgcgcgcggctgagaaccgccgggaccgcacgtgggcgccgcgcgcttcccccgcttcccaggtgggcgccggccgccaggccacctcacgtccggccccggggatgcgcgtcctcctcgccgcgctgggactgctgttcctgggggcgctacgagccttcccacagggctgttcccgacacagcagtgcccacagaggcctactgactgcaggaagcagtgtgagcctgactactacctggatgaggccgaccgctgtacagcctgcgtgacttgttctcgagacgacctcgtggagaagacgccgtgtgcatggaactcctcccgtgtctgcgaatgtcgacccggcatgttctgttccacgtctgccgtcaactcctgtgcccgctgcttcttccattctgtctgtccggcagggatgattgtcaagttcccaggcacggcgcagaagaacacggtctgtgagccggcttccccaggggtcagccctgcctgtgccagcccagagaactgcaaggaaccctccagtggcaccatcccccaggccaagcccaccccggtgtccccagcaacctccagtgccagcaccatgcctgtaagagggggcacccgcctcgcccaggaagctgcttctaaactgacgagggctcccgactctccctcctctgtgggaaggcctagttcagatccaggtctgtccccaacacagccatgcccagaggggtctggtgattgcagaaagcagtgtgagcccgactactacctggacgaggccggccgctgcacggcctgcgtgagctgttctcgagatgaccttgtggagaagacgccatgtgcatggaactcctcccgcacctgcgaatgtcgacctggcatgatctgtgccacatcagccaccaactcctgtgcccgctgtgtcccctacccaatctgtgcagcagagacggtcaccaagccccaggatatggctgagaaggacaccacctttgaggcgccacccctggggacccagccggactgcaaccccaccccagagaatggcgaggcgcctgccagcaccagccccactcagagcttgctggtggactcccaggccagtaagacgctgcccatcccaaccagcgctcccgtcgctctctcctccacggggaagcccgttctggatgcagggccagtgctcttctgggtgatcctggtgttggttgtggtggtcggctccagcgccttcctcctgtgccaccggagggcctgcaggaagcgaattcggcagaagctccacctgtgctacccggtccagacctcccagcccaagctagagcttgtggattccagacccaggaggagctcaacgctgaggagtggtgcgtcggtgacagaacccgtcgcggaagagcgagggttaatgagccagccactgatggagacctgccacagcgtgggggcagcctacctggagagcctgccgctgcaggatgccagcccggccgggggcccctcgtcccccagggaccttcctgagccccgggtgtccacggagcacaccaataacaagattgagaaaatctacatcatgaaggctgacaccgtgatcgtggggaccgtgaaggctgagctgccggagggccggggcctggcggggccagcagagcccgagttggaggaggagctggaggcggaccataccccccactaccccgagcaggagacagaaccgcctctgggcagctgcagcgatgtcatgctctcagtggaagaggaagggaaagaagaccccttgcccacagctgcctctggaaagtgaggcctgggctgggctggggctaggagggcagcagggtggcctctgggaggccaggatggcactgttggcaccgaggttgggggcagaggcccatctggcctgaactgaggctccagcatctagtggtggaccggccggtcactgcaggggtctggtggtctctgcttgcatccccaacttagctgtcccctgacccagagcctaggggatccggggcttgtacagaagagacagtccaaggggactggatcccagcagtgatgttggttgaggcagcaaacagatggcaggatgggcactgccgagaacagcattggtcccagagccctgggcatcagaccttaaccaccaggcccacagcccagcgagggagaggtcgtgaggccagctcccggggcccctgtaaccctactctcctctctccctggacctcagaggtgacacccattgggcccttccggcatgcccccagttactgtaaatgtggcccccagtgggcatggagccagtgcctgtggttgtttctccagagtcaaaagggaagtcgagggatggggcgtcgtcagctggcactgtctctgctgcagcggccacactgtactctgcactggtgtgagggcccctgcctggactgtgggaccctcctggtgctgcccaccttccctgtcctgtagccccctcggtgggcccagggcctagggcccaggatcaagtcactcatctcagaatgtccccaccaatccccgccacagcaggcgcctcgggtcccagatgtctgcagccctcagcagctgcagaccgcccctcaccaacccagagaacctgctttactttgcccagggacttcctccccatgtgaacatggggaacttcgggccctgcctggagtccttgaccgctctctgtgggccccacccactctgtcctgggaaatgaagaagcatcttccttaggtctgccctgcttgcaaatccactagcaccgaccccaccacctggttccggctctgcacgctttggggtgtggatgtcgagaggcaccacggcctcacccaggcatctgctttactctggaccataggaaacaagaccgtttggaggtttcatcaggattttgggtttttcacatttcacgctaaggagtagtggccctgacttccggtcggctggccagctgactccctagggccttcagacgtgtatgcaaatgagtgatggataaggatgagtcttggagttgcgggcagcctggagactcgtggacttaccgcctggaggcaggcccgggaaggctgctgtttactcatcgggcagccacgtgctctctggaggaagtgatagtttctgaaaccgctcagatgttttggggaaagttggagaagccgtggccttgcgagaggtggttacaccagaacctggacattggccagaagaagcttaagtgggcagacactgtttgcccagtgtttgtgcaaggatggagtgggtgtctctgcatcacccacagccgcagctgtaaggcacgctggaaggcacacgcctgccaggcagggcagtctggcgcccatgatgggagggattgacatgtttcaacaaaataatgcacttccttacctagtggcccttcacacaacttttgaatctctaaaaatccataaaatccttaaagaactgt

SEQ ID NO: 196351 - DNA, 2363 bp, Homo sapiens
  Payload ID: 18742
  Gene Name: tumor necrosis factor receptor superfamily, member 8
  Uniprot ID: P28908
  ENST ID: ENST00000413146
  CDS Start-End: 289-687
gtcttgtgtggttgcagcaaggcaaagagtgtggggcgtctctgtgttccagggccagtgctcttctgggtgatcctggtgttggttgtggtggtcggctccagcgccttcctcctgtgccaccggagggcctgcaggaagcgaattcggcagaagctccacctgtgctacccggtccagacctcccagcccaagctagagcttgtggattccagacccaggaggagctcaacgcagctgaggagtggtgcgtcggtgacagaacccgtcgcggaagagcgagggttaatgagccagccactgatggagacctgccacagcgtgggggcagcctacctggagagcctgccgctgcaggatgccagcccggccgggggcccctcgtcccccagggaccttcctgagccccgggtgtccacggagcacaccaataacaagattgagaaaatctacatcatgaaggctgacaccgtgatcgtggggaccgtgaaggctgagctgccggagggccggggcctggcggggccagcagagcccgagttggaggaggagctggaggcggaccataccccccactaccccgagcaggagacagaaccgcctctgggcagctgcagcgatgtcatgctctcagtggaagaggaagggaaagaagaccccttgcccacagctgcctctggaaagtgaggcctgggctgggctggggctaggagggcagcagggtggcctctgggaggccaggatggcactgttggcaccgaggttgggggcagaggcccatctggcctgaactgaggctccagcatctagtggtggaccggccggtcactgcaggggtctggtggtctctgcttgcatccccaacttagctgtcccctgacccagagcctaggggatccggggcttgtacagaagagacagtccaaggggactggatcccagcagtgatgttggttgaggcagcaaacagatggcaggatgggcactgccgagaacagcattggtcccagagccctgggcatcagaccttaaccaccaggcccacagcccagcgagggagaggtcgtgaggccagctcccggggcccctgtaaccctactctcctctctccctggacctcagaggtgacacccattgggcccttccggcatgcccccagttactgtaaatgtggcccccagtgggcatggagccagtgcctgtggttgtttctccagagtcaaaagggaagtcgagggatggggcgtcgtcagctggcactgtctctgctgcagcggccacactgtactctgcactggtgtgagggcccctgcctggactgtgggaccctcctggtgctgcccaccttccctgtcctgtagccccctcggtgggcccagggcctagggcccaggatcaagtcactcatctcagaatgtccccaccaatccccgccacagcaggcgcctcgggtcccagatgtctgcagccctcagcagctgcagaccgcccctcaccaacccagagaacctgctttactttgcccagggacttcctccccatgtgaacatggggaacttcgggccctgcctggagtccttgaccgctctctgtgggccccacccactctgtcctgggaaatgaagaagcatcttccttaggtctgccctgcttgcaaatccactagcaccgaccccaccacctggttccggctctgcacgctttggggtgtggatgtcgagaggcaccacggcctcacccaggcatctgctttactctggaccataggaaacaagaccgtttggaggtttcatcaggattttgggtttttcacatttcacgctaaggagtagtggccctgacttccggtcggctggccagctgactccctagggccttcagacgtgtatgcaaatgagtgatggataaggatgagtcttggagttgcgggcagcctggagactcgtggacttaccgcctggaggcaggcccgggaaggctgctgtttactcatcgggcagccacgtgctctctggaggaagtgatagtttctgaaaccgctcagatgttttggggaaagttggagaagccgtggccttgcgagaggtggttacaccagaacctggacattggccagaagaagcttaagtgggcagacactgtttgcccagtgtttgtgcaaggatggagtgggtgtctctgcatcacccacagccgcagctgtaaggcacgctggaaggcacacgcctgccaggcagggcagtctggcgcccatgatgggagggattgacatgtttcaacaaaataatgcacttccttacctagtggcccttcacacaacttttgaatctctaaaaatccataaaatccttaaagaactgtaa

SEQ ID NO: 196352 - DNA, 2412 bp, Homo sapiens
  Payload ID: 18742
  Gene Name: tumor necrosis factor receptor superfamily, member 8
  ENST ID: ENST00000514649
  CDS Start-End: 130-297
ggagtgtgctggagcctgaagtccacgcgcgcggctgagaaccgccgggaccgcacgtgggcgccgcgcgcttcccccgcttcccaggtgggcgccggccgccaggccacctcacgtccggccccggggatgcgcgtcctcctcgccgcgctgggactgctgttcctgggggcgctacgagccttcccacagggctgttcccgacacagcagtgcccacagaggcctactgactgcaggaagcagtgtgagcctgactactacctggatgaggccgaccgctgtacagcctgcgtgacttgttctcgagacgacctcgtggagaagacgccgtgtgcatggaactcctcccgtgtctgcgaatgtcgacccggcatgttctgttccacgtctgccgtcaactcctgtgcccgctgcttcttccattctgtctgtccggcagggatgattgtcaagttcccaggcacggcgcagaagaacacggtctgtgagccggcttccccaggggtcagccctgcctgtgccagcccagagaactgcaaggaaccctccagtggcaccatcccccaggccaagcccaccccggtgtccccagcaacctccagtgccagcaccatgcctgtaagagggggcacccgcctcgcccaggaagctgcttctaaactgacgagggctcccgactctccctcctctgtgggaaggcctagttcagatccaggtctgtccccaacacagccatgcccagaggggtctggtgattgcagaaagcagtgtgagcccgactactacctggacgaggccggccgctgcacggcctgcgtgagctgttctcgagatgaccttgtggagaagacgccatgtgcatggaactcctcccgcacctgcgaatgtcgacctggcatgatctgtgccacatcagccaccaactcctgtgcccgctgtgtcccctacccaatctgtgcagcagagacggtcaccaagccccaggatatggctgagaaggacaccacctttgaggcgccacccctggggacccagccggactgcaaccccaccccagagaatggcgaggcgcctgccagcaccagccccactcagagcttgctggtggactcccaggccagtaagacgctgcccatcccaaccagcgctcccgtcgctctctcctccacggggaagcccgttctggatgcagggccagtgctcttctgggtgatcctggtgttggttgtggtggtcggctccagcgccttcctcctgtgccaccggagggcctgcaggaagcgaattcggcagaagctccacctgtgctacccggtccagacctcccagcccaagctagagcttgtggattccagacccaggaggagctcaacgctgaggagtggtgcgtcggtgacagaacccgtcgcggaagagcgagggttaatgagccagccactgatggagacctgccacagcgtgggggcagcctacctggagagcctgccgctgcaggatgccagcccggccgggggcccctcgtcccccagggaccttcctgagccccgggtgtccacggagcacaccaataacaagattgagaaaatctacatcatgaaggctgacaccgtgatcgtggggaccgtgaaggctgagctgccggagggccggggcctggcggggccagcagagcccgagttggaggaggagctggaggcggaccataccccccactaccccgagcaggagacagaaccgcctctgggcagctgcagcgatgtcatgctctcagtggaagaggaagggaaagaagaccccttgcccacagctgcctctggaaagtgaggcctgggctgggctggggctaggagggcagcagggtggcctctgggaggccaggatggcactgttggcaccgaggttgggggcagaggcccatctggcctgaactgaggctccagcatctagtggtggaccggccggtcactgcaggggtctggtggtctctgcttgcatccccaacttagctgtcccctgacccagagcctaggggatccggggcttgtacagaagagacagtccaaggggactggatcccagcagtgatgttggttgaggcagcaaacagatggcaggatgggcactgccgagaacagcattggtcccagagccctgggcatcagaccttaaccaccaggcccacagcccagcgagggagaggtcgtgaggccagctcccggggcccctgtaaccctactctcctctctccctggacctcagaggtgacacccattgggcccttccggcatgcccccagttactgtaaatgtggcccccagtgggcatggagccagtgcctgtggttgtttctccagagtcaaaagggaagtcgagggatggggcgtcgtcagctggcactgtctctgctgca

SEQ ID NO: 196353 - DNA, 1923 bp, Homo sapiens
  Payload ID: 18743
  Gene Name: tumor necrosis factor receptor superfamily, member 9
  Uniprot ID: Q07011
  ENST ID: ENST00000377507
  CDS Start-End: 168-935
gtgtttgacctgaagtcctctcgagctgcagaagcctgaagaccaaggagtggaaagttctccggcagccctgagatctcaagagtgacatttgtgagaccagctaatttgattaaaattctcttggaatcagctttgctagtatcatacctgtgccagatttcatcatgggaaacagctgttacaacatagtagccactctgttgctggtcctcaactttgagaggacaagatcattgcaggatccttgtagtaactgcccagctggtacattctgtgataataacaggaatcagatttgcagtccctgtcctccaaatagtttctccagcgcaggtggacaaaggacctgtgacatatgcaggcagtgtaaaggtgttttcaggaccaggaaggagtgttcctccaccagcaatgcagagtgtgactgcactccagggtttcactgcctgggggcaggatgcagcatgtgtgaacaggattgtaaacaaggtcaagaactgacaaaaaaaggttgtaaagactgttgctttgggacatttaacgatcagaaacgtggcatctgtcgaccctggacaaactgttctttggatggaaagtctgtgcttgtgaatgggacgaaggagagggacgtggtctgtggaccatctccagccgacctctctccgggagcatcctctgtgaccccgcctgcccctgcgagagagccaggacactctccgcagatcatctccttctttcttgcgctgacgtcgactgcgttgctcttcctgctgttcttcctcacgctccgtttctctgttgttaaacggggcagaaagaaactcctgtatatattcaaacaaccatttatgagaccagtacaaactactcaagaggaagatggctgtagctgccgatttccagaagaagaagaaggaggatgtgaactgtgaaatggaagtcaatagggctgttgggactttcttgaaaagaagcaaggaaatatgagtcatccgctatcacagctttcaaaagcaagaacaccatcctacataatacccaggattcccccaacacacgttcttttctaaatgccaatgagttggcctttaaaaatgcaccactttttttttttttttgacagggtctcactctgtcacccaggctggagtgcagtggcaccaccatggctctctgcagccttgacctctgggagctcaagtgatcctcctgcctcagtctcctgagtagctggaactacaaggaagggccaccacacctgactaacttttttgttttttgtttggtaaagatggcatttcaccatgttgtacaggctggtctcaaactcctaggttcactttggcctcccaaagtgctgggattacagacatgaactgccaggcccggccaaaataatgcaccacttttaacagaacagacagatgaggacagagctggtgataaaaaaaaaaaaaaaaaagcattttctagataccacttaacaggtttgagctagtttttttgaaatccaaagaaaattatagtttaaattcaattacatagtccagtggtccaactataattataatcaaaatcaatgcaggtttgttttttggtgctaatatgacatatgacaataagccacgaggtgcagtaagtacccgactaaagtttccgtgggttctgtcatgtaacacgacatgctccaccgtcaggggggagtatgagcagagtgcctgagtttagggtcaaggacaaaaaacctcaggcctggaggaagttttggaaagagttcaagtgtctgtatatcctatggtcttctccatcctcacaccttctgcctttgtcctgctcccttttaagccaggttacattctaaaaattcttaacttttaacataatattttataccaaagccaataaatgaactgcatatga

SEQ ID NO: 196354 - DNA, 584 bp, Homo sapiens
  Payload ID: 18743
  Gene Name: tumor necrosis factor receptor superfamily, member 9
  ENST ID: ENST00000492571
  CDS Start-End: 1-228
tcctccaccagcaatgcagagtgtgactgcactccagggtttcactgcctgggggcaggatgcagcatgtgtgaacaggattgtaaacaaggtcaagaactgacaaaaaaaggttgtaaagactgttgctttgggacatttaacgatcagaaacgtggcatctgtcgaccctggacaaacatcagagtggctgacgaatggaatcatgattcacaagaaaagtattgactattttctcggacttagctgaattctgtctttggaaagtggcttttttaaaaagctgttctttggatggaaagtctgtgcttgtgaatgggacgaaggagagggacgtggtctgtggaccatctccagccgacctctctccgggagcatcctctgtgaccccgcctgcccctgcgagagagccaggacactctccgcagatcatctccttctttcttgcgctgacgtcgactgcgttgctcttcctgctgttcttcctcacgctccgtttctctgttgttaaacggggcagaaagaaactcctgtatatattcaaacaacgtaagattaacataatcatattacagctctggcaa

SEQ ID NO: 196355 - DNA, 445 bp, Homo sapiens
  Payload ID: 18743
  Gene Name: tumor necrosis factor receptor superfamily, member 9
  ENST ID: ENST00000474475
  CDS Start-End: 1-264
gagagggacgtggtctgtggaccatctccagccgacctctctccgggagcatcctctgtgaccccgcctgcccctgcgagagagccaggacactctccgcagatcatctccttctttcttgcgctgacgtcgactgcgttgctcttcctgctgttcttcctcacgctccgtttctctgttgttaaacggggcagaaagaaactcctgtatatattcaaacaacatggaagcagtggggataccttcacaatcctggagtcataacactgcattccaaggaaaccatcggatctcgaatctcagtaaccctcaagacgaaaataagtgctgctgaattgaaactagagctatgattgggatatggctaatattttatggtttagtgattcatgcttaagattcatgcttttttagctaatgtagaaaataaagaaaatagttctta

SEQ ID NO: 196356 - DNA, 5970 bp, Homo sapiens
  Payload ID: 18743
  Gene Name: tumor necrosis factor receptor superfamily, member 9
  Uniprot ID: Q07011
  ENST ID: ENST00000615230
  CDS Start-End: 262-1029
caaggagggatcccacagatgtcacagggctgtcacagagctgtggtgggaatttcccatgagaccccgcccctggctgagtcaccgcactcctgtgtttgacctgaagtcctctcgagctgcagaagcctgaagaccaaggagtggaaagttctccggcagccctgagatctcaagagtgacatttgtgagaccagctaatttgattaaaattctcttggaatcagctttgctagtatcatacctgtgccagatttcatcatgggaaacagctgttacaacatagtagccactctgttgctggtcctcaactttgagaggacaagatcattgcaggatccttgtagtaactgcccagctggtacattctgtgataataacaggaatcagatttgcagtccctgtcctccaaatagtttctccagcgcaggtggacaaaggacctgtgacatatgcaggcagtgtaaaggtgttttcaggaccaggaaggagtgttcctccaccagcaatgcagagtgtgactgcactccagggtttcactgcctgggggcaggatgcagcatgtgtgaacaggattgtaaacaaggtcaagaactgacaaaaaaaggttgtaaagactgttgctttgggacatttaacgatcagaaacgtggcatctgtcgaccctggacaaactgttctttggatggaaagtctgtgcttgtgaatgggacgaaggagagggacgtggtctgtggaccatctccagccgacctctctccgggagcatcctctgtgaccccgcctgcccctgcgagagagccaggacactctccgcagatcatctccttctttcttgcgctgacgtcgactgcgttgctcttcctgctgttcttcctcacgctccgtttctctgttgttaaacggggcagaaagaaactcctgtatatattcaaacaaccatttatgagaccagtacaaactactcaagaggaagatggctgtagctgccgatttccagaagaagaagaaggaggatgtgaactgtgaaatggaagtcaatagggctgttgggactttcttgaaaagaagcaaggaaatatgagtcatccgctatcacagctttcaaaagcaagaacaccatcctacataatacccaggattcccccaacacacgttcttttctaaatgccaatgagttggcctttaaaaatgcaccactttttttttttttttgacagggtctcactctgtcacccaggctggagtgcagtggcaccaccatggctctctgcagccttgacctctgggagctcaagtgatcctcctgcctcagtctcctgagtagctggaactacaaggaagggccaccacacctgactaacttttttgttttttgtttggtaaagatggcatttcaccatgttgtacaggctggtctcaaactcctaggttcactttggcctcccaaagtgctgggattacagacatgaactgccaggcccggccaaaataatgcaccacttttaacagaacagacagatgaggacagagctggtgataaaaaaaaaaaaaaaaaagcattttctagataccacttaacaggtttgagctagtttttttgaaatccaaagaaaattatagtttaaattcaattacatagtccagtggtccaactataattataatcaaaatcaatgcaggtttgttttttggtgctaatatgacatatgacaataagccacgaggtgcagtaagtacccgactaaagtttccgtgggttctgtcatgtaacacgacatgctccaccgtcaggggggagtatgagcagagtgcctgagtttagggtcaaggacaaaaaacctcaggcctggaggaagttttggaaagagttcaagtgtctgtatatcctatggtcttctccatcctcacaccttctgcctttgtcctgctcccttttaagccaggttacattctaaaaattcttaacttttaacataatattttataccaaagccaataaatgaactgcatatgataggtatgaagtacagtgagaaaattaacacctgtgagctcattgtcctaccacagcactagagtgggggccgccaaactcccatggccaaacctggtgcaccatttgcctttgtttgtctgttggtttgcttgagacagtcttgctctgttgcccaggctggaatggagtggctattcacaggcacaatcatagcacactttagccttaaactcctgggctcaagtgatccacccgcctcagtctcccaagtagctgggattacaggtgcaaacctggcatgcctgccattgtttggcttatgatctaaggatagctttttaaattttattcattttatttttttttgagacagtgtctcactctgtctcccaggctggagtacagtggtacaatcttggatcaccgcctcccagtttcaagtgatctccctgcctcagcctcctaagtagctgggactacaggtatgtgccaccacgcctggctaatttttatatttttagtagagacggggtttcaccatgttgtccaggctggtctcaaactcctgacctcaggtgatctgcccacctctgcctcccaaagtgctgggattacaggcatgagccaccatgcctggccatttcttacacttttgtatgacatgcctattgcaagcttgcgtgcctctgtcccatgttattttactctgggatttaggtggagggagcagcttctatttggaacattggccatcgcatggcaaatgggtatctgtcacttctgctcctatttagttggttctactataacctttagagcaaatcctgcagccaagccaggcatcaatagggcagaaaagtatattctgtaaataggggtgaggagaagatatttctgaacaatagtctactgcagtaccaaattgcttttcaaagtggctgttctaatgtactcccgtcagtcatataagtgtcatgtaagtatcccattgatccacatccttgctaccctctggtactatcaggtgcccttaattttgccaagccagtgggtatagaatgagatctcactgtggtcttagtttgcatttgcttggttactgatgagcaccttgtcaaatatttatataccatttgtgtttatttttttaaataaaatgcttgctcatgcttttttgcccatttgcaaaaaaacttggggccgggtgcagtggctcatgcctgtagtcccagctctttgggaggccaaggtgggcagatcgcttgagcccaggagttcgagaccagccttggcaacatggcgaaaccctgtctttacaaaaaatacaaaaattagccgggtgtggtggtgtgcacctgaagtcccagctactcagtaggttcgctttgagcctgggaggcagaggttgcagtgagctgggaccgcatcactacacttcagcctgggcaacagagaaaaaccttttctcagaaacaaacaaacccaaatgtggttgtttgtcctgattcctaaaaggtctttatgtattctagataataatctttggtcagttatatgtgttaaaaaatatcttctttgtggccaggcacggtagctcacacctgtaatcccagcactttgcggggctgaggtgggtggatcatctgaggtcaagagttcaagatcagcctggccaacacagtgaaaccccatctctactaaacatgtacaaaacttagctgggtatggtggcgggtgcctgtaaccccagctgctccagaggctgtggcagaagaatcgcttgaacccaggaggcagaggttgcagcgagccaagattgtgccattgcactccagactgggtgacaagagtgaaattctgcctatctatctatctatctatctatatctatatatatatatatatatatcctttgtaatttatttttccctttttaaaattttttataaaattcttttttatttttatttttagcagaggtgaggtttctgaggtttcattatgttgcccaggctggtcttgaactcctgagctcaagtgatcctcccacctcagccttccaaagtgctggaattgcagacatgagccaccgcgcccctcctgtttttctctaattaatggtgtctttctttgtctttctggtaataagcaaaaagttcttcatttgatttggttaaatttataactgttttctcatatggttaacattttttcttgcctggctaaagaaatccttttctgcccaatactataaagaggtttgcccacattttattccaaaagttttaagttttgtctttcatcttgaagtctaatgtatcaggaactggcttttgtgcctgttgggaggtagtgatccaattccatgtcttgcatgtaggtaaccactggtccctgcgccatgtattcaatacgtcgtctttctcctgcgggtctgcaatctcacctaccatccatcaagtttccatagggccatgggtctgcttctgggctccctgttctgttccattgtcaatttgtctatcctgtgccagtatcacactgtgtttattacaatagctttgtaacagctctcgatatccggtaggacatctccctccaccttctttttctacttcagaagtgtcttagctaggtcaggcacggtggctcacgcctgtaatcccagcactttgggaggccgacgcggatggatcacctgaggtcaggagttttgagacagcctggccaacatggtgaaaccccatctctactaaaaaatacaaaaattagtcaggcatggtggcatgtgcctgtaatcccagctatttgggaggctgaggccggagaattgcttgaacccggggggcggaggttgcagtgagccgagatcgtaccattgcactccagcctgggtgacagagcgaaactctgtctcaggaaaaaaaagaaaagagatgtcttggttattcttggttctttattattcaatataaattttagaagctgaatttgaaaagatttggattggaatttcattaaatctacaggtcaatttagggagagttgataattttacagaattgagtcatctggtgttccaataagaataagagaacaattattggctgtacaattcttgccaaatagtaggcaaagcaaagcttaggaagtatactggtgccatttcaggaacaaagctaggtgcgaatatttttgtctttctgaatcatgatgctgtaagttctaaagtgatttctcctcttggctttggacacatggtgtttaattacctactgctgactatccacaaacagaaagagactggtcatgccccacagggttggggtatccaagataatggagcgaggctctcatgtgtcctaggttacacaccgaaaatccacagtttattctgtgaagaaaggaggctatgtttatgatacagactgtgatatttttatcatagcctattctggtatcatgtgcaaaagctataaatgaaaaacacaggaacttggcatgtgagtcattgctccccctaaatgacaattaataaggaaggaacattgagacagaataaaatgatccccttctgggtttaatttagaaagttccataattaggtttaatagaaataaatgtaaatttctatgattaaaaataaattagcacatttagggatacacaaattataaatcattttctaaatgctaaaaacaagctcaggtttttttcagaagaaagttttaattttttttctttagtggaagatatcactctgacggaaagttttgatgtgaggggcggatgactataaagtgggcatcttcccccacaggaagatgtttccatctgtgggtgagaggtgcccaccgcagctagggcaggttacatgtgccctgtgtgtggtaggacttggagagtgatctttatcaacgtttttatttaaaagactatctaataaaacacaaaactatgatgttcacagg

SEQ ID NO: 196357 - DNA, 3627 bp, Homo sapiens
  Payload ID: 18744
  Gene Name: tumor necrosis factor, alpha-induced protein 1 (endothelial)
  Uniprot ID: Q13829
  ENST ID: ENST00000226225
  CDS Start-End: 268-1218
agccggctgggctgggcagcactccgggcggagtcgacgagcgcaggatgtgagctcacagcttgggactgctgaggggcaggcggctgcaggctaggggcggctcggagtccgctggccacccagctgagaggagaggcgcccccggggacgcactgagattatgaggctctggcctccactggccactcactcgtgaccctttccaccacggcggagccttccaagcctacctcctgccgtgtggtgatctacctgcagcgggagatgtcgggggacacctgcctgtgcccagcctcaggggccaagcccaagctcagtggcttcaagggaggagggttgggcaacaagtatgtccagctcaacgtgggcggctctctgtactacaccactgtgcgggccctgacccgccacgacaccatgctcaaggccatgttcagtgggcgcatggaggtgctgaccgacaaagaaggctggatcctcatagaccgttgtggaaagcactttggcaccattttgaattacctccgagatgacaccatcaccctccctcagaaccggcaagaaatcaaggaattgatggctgaagcaaagtattacctcatccaggggctggtgaatatgtgccagagtgccctgcaggacaagaaggactcctaccagcctgtgtgcaacatccccatcatcacatccctaaaggaggaggagcggctcatcgaatcctccaccaagcccgtggtgaagctgctgtacaacagaagcaacaacaagtattcctacaccagcaactctgacgaccacctgctgaaaaacatcgagctgtttgacaagctctccctgcgcttcaacggccgcgtgctcttcatcaaggatgtcattggtgacgagatctgctgctggtccttttatggccagggccgtaagctggcagaggtgtgctgtacctccatcgtgtatgccacggagaagaagcagaccaaggtggaattcccagaggcccgaatctatgaggagacactcaacgtcctactctatgagactccccgcgtccccgacaactccttgttggaggccacaagccgtagccgcagccaggcttcccccagtgaagatgaggagacctttgaactgcgggaccgtgtccgccgcatccacgtcaagcgctacagcacttacgatgaccggcagctcggccaccagtctacccatcgcgactgaccagaccctcagggagtcagggcacgggaggccctatctcccatcctgtggaacccgccccattggccaccccatgctgctgctgcctgggtctctgctctagcacccagaggcatgacaggccctgctcagaggtcagagggtctgggcagaggagggaccacattcccctgccttgcccctgagcacttctggagactgcgtcctgtcctatctgctcaccatcacccttcctgcccgacggagctgcttctgctccctggggcatatggactgacccacctcctgctgagaaccttcccctaggccctgtgcagaaggctactgccccttaggcctcagctgggggaaaggcagttctggtgctgtagaggccctggtgcagaaagtgggacgtcttttttcctaaggtgtttaagcacaggcttgataagtttggtttttaaaaaataatctaggaaatgaataattctaaatctagtaatgaggaaactgagcatttcttttgccctccagggtgccaagaccctacatatgacagaacccttggcccttctccatgcctgtgggatctgtttctttaaagcactttgtactgttattcaggaggttgataatctccttgacccatgtctttctaccctaatccccacttccctgcagaatcaatctgagggaggggataaagaggaagcaataaaaaaaaaacatccgacagagcagctctggctttgcagcctggccagcagctcagagtgcaccgaggagggaaggatggctaagctgggaccggcagtcctcacagggtgcctgtgagaaaggacattttacccccacatcatagtcacatcactgactcctaggtctagcacgactgctctttgtgattctcttgagtacccttggcttccagccatgctgtcctcacatacggtaaagccaaagagctgtcacatgggccagaaacatgagccacggcaggaagaccgtggagcccgtgggcactgcatggtgttggctggcatgcccatcagctgaggacagcaaactcccagcagcccctacagaggtggcacatgcttggccacacatctactccctgcccacaccatctatgctcttggttggtgctggctgggatggcggttctgcccagtggtgtctctgagcgcgggatgacaggagcaaccgaagcaccctgaaggccttcactccttgttgggtaactcagccatggagatgccaagcactagccaggaggtgagttcctctttagggctttggttttcattcctttttgtttggcttggccaaaccagaattcagcttatctgaattattttccaaaggaatgctgtcagggagggactgttctgccagcctaacaaagcaacgtagccacgtatagtacccactttctgctctttggagagaacacaggttatcaagttcatctctcttgactactcttatgatagctgatgccacagagcctatgggcaaatgccagacccagggttagacacaaggacctgaagtgacatgacggcgggacaggggaaatgtgactttctaattaggcattttatgttagtcacagtcttgaatgtataaacagcactaagactctcaggtcaggtaccttggtgatcagctactagttcttccagccctcattgaggtaacaagataaagacaaatccacttctttggccaaattcaggctttggctttatgactttcccacagagactggaatgcgtcagcctgagaccactggcctattttctcagctgccctcttgaggtcctttaacactcaaattcccagctccccactgaggtgttgtgatgcttgccttttgacctccccatcccctttagtccctgcttactactttgacattcacatcctcagtgtctcagtcttttttgccgagaaagcacagtagtctgggactgggcatttatcttctctgactgaaaatctctccttggtcttaaggaaaatactaacattgaactcactgacatgatcttagcttctttaatcagactttgtgacttaaaagtttgggggttttctttgaaagtttccagccctattcagaaagcaactcttggctgtgtgcatttttcaactccaagcagcccaggggtaagtaaacaaagtatggatgaaggtcagattttcttgtcagtttctgagaaacctggcagcctgctgttaacaacacaggccagtattgggttttattgaatttggtatgtgaccaaggtcggcctaaaggatggcgcaggtcctgggcaggaaagaatttttcctttatcacataactgtaatatttggttgctcagcataagtgatggaagcaaacactaatttctaataaaattgtgttaaactcaa

SEQ ID NO: 196358 - DNA, 1656 bp, Homo sapiens
  Payload ID: 18744
  Gene Name: tumor necrosis factor, alpha-induced protein 1 (endothelial)
  Uniprot ID: Q13829
  ENST ID: ENST00000544907
  CDS Start-End: 363-1001
aagtagctctgctctctccgcgaagaccctcgggggattccgcctccaccctttcccggatagagcgctatgcatgcagggacttgtagtctcaggctccccagccggctgggctgggcagcactccgggcggagtcgacgagcgcaggatgtgagctcacagcttgggactgctgaggggcaggcggctgcaggctaggggcggctcggagtccgctggccacccagctgagaggagaggcgcccccggggacggctggatcctcatagaccgttgtggaaagcactttggcaccattttgaattacctccgagatgacaccatcaccctccctcagaaccggcaagaaatcaaggaattgatggctgaagcaaagtattacctcatccaggggctggtgaatatgtgccagagtgccctgcaggacaagaaggactcctaccagcctgtgtgcaacatccccatcatcacatccctaaaggaggaggagcggctcatcgaatcctccaccaagcccgtggtgaagctgctgtacaacagaagcaacaacaagtattcctacaccagcaactctgacgaccacctgctgaaaaacatcgagctgtttgacaagctctccctgcgcttcaacggccgcgtgctcttcatcaaggatgtcattggtgacgagatctgctgctggtccttttatggccagggccgtaagctggcagaggtgtgctgtacctccatcgtgtatgccacggagaagaagcagaccaaggtggaattcccagaggcccgaatctatgaggagacactcaacgtcctactctatgagactccccgcgtccccgacaactccttgttggaggccacaagccgtagccgcagccaggcttcccccagtgaagatgaggagacctttgaactgcgggaccgtgtccgccgcatccacgtcaagcgctacagcacttacgatgaccggcagctcggccaccagtctacccatcgcgactgaccagaccctcagggagtcagggcacgggaggccctatctcccatcctgtggaacccgccccattggccaccccatgctgctgctgcctgggtctctgctctagcacccagaggcatgacaggccctgctcagaggtcagagggtctgggcagaggagggaccacattcccctgccttgcccctgagcacttctggagactgcgtcctgtcctatctgctcaccatcacccttcctgcccgacggagctgcttctgctccctggggcatatggactgacccacctcctgctgagaaccttcccctaggccctgtgcagaaggctactgccccttaggcctcagctgggggaaaggcagttctggtgctgtagaggccctggtgcagaaagtgggacgtcttttttcctaaggtgtttaagcacaggcttgataagtttggtttttaaaaaataatctaggaaatgaataattctaaatctagtaatgaggaaactgagcatttcttttgccctccagggtgccaagaccctacatatgacagaacccttggcccttctccatgcctgtgggatctgtttctttaaagcactttgtactgttattcaggaggttgataatctccttgacccatgtctttctaccctaatccccactt

SEQ ID NO: 196359 - DNA, 579 bp, Homo sapiens
  Payload ID: 18744
  Gene Name: tumor necrosis factor, alpha-induced protein 1 (endothelial)
  ENST ID: ENST00000582302
  CDS Start-End: 205-579
tgctttgtaggaaaggaagagattagctctggatccgccgacctctcttggcaggcctatcctttgagctcctttgcattggcagaacatcactgagattatgaggctctggcctccactggccactcactcgtgaccctttccaccacggcggagccttccaagcctacctcctgccgtgtggtgatctacctgcagcgggagatgtcgggggacacctgcctgtgcccagcctcaggggccaagcccaagctcagtggcttcaagggaggagggttgggcaacaagtatgtccagctcaacgtgggcggctctctgtactacaccactgtgcgggccctgacccgccacgacaccatgctcaaggccatgttcagtgggcgcatggaggtgctgaccgacaaagaaggctggatcctcatagaccgttgtggaaagcactttggcaccattttgaattacctccgagatgacaccatcaccctccctcagaaccggcaagaaatcaaggaattgatggctgaagcaaagtattacctcatccaggggctggtgaatatgtgccagagtgccctgcag

SEQ ID NO: 196360 - DNA, 536 bp, Homo sapiens
  Payload ID: 18744
  Gene Name: tumor necrosis factor, alpha-induced protein 1 (endothelial)
  ENST ID: ENST00000578158
  CDS Start-End: 215-536
tttcccggatagagcgctatgcatgcagggacttgtagtctcaggctccccagccggctgggctgggcagcactccgggcggagtcgacgagcgcaggatcactgagattatgaggctctggcctccactggccactcactcgtgaccctttccaccacggcggagccttccaagcctacctcctgccgtgtggtgatctacctgcagcgggagatgtcgggggacacctgcctgtgcccagcctcaggggccaagcccaagctcagtggcttcaagggaggagggttgggcaacaagtatgtccagctcaacgtgggcggctctctgtactacaccactgtgcgggccctgacccgccacgacaccatgctcaaggccatgttcagtgggcgcatggaggtgctgaccgacaaagaaggctggatcctcatagaccgttgtggaaagcactttggcaccattttgaattacctccgagatgacaccatcaccctccctcagaaccggcaagaaatcaaggaattgatggctgaag

SEQ ID NO: 196361 - DNA, 482 bp, Homo sapiens
  Payload ID: 18744
  Gene Name: tumor necrosis factor, alpha-induced protein 1 (endothelial)
  ENST ID: ENST00000577535
  CDS Start-End: 11-482
caaggaattgatggctgaagcaaagtattacctcatccaggggctggtgaatatgtgccagagtgccctgcaggacaagaaggactcctaccagcctgtgtgcaacatccccatcatcacatccctaaaggaggaggagcggctcatcgaatcctccaccaagcccgtggtgaagctgctgtacaacagaagcaacaacaagtattcctacaccagcaactctgacgaccacctgctgaaaaacatcgagctgtttgacaagctctccctgcgcttcaacggccgcgtgctcttcatcaaggatgtcattggtgacgagatctgctgctggtccttttatggccagggccgtaagctggcagaggtgtgctgtacctccatcgtgtatgccacggagaagaagcagaccaaggtgtgggggattgcccctgcctgggtaggggaggacacacacccactgtgcgggggacgtggtcgggctg

SEQ ID NO: 196362 - DNA, 4175 bp, Homo sapiens
  Payload ID: 18745
  Gene Name: tumor necrosis factor, alpha-induced protein 2
  Uniprot ID: Q03169
  ENST ID: ENST00000333007
  CDS Start-End: 132-2096
ccagggtgatgctgaagatgatgaccttcttccaaggcctctagagccatcagcctgtgccaggcaccctcgacttgcctagaggcccccaaaagttgcagtccacatcagaggcagagtcagaggcctccatgtcggaggcctcctctgaggacctggtgccacccctggaggctggggcagccccatatagggaggaggaagaggcggcgaagaagaagaaggagaagaagaagaagtccaaaggcctggccaatgtgttctgcgtcttcaccaaagggaagaagaagaagggtcagcccagctcagcggagcccgaggacgcagccgggtccaggcaggggctggatggcccgccccccacagtggaggagctgaaggcggcgctggagcgcgggcagctggaggcggcgcggccgctgctggcgctggagcgggagctggcggcggcggcggcggcgggcggtgtgagcgaggaggagctggtgcggcgccagagcaaggtggaggcgctgtacgagctgctgcgcgaccaggtgctgggcgtgctgcggcggccgctggaggcgccgcccgagcggctgcgccaggcgctggccgtggtggcggagcaggagcgcgaggaccgccaggcggcggcggcggggccggggacctcggggctggcggccacgcgcccgcggcgctggctgcagctgtggcggcgcggcgtggcggaggcggccgaggagcgcatgggccagcggccggccgcgggcgccgaggtccccgagagcgtctttctgcacttgggccgcaccatgaaggaggacctggaggccgtggtggagcggctgaagccgctgttccccgccgagttcggcgtcgtggcggcctacgccgagagctaccaccagcacttcgcggcccacctggccgccgtggcgcagttcgagctgtgcgagcgcgacacctacatgctgctgctctgggtgcagaacctctaccccaatgacatcatcaacagccccaagctggtgggtgagctgcagggtatggggctcgggagcctcctgccccccaggcagatccgactgctggaggccacattcctgtccagtgaggcggccaatgtgagggagttgatggaccgagctctggagctagaggcacggcgctgggctgaggatgtgcctccccagaggctggacggccactgccacagcgagctggccatcgacatcatccagatcacctcccaggcccaggccaaggccgagagcatcacgctggacttgggctcacagataaagcgggtgctgctggtggagctgcctgcgttcctgaggagctaccagcgcgcctttaatgaatttctggagagaggcaagcagctgacgaattacagggccaatgttattgccaacatcaacaactgcctgtccttccggatgtccatggagcagaattggcaggtaccccaggacaccctgagcctcctgctgggccccctgggtgagctcaagagccacggctttgacaccctgctccagaacctgcatgaggacctgaagccactgttcaagaggttcacgcacacccgctgggcggcccctgtggagaccctggaaaacatcatcgccactgtagacacgaggctgcctgagttctcagagctgcagggctgtttccgggaggagctcatggaggccttgcacctgcacctggtgaaggagtacatcatccaactcagcaaggggcgcctggtcctcaagacggccgagcagcagcagcagctggctgggtacatcctggccaatgctgacaccatccagcacttctgcacccagcacggctccccggcgacctggctgcagcctgctctccctacgctggccgagatcattcgcctgcaggaccccagtgccatcaagattgaggtggccacttatgccacctgctaccctgacttcagcaaaggccacctgagcgctatcctggccatcaaggggaacctatccaacagtgaggtcaagcgcatccggagcatcttggacgtcagcatgggggcgcaggagccctcccggcccctattttcccttataaaggttggttagcttttcctgtggcctgacctgcctgtgagtgcccagcaagccttgggcacaccccgctgggagctgttaagagcagcgctggttctcggttcctcccgggtctcctgtgctctgatgctacttctgcctagccctggcggaggtgcaggccctgtcagctggaactggacagaccttggtttgtttacatgtccgatgggggcaggagctcccatcctgggcagccaaccaggcaacaccaaggactctttgtaaacgatagctgatcgtgtgcacgcaaggaaagaaccaggagggagagtgcagccaggctcagggatccccggacacctctgtccagagcccctccacagtcggcctcatgactgtcctcctcgtgggtggggccgagggccctcttcagctctctggagacaggggccgagcctcacccatctgccctctgcagcccagggccgccgtgagcgggattcagcaatggtggaatggaagacagaactggaagagaaagaaggaaaagatgagctctcgtctggcaggggcttttagggtcctgtggcgagctgtgagcaccgccagcattagacgtcacatccaggtggccccacggcccctacaggctggccctgcaatggggccctgagccctccctcttcatcccccaaggcctcaactagagggtggtcccccgagggcttggtgtctactaccgaagggcccaagacctcctgggtcctctcaggctcccccttccccaaggcagggacaggccctgggggtgccaccgtgggccctgccacccagaagtctggctgaggtctgggcaggggcagggcaagcttgacctctcactgttgaccctttggcctctgtatttgtttcctattgccgtgacaggtttccacaaacttcgtggatcaaaacgaggtcttccagttctgcgggtcagaaggctgacccggggctcaaatctgggtgtcggcagtcctgcactccttctggaggctctaggggagaattcatttctggccttttcatttttagaggctgaccgtaattcttgacttcaggctcctccatcttcagagccagctgtgggtagttgaatctttttcccgtcacctcattgaggcctcccctctcctgcctccctccaccacttttttttttttttttttgagacagggtcttgctgtgttgcccaggctggagtgcagtggcctggtcatggcatcaaggctcactgcagcctggacctcctggttcaagtgatcctcttgtctcagtcccctgagacaatcccccacgcccagctacatattttttgtggatacagggtctcattctgttgcctaggcttgtctggaactcctgggctcaagggatcttgtagccttagcctcctaaagtgctgggattataggcatgagtcactgtacccggcctgctctaccgcttttaaggacgcttatgatcacattgcgcctacccagagaacccaggtcgtctttctattttcaggtcagctgattagccaccttagttccatctgcaactttagttcccactggctgtgtaacctaacatagtcacaggctctggggactgtcacgtggacatctttgggaggccgttattctgcccaccgcaccctccgttcatcccctgccctgccgggcacctcgctctaccccaggaaaatgtgagctcgttttcctgctcggcatgtgctccccctaaggctctgctcctccctgggcctgaaagttccttctcagcctgagagggggcccttcggactcaggcatgactcagcccggctgatgcctctgcagtgctgagtcaggatttggggccggctctcttgggtccgtccccttttcccaggtactgccttacaaagctgtggccaggaagtggccggtataaaggatgcccaaggtctttgtacgtgtgtaggagttagcgtgtttgatattgttaatataataataattattttttagagtactgcttttgtatgtatgttgaacaggatccaggtttttatagcttgatataaaacagaattcaaaagtg

SEQ ID NO: 196363 - DNA, 4683 bp, Homo sapiens
  Payload ID: 18745
  Gene Name: tumor necrosis factor, alpha-induced protein 2
  Uniprot ID: Q03169
  ENST ID: ENST00000560869
  CDS Start-End: 640-2604
agtggcggccaggccgggacacggtaagtgacctccgcttccacacgtccattccccgccgctccgcgcggcttctcgcccgcccctaccccgaggccaggccggattccccgaggaaagagcctgtcgccgcggcggggacaggagggggctggacgcttccagggaaactgaggccctggcgcgcccagcgtccgcgcgtccgggcgcagaggggccaaggctggctgagggcccgggcctgccagaggcagggagggcggggctggggcaggcgcaggggtctcccctccattacagcagaaaggccccaggtccggcgtgactccccggccgggcgacacaggccgagtcacttcctcgcccgtgcccgggtgtcctcatcgggggatgggtgcgccttccacatcctgcccaggactgaaggagccgggcccagcgagctcccgggaggtgtgtggacatcagccctgacggggaaggcgagccaggagcctgcaggcctgaaccagggtgatgctgaagatgatgaccttcttccaaggcctctagagccatcagcctgtgccaggcaccctcgacttgcctagaggcccccaaaagttgcagtccacatcagaggcagagtcagaggcctccatgtcggaggcctcctctgaggacctggtgccacccctggaggctggggcagccccatatagggaggaggaagaggcggcgaagaagaagaaggagaagaagaagaagtccaaaggcctggccaatgtgttctgcgtcttcaccaaagggaagaagaagaagggtcagcccagctcagcggagcccgaggacgcagccgggtccaggcaggggctggatggcccgccccccacagtggaggagctgaaggcggcgctggagcgcgggcagctggaggcggcgcggccgctgctggcgctggagcgggagctggcggcggcggcggcggcgggcggtgtgagcgaggaggagctggtgcggcgccagagcaaggtggaggcgctgtacgagctgctgcgcgaccaggtgctgggcgtgctgcggcggccgctggaggcgccgcccgagcggctgcgccaggcgctggccgtggtggcggagcaggagcgcgaggaccgccaggcggcggcggcggggccggggacctcggggctggcggccacgcgcccgcggcgctggctgcagctgtggcggcgcggcgtggcggaggcggccgaggagcgcatgggccagcggccggccgcgggcgccgaggtccccgagagcgtctttctgcacttgggccgcaccatgaaggaggacctggaggccgtggtggagcggctgaagccgctgttccccgccgagttcggcgtcgtggcggcctacgccgagagctaccaccagcacttcgcggcccacctggccgccgtggcgcagttcgagctgtgcgagcgcgacacctacatgctgctgctctgggtgcagaacctctaccccaatgacatcatcaacagccccaagctggtgggtgagctgcagggtatggggctcgggagcctcctgccccccaggcagatccgactgctggaggccacattcctgtccagtgaggcggccaatgtgagggagttgatggaccgagctctggagctagaggcacggcgctgggctgaggatgtgcctccccagaggctggacggccactgccacagcgagctggccatcgacatcatccagatcacctcccaggcccaggccaaggccgagagcatcacgctggacttgggctcacagataaagcgggtgctgctggtggagctgcctgcgttcctgaggagctaccagcgcgcctttaatgaatttctggagagaggcaagcagctgacgaattacagggccaatgttattgccaacatcaacaactgcctgtccttccggatgtccatggagcagaattggcaggtaccccaggacaccctgagcctcctgctgggccccctgggtgagctcaagagccacggctttgacaccctgctccagaacctgcatgaggacctgaagccactgttcaagaggttcacgcacacccgctgggcggcccctgtggagaccctggaaaacatcatcgccactgtagacacgaggctgcctgagttctcagagctgcagggctgtttccgggaggagctcatggaggccttgcacctgcacctggtgaaggagtacatcatccaactcagcaaggggcgcctggtcctcaagacggccgagcagcagcagcagctggctgggtacatcctggccaatgctgacaccatccagcacttctgcacccagcacggctccccggcgacctggctgcagcctgctctccctacgctggccgagatcattcgcctgcaggaccccagtgccatcaagattgaggtggccacttatgccacctgctaccctgacttcagcaaaggccacctgagcgctatcctggccatcaaggggaacctatccaacagtgaggtcaagcgcatccggagcatcttggacgtcagcatgggggcgcaggagccctcccggcccctattttcccttataaaggttggttagcttttcctgtggcctgacctgcctgtgagtgcccagcaagccttgggcacaccccgctgggagctgttaagagcagcgctggttctcggttcctcccgggtctcctgtgctctgatgctacttctgcctagccctggcggaggtgcaggccctgtcagctggaactggacagaccttggtttgtttacatgtccgatgggggcaggagctcccatcctgggcagccaaccaggcaacaccaaggactctttgtaaacgatagctgatcgtgtgcacgcaaggaaagaaccaggagggagagtgcagccaggctcagggatccccggacacctctgtccagagcccctccacagtcggcctcatgactgtcctcctcgtgggtggggccgagggccctcttcagctctctggagacaggggccgagcctcacccatctgccctctgcagcccagggccgccgtgagcgggattcagcaatggtggaatggaagacagaactggaagagaaagaaggaaaagatgagctctcgtctggcaggggcttttagggtcctgtggcgagctgtgagcaccgccagcattagacgtcacatccaggtggccccacggcccctacaggctggccctgcaatggggccctgagccctccctcttcatcccccaaggcctcaactagagggtggtcccccgagggcttggtgtctactaccgaagggcccaagacctcctgggtcctctcaggctcccccttccccaaggcagggacaggccctgggggtgccaccgtgggccctgccacccagaagtctggctgaggtctgggcaggggcagggcaagcttgacctctcactgttgaccctttggcctctgtatttgtttcctattgccgtgacaggtttccacaaacttcgtggatcaaaacgaggtcttccagttctgcgggtcagaaggctgacccggggctcaaatctgggtgtcggcagtcctgcactccttctggaggctctaggggagaattcatttctggccttttcatttttagaggctgaccgtaattcttgacttcaggctcctccatcttcagagccagctgtgggtagttgaatctttttcccgtcacctcattgaggcctcccctctcctgcctccctccaccacttttttttttttttttttgagacagggtcttgctgtgttgcccaggctggagtgcagtggcctggtcatggcatcaaggctcactgcagcctggacctcctggttcaagtgatcctcttgtctcagtcccctgagacaatcccccacgcccagctacatattttttgtggatacagggtctcattctgttgcctaggcttgtctggaactcctgggctcaagggatcttgtagccttagcctcctaaagtgctgggattataggcatgagtcactgtacccggcctgctctaccgcttttaaggacgcttatgatcacattgcgcctacccagagaacccaggtcgtctttctattttcaggtcagctgattagccaccttagttccatctgcaactttagttcccactggctgtgtaacctaacatagtcacaggctctggggactgtcacgtggacatctttgggaggccgttattctgcccaccgcaccctccgttcatcccctgccctgccgggcacctcgctctaccccaggaaaatgtgagctcgttttcctgctcggcatgtgctccccctaaggctctgctcctccctgggcctgaaagttccttctcagcctgagagggggcccttcggactcaggcatgactcagcccggctgatgcctctgcagtgctgagtcaggatttggggccggctctcttgggtccgtccccttttcccaggtactgccttacaaagctgtggccaggaagtggccggtataaaggatgcccaaggtctttgtacgtgtgtaggagttagcgtgtttgatattgttaatataataataattattttttagagtactgcttttgtatgtatgttgaacaggatccaggtttttatagcttgatataaaacagaattcaaaagtg

SEQ ID NO: 196364 - DNA, 1429 bp, Homo sapiens
  Payload ID: 18745
  Gene Name: tumor necrosis factor, alpha-induced protein 2
  ENST ID: ENST00000560562
  CDS Start-End: 70-363
ggcaccctcgacttgcctagaggcccccaaaagttgcagtccacatcagaggcagagtcagaggcctccatgtcggaggcctcctctgaggacctggtgccacccctggaggctggggcagccccatatagggaggaggaagaggcggcgaagaagaagaaggagaagaagaagaagtccaaaggcctggccaatgtgttctgcgtcttcaccaaagggaagaagaagaagggtcagcccagctcagcggagcccgaggacgcagccgggtccaggcaggggctggatggcccgccccccacaggccaatgtgagggagttgatggaccgagctctggagctagaggcacggcgctgggctgaggatgtgcctccccagaggctggacggccactgccacagcgagctggccatcgacatcatccagatcacctcccaggcccaggccaaggccgagagcatcacgctggacttgggctcacagataaagcgggtgctgctggtggagctgcctgcgttcctgaggagctaccagcgcgcctttaatgaatttctggagagaggcaagcagctgacgaattacagggccaatgttattgccaacatcaacaactgcctgtccttccggatgtccatggagcagaattggcaggtaccccaggacaccctgagcctcctgctgggccccctgggtgagctcaagagccacggctttgacaccctgctccagaacctgcatgaggacctgaagccactgttcaagaggttcacgcacacccgctgggcggcccctgtggagaccctggaaaacatcatcgccactgtagacacgaggctgcctgagttctcagagctgcagggctgtttccgggagggctccccggcgacctggctgcagcctgctctccctacgctggccgagatcattcgcctgcaggaccccagtgccatcaagattgaggtggccacttatgccacctgctaccctgacttcagcaaaggccacctgagcgctatcctggccatcaaggggaacctatccaacagtgaggtcaagcgcatccggagcatcttggacgtcagcatgggggcgcaggagccctcccggcccctattttcccttataaaggttggttagcttttcctgtggcctgacctgcctgtgagtgcccagcaagccttgggcacaccccgctgggagctgttaagagcagcgctggttctcggttcctcccgggtctcctgtgctctgatgctacttctgcctagccctggcggaggtgcaggccctgtcagctggaactggacagaccttggtttgtttacatgtccgatgggggcaggagctcccatcctgggcagccaaccaggcaacaccaaggactctttgtaaacgatagctgatcgtgtgcacgcaaggaaagaacca

SEQ ID NO: 196365 - DNA, 1410 bp, Homo sapiens
  Payload ID: 18745
  Gene Name: tumor necrosis factor, alpha-induced protein 2
  ENST ID: ENST00000559255
  CDS Start-End: 1-731
agccactgttcaagaggttcacgcacacccgctgggcggcccctgtggagaccctggaaaacatcatcgccactgtagacacgaggctgcctgagttctcagagctgcagggctgtttccgggaggagctcatggaggccttgcacctgcacctggtgaaggagtacatcatccaactcagcaaggggcgcctggtcctcaagacggccgagcagcagcagcagctggctgggtacatcctggccaatgctgacaccatccagcacttctgcacccagcacggctccccggcgacctggctgcagcctgctctccctacgctggccgagatcattcgcctgcaggaccccagtgccatcaagattgaggtggccacttatgccacctgctaccctgacttcagcaaaggccacctgagcgctatcctggccatcaaggggaacctatccaacagtgaggtcaagcgcatccggagcatcttggacgtcagcatgggggcgcaggagccctcccggcccctattttcccttataaagcccagggccgccgtgagcgggattcagcaatggtggaatggaagacagaactggaagagaaagaaggaaaagatgagctctcgtctggcaggggcttttagggtcctgtggcgagctgtgagcaccgccagcattagacgtcacatccaggtggccccacggcccctacaggctggccctgcaatggggccctgagccctccctcttcatcccccaaggcctcaactagagggtggtcccccgagggcttggtgtctactaccgaagggcccaagacctcctgggtcctctcaggctcccccttccccaaggcagggacaggccctgggggtgccaccgtgggccctgccacccagaagtctggctgaggtctgggcaggggcagggcaagcttgacctctcactgttgaccctttggcctctgtatttgtttcctattgccgtgacaggtttccacaaacttcgtggatcaaaacgaggtcttccagttctgcgggtcagaaggctgacccggggctcaaatctgggtgtcggcagtcctgcactccttctggaggctctaggggagaattcatttctggccttttcatttttagaggctgaccgtaattcttgacttcaggctcctccatcttcagagccagctgtgggtagttgaatctttttcccgtcacctcattgaggcctcccctctcctgcctccctccaccacttttttttttttttttttgagacagggtcttgctgtgttgcccaggctggagtgcagtggcctggtcatggcatcaaggctcactgcagcctggacctcctggttcaagtgatcctcttgtctcagtcccctgagacaatcccccacgcccagctacatatt

SEQ ID NO: 196366 - DNA, 1799 bp, Homo sapiens
  Payload ID: 18745
  Gene Name: tumor necrosis factor, alpha-induced protein 2
  ENST ID: ENST00000559406
  CDS Start-End: 70-216
ggcaccctcgacttgcctagaggcccccaaaagttgcagtccacatcagaggcagagtcagaggcctccatgtcggaggcctcctctgaggacctggtgccacccctggaggctggggcagccccatatagggaggaggaagaggcggcgaagaagaagaaggagaagaagaagaagtccccgagagcgtctttctgcacttgggccgcaccatgaaggaggacctggaggccgtggtggagcggctgaagccgctgttccccgccgagttcggcgtcgtggcggcctacgccgagagctaccaccagcacttcgcggcccacctggccgccgtggcgcagttcgagctgtgcgagcgcgacacctacatgctgctgctctgggtgcagaacctctaccccaatgacatcatcaacagccccaagctggtgggtgagctgcagggtatggggctcgggagcctcctgccccccaggcagatccgactgctggaggccacattcctgtccagtgaggcggccaatgtgagggagttgatggaccgagctctggagctagaggcacggcgctgggctgaggatgtgcctccccagaggctggacggccactgccacagcgagctggccatcgacatcatccagatcacctcccaggcccaggccaaggccgagagcatcacgctggacttgggctcacagataaagcgggtgctgctggtggagctgcctgcgttcctgaggagctaccagcgcgcctttaatgaatttctggagagaggcaagcagctgacgaattacagggccaatgttattgccaacatcaacaactgcctgtccttccggatgtccatggagcagaattggcaggtaccccaggacaccctgagcctcctgctgggccccctgggtgagctcaagagccacggctttgacaccctgctccagaacctgcatgaggacctgaagccactgttcaagaggttcacgcacacccgctgggcggcccctgtggagaccctggaaaacatcatcgccactgtagacacgaggctgcctgagttctcagagctgcagggctgtttccgggaggagctcatggaggccttgcacctgcacctggtgaaggagtacatcatccaactcagcaaggggcgcctggtcctcaagacggccgagcagcagcagcagctggctgggtacatcctggccaatgctgacaccatccagcacttctgcacccagcacggctccccggcgacctggctgcagcctgctctccctacgctggccgagatcattcgcctgcaggaccccagtgccatcaagattgaggtggccacttatgccacctgctaccctgacttcagcaaaggccacctgagcgctatcctggccatcaaggggaacctatccaacagtgaggtcaagcgcatccggagcatcttggacgtcagcatgggggcgcaggagccctcccggcccctattttcccttataaaggttggttagcttttcctgtggcctgacctgcctgtgagtgcccagcaagccttgggcacaccccgctgggagctgttaagagcagcgctggttctcggttcctcccgggtctcctgtgctctgatgctacttctgcctagccctggcggaggtgcaggccctgtcagctggaactggacagaccttggtttgtttacatgtccgatgggggcaggagctcccatcctgggcagccaaccaggcaacaccaaggactctttgtaaacgatagctgatcgtgtgcacgcaaggaaagaacca

SEQ ID NO: 196367 - DNA, 421 bp, Homo sapiens
  Payload ID: 18745
  Gene Name: tumor necrosis factor, alpha-induced protein 2
  ENST ID: ENST00000558056
  CDS Start-End: 304-421
agtggcggccaggccgggacacgctgcctcggagagcggagacctggggcgaggcccagggggctgcagcaggaccttcaggcgctctgggtttcgtgtcacagaggggagaaggcggtgatgctgtgggggtcctgcgggagctgtgcctggaggagcctgcaggcctgaaccagggtgatgctgaagatgatgaccttcttccaaggcctctagagccatcagcctgtgccaggcaccctcgacttgcctagaggcccccaaaagttgcagtccacatcagaggcagagtcagaggcctccatgtcggaggcctcctctgaggacctggtgccacccctggaggctggggcagccccatatagggaggaggaagaggcggcgaagaagaagaaggagaagaagaagaagtccaaaggcc

SEQ ID NO: 196368 - DNA, 1334 bp, Homo sapiens
  Payload ID: 18745
  Gene Name: tumor necrosis factor, alpha-induced protein 2
  ENST ID: ENST00000560670
  CDS Start-End: 1-1044
gtgcgagcgcgacacctacatgctgctgctctgggtgcagaacctctaccccaagccaatgtgagggagttgatggaccgagctctggagctagaggcacggcgctgggctgaggatgtgcctccccagaggctggacggccactgccacagcgagctggccatcgacatcatccagatcacctcccaggcccaggccaaggccgagagcatcacgctggacttgggctcacagataaagcgggtgctgctggtggagctgcctgcgttcctgaggagctaccagcgcgcctttaatgaatttctggagagaggcaagcagctgacgaattacagggccaatgttattgccaacatcaacaactgcctgtccttccggatgtccatggagcagaattggcaggtaccccaggacaccctgagcctcctgctgggccccctgggtgagctcaagagccacggctttgacaccctgctccagaacctgcatgaggacctgaagccactgttcaagaggttcacgcacacccgctgggcggcccctgtggagaccctggaaaacatcatcgccactgtagacacgaggctgcctgagttctcagagctgcagggctgtttccgggaggagctcatggaggccttgcacctgcacctggtgaaggagtacatcatccaactcagcaaggggcgcctggtcctcaagacggccgagcagcagcagcagctggctgggtacatcctggccaatgctgacaccatccagcacttctgcacccagcacggctccccggcgacctggctgcagcctgctctccctacgctggccgagatcattcgcctgcaggaccccagtgccatcaagattgaggtggccacttatgccacctgctaccctgacttcagcaaaggccacctgagcgctatcctggccatcaaggggaacctatccaacagtgaggtcaagcgcatccggagcatcttggacgtcagcatgggggcgcaggagccctcccggcccctattttcccttataaaggttggttagcttttcctgtggcctgacctgcctgtgagtgcccagcaagccttgggcacaccccgctgggagctgttaagagcagcgctggttctcggttcctcccgggtctcctgtgctctgatgctacttctgcctagccctggcggaggtgcaggccctgtcagctggaactggacagaccttggtttgtttacatgtccgatgggggcaggagctcccatcctgggcagccaaccaggcaacaccaaggactctttgtaaacgatagctgatcgtgtgcacgcaaggaaagaacc

SEQ ID NO: 196369 - DNA, 590 bp, Homo sapiens
  Payload ID: 18745
  Gene Name: tumor necrosis factor, alpha-induced protein 2
  ENST ID: ENST00000561156
  CDS Start-End: 1-200
tgacgaattacagggccaatgttattgccaacatcaacaactgcctgtccttccggatgtccatggagcagaattggcaggtaccccaggacaccctgagcctcctgctgggccccctgggtgagctcaagagccacggctttgacaccctgctccagaacctgcatgaggacctgaagcccttcctctccagggcgtgactagacatcctgcctctcctgtctcagccactgttcaagaggttcacgcacacccgctgggcggcccctgtggagaccctggaaaacatcatcgccactgtagacacgaggctgcctgagttctcagagctgcagggctgtttccgggaggagctcatggaggccttgcacctgcacctggtgaaggagtacatcatccaactcagcaaggggcgcctggtcctcaagacggccgagcagcagcagcagctggctgggtacatcctggccaatgctgacaccatccagcacttctgcacccagcacggctccccggcgacctggctgcagcctgctctccctacgctggccgagatcattcgcctgcaggaccccagtgccatcaagatt

SEQ ID NO: 196370 - DNA, 4432 bp, Homo sapiens
  Payload ID: 18746
  Gene Name: tumor necrosis factor, alpha-induced protein 3
  Uniprot ID: P21580
  ENST ID: ENST00000237289
  CDS Start-End: 67-2439
tgccttgaccaggacttgggactttgcgaaaggatcgcggggcccggagaggtgttggagagcacaatggctgaacaagtccttcctcaggctttgtatttgagcaatatgcggaaagctgtgaagatacgggagagaactccagaagacatttttaaacctactaatgggatcattcatcattttaaaaccatgcaccgatacacactggaaatgttcagaacttgccagttttgtcctcagtttcgggagatcatccacaaagccctcatcgacagaaacatccaggccaccctggaaagccagaagaaactcaactggtgtcgagaagtccggaagcttgtggcgctgaaaacgaacggtgacggcaattgcctcatgcatgccacttctcagtacatgtggggcgttcaggacacagacttggtactgaggaaggcgctgttcagcacgctcaaggaaacagacacacgcaactttaaattccgctggcaactggagtctctcaaatctcaggaatttgttgaaacggggctttgctatgatactcggaactggaatgatgaatgggacaatcttatcaaaatggcttccacagacacacccatggcccgaagtggacttcagtacaactcactggaagaaatacacatatttgtcctttgcaacatcctcagaaggccaatcattgtcatttcagacaaaatgctaagaagtttggaatcaggttccaatttcgcccctttgaaagtgggtggaatttacttgcctctccactggcctgcccaggaatgctacagataccccattgttctcggctatgacagccatcattttgtacccttggtgaccctgaaggacagtgggcctgaaatccgagctgttccacttgttaacagagaccggggaagatttgaagacttaaaagttcactttttgacagatcctgaaaatgagatgaaggagaagctcttaaaagagtacttaatggtgatagaaatccccgtccaaggctgggaccatggcacaactcatctcatcaatgccgcaaagttggatgaagctaacttaccaaaagaaatcaatctggtagatgattactttgaacttgttcagcatgagtacaagaaatggcaggaaaacagcgagcaggggaggagagaggggcacgcccagaatcccatggaaccttccgtgccccagctttctctcatggatgtaaaatgtgaaacgcccaactgccccttcttcatgtctgtgaacacccagcctttatgccatgagtgctcagagaggcggcaaaagaatcaaaacaaactcccaaagctgaactccaagccgggccctgaggggctccctggcatggcgctcggggcctctcggggagaagcctatgagcccttggcgtggaaccctgaggagtccactggggggcctcattcggccccaccgacagcacccagcccttttctgttcagtgagaccactgccatgaagtgcaggagccccggctgccccttcacactgaatgtgcagcacaacggattttgtgaacgttgccacaacgcccggcaacttcacgccagccacgccccagaccacacaaggcacttggatcccgggaagtgccaagcctgcctccaggatgttaccaggacatttaatgggatctgcagtacttgcttcaaaaggactacagcagaggcctcctccagcctcagcaccagcctccctccttcctgtcaccagcgttccaagtcagatccctcgcggctcgtccggagcccctccccgcattcttgccacagagctggaaacgacgcccctgctggctgcctgtctcaagctgcacggactcctggggacaggacggggacgagcaagtgcagaaaagccggctgcgtgtattttgggactccagaaaacaagggcttttgcacactgtgtttcatcgagtacagagaaaacaaacattttgctgctgcctcagggaaagtcagtcccacagcgtccaggttccagaacaccattccgtgcctggggagggaatgcggcacccttggaagcaccatgtttgaaggatactgccagaagtgtttcattgaagctcagaatcagagatttcatgaggccaaaaggacagaagagcaactgagatcgagccagcgcagagatgtgcctcgaaccacacaaagcacctcaaggcccaagtgcgcccgggcctcctgcaagaacatcctggcctgccgcagcgaggagctctgcatggagtgtcagcatcccaaccagaggatgggccctggggcccaccggggtgagcctgcccccgaagacccccccaagcagcgttgccgggcccccgcctgtgatcattttggcaatgccaagtgcaacggctactgcaacgaatgctttcagttcaagcagatgtatggctaaccggaaacaggtgggtcacctcctgcaagaagtggggcctcgagctgtcagtcatcatggtgctatcctctgaacccctcagctgccactgcaacagtgggcttaagggtgtctgagcaggagaggaaagataagctcttcgtggtgcccacgatgctcaggtttggtaacccgggagtgttcccaggtggccttagaaagcaaagcttgtaactggcaagggatgatgtcagattcagcccaaggttcctcctctcctaccaagcaggaggccaggaacttctttggacttggaaggtgtgcggggactggccgaggcccctgcaccctgcgcatcaggactgcttcatcgtcttggctgagaaagggaaaagacacacaagtcgcgtgggttggagaagccagagccattccacctcccctcccccagcatctctcagagatgtgaagccagatcctcatggcagcgaggccctctgcaagaagctcaaggaagctcagggaaaatggacgtattcagagagtgtttgtagttcatggtttttccctacctgcccggttcctttcctgaggacccggcagaaatgcagaaccatccatggactgtgattctgaggctgctgagactgaacatgttcacattgacagaaaaacaagctgctctttataatatgcaccttttaaaaaattagaatattttactgggaagacgtgtaactctttgggttattactgtctttacttctaaagaagttagcttgaactgaggagtaaaagtgtgtacatatataatatacccttacattatgtatgagggatttttttaaattatattgaaatgctgccctagaagtacaataggaaggctaaataataataacctgttttctggttgttgttggggcatgagcttgtgtatacactgcttgcataaactcaaccagctgcctttttaaagggagctctagtcctttttgtgtaattcactttatttattttattacaaacttcaagattatttaagtgaagatatttcttcagctctggggaaaatgccacagtgttctcctgagagaacatccttgctttgagtcaggctgtgggcaagttcctgaccacagggagtaaattggcctctttgatacacttttgcttgcctccccaggaaagaaggaattgcatccaaggtatacatacatattcatcgatgtttcgtgcttctccttatgaaactccagctatgtaataaaaaactatactctgtgttctgttaatgcctctgagtgtcctacctccttggagatgagatagggaaggagcagggatgagactggcaatggtcacagggaaagatgtggccttttgtgatggttttattttctgttaacactgtgtcctgggggggctgggaagtcccctgcatcccatggtaccctggtattgggacagcaaaagccagtaaccatgagtatgaggaaatctctttctgttgctggcttacagtttctctgtgtgctttgtggttgctgtcatatttgctctagaagaaaaaaaaaaaaggaggggaaatgcattttccccagagataaaggctgccattttgggggtctgtacttatggcctgaaaatatttgtgatccataactctacacagcctttactcatactattaggcacactttccccttagagccccctaagtttttcccagacgaatctttataatttctttccaaagataccaaataaacttcagtgttttcatctaattctcttaaagttgatatcttaatattttgtgttgatcattatttccattcttaatgtgaaaaaaagtaattatttatacttattataaaaagtatttgaaatttgcacatttaattgtccctaatagaaagccacctattctttgttggatttcttcaagtttttctaaataaatgtaacttttcacaagagtcaacattaaaaaataaattatttaagaaca

SEQ ID NO: 196371 - DNA, 421 bp, Homo sapiens
  Payload ID: 18746
  Gene Name: tumor necrosis factor, alpha-induced protein 3
  ENST ID: ENST00000421450
  CDS Start-End: 345-421
gggcctacaacccgcatacaactgaaacggggcaaagcagactgcgcagtctgcagtcttcgtggcgggccaagcgagcttggagcccgcgggggcggagcggtgagagcggccgccaagagagatcacacccccagccgaccctgccagcgagcgagcccgaccccaggcgtccatggagcgtcgcctccgcccggtccctgccccgacccccgcctgcggcgcgctcctgccttgaccaggacttgggactttgcgaaaggatcgcggggcccggagaggtaaccgccgcgcctcccggagaggtaaccgccgcgcctcccggagaggtgttggagagcacaatggctgaacaagtccttcctcaggctttgtatttgagcaatatgcggaaagctgtgaagatacgggagagaactcc

SEQ ID NO: 196372 - DNA, 698 bp, Homo sapiens
  Payload ID: 18746
  Gene Name: tumor necrosis factor, alpha-induced protein 3
  ENST ID: ENST00000420009
  CDS Start-End: 213-698
gcggccgccaagagagatcacacccccagccgaccctgccagcgagcgagcccgaccccaggcgtccatggagcgtcgcctccgcccggtccctgccccgacccccgcctgcggcgcgctcctgccttgaccaggacttgggactttgcgaaaggatcgcggggcccggagaggtaaccgccgcgcctcccggagaggtgttggagagcacaatggctgaacaagtccttcctcaggctttgtatttgagcaatatgcggaaagctgtgaagatacgggagagaactccagaagacatttttaaacctactaatgggatcattcatcattttaaaaccatgcaccgatacacactggaaatgttcagaacttgccagttttgtcctcagtttcgggagatcatccacaaagccctcatcgacagaaacatccaggccaccctggaaagccagaagaaactcaactggtgtcgagaagtccggaagcttgtggcgctgaaaacgaacggtgacggcaattgcctcatgcatgccacttctcagtacatgtggggcgttcaggacacagacttggtactgaggaaggcgctgttcagcacgctcaaggaaacagacacacgcaactttaaattccgctggcaactggagtctctcaaatctcaggaatttgttgaaacggggctttgctatgatactcgg

SEQ ID NO: 196373 - DNA, 465 bp, Homo sapiens
  Payload ID: 18746
  Gene Name: tumor necrosis factor, alpha-induced protein 3
  ENST ID: ENST00000433680
  CDS Start-End: 171-465
accgcagtcaagggctgcgggtgcatgttgggcagcgacccccgggctggcaccgtctacctggcgttggttttgcagcgctcctggactgggagtttgttggacgtttctgtctgggttttgaagtgctgggagttgaggtcactgctgcagaggtgttggagagcacaatggctgaacaagtccttcctcaggctttgtatttgagcaatatgcggaaagctgtgaagatacgggagagaactccagaagacatttttaaacctactaatgggatcattcatcattttaaaaccatgcaccgatacacactggaaatgttcagaacttgccagttttgtcctcagtttcgggagatcatccacaaagccctcatcgacagaaacatccaggccaccctggaaagccagaagaaactcaactggtgtcgagaagtccggaagcttgtggcgctgaaaacgaacg

SEQ ID NO: 196374 - DNA, 2267 bp, Homo sapiens
  Payload ID: 18746
  Gene Name: tumor necrosis factor, alpha-induced protein 3
  ENST ID: ENST00000619035
  CDS Start-End: 18-2267
aggtgttggagagcacaatggctgaacaagtccttcctcaggctttgtatttgagcaatatgcggaaagctgtgaagatacgggagagaactccagaagacatttttaaacctactaatgggatcattcatcattttaaaaccatgcaccgatacacactggaaatgttcagaacttgccagttttgtcctcagtttcgggagatcatccacaaagccctcatcgacagaaacatccaggccaccctggaaagccagaagaaactcaactggtgtcgagaagtccggaagcttgtggcgctgaaaacgaacggtgacggcaattgcctcatgcatgccacttctcagtacatgtggggcgttcaggacacagacttggtactgaggaaggcgctgttcagcacgctcaaggaaacagacacacgcaactttaaattccgctggcaactggagtctctcaaatctcaggaatttgttgaaacggggctttgctatgatactcggaactggaatgatgaatgggacaatcttatcaaaatggcttccacagacacacccatggcccgaagtggacttcagtacaactcactggaagaaatacacatatttgtcctttgcaacatcctcagaaggccaatcattgtcatttcagacaaaatgctaagaagtttggaatcaggttccaatttcgcccctttgaaagtgggtggaatttacttgcctctccactggcctgcccaggaatgctacagataccccattgttctcggctatgacagccatcattttgtacccttggtgaccctgaaggacagtgggcctgaaatccgagctgttccacttgttaacagagaccggggaagatttgaagacttaaaagttcactttttgacagatcctgaaaatgagatgaaggagaagctcttaaaagagtacttaatggtgatagaaatccccgtccaaggctgggaccatggcacaactcatctcatcaatgccgcaaagttggatgaagctaacttaccaaaagaaatcaatctggtagatgattactttgaacttgttcagcatgagtacaagaaatggcaggaaaacagcgagcaggggaggagagaggggcacgcccagaatcccatggaaccttccgtgccccagctttctctcatggatgtaaaatgtgaaacgcccaactgccccttcttcatgtctgtgaacacccagcctttatgccatgagtgctcagagaggcggcaaaagaatcaaaacaaactcccaaagctgaactccaagccgggccctgaggggctccctggcatggcgctcggggcctctcggggagaagcctatgagcccttggcgtggaaccctgaggagtccactggggggcctcattcggccccaccgacagcacccagcccttttctgttcagtgagaccactgccatgaagtgcaggagccccggctgccccttcacactgaatgtgcagcacaacggattttgtgaacgttgccacaacgcccggcaacttcacgccagccacgccccagaccacacaaggcacttggatcccgggaagtgccaagcctgcctccaggatgttaccaggacatttaatgggatctgcagtacttgcttcaaaaggactacagcagaggcctcctccagcctcagcaccagcctccctccttcctgtcaccagcgttccaagtcagatccctcgcggctcgtccggagcccctccccgcattcttgccacagagctggaaacgacgcccctgctggctgcctgtctcaagctgcacggactcctggggacaggacggggacgagcaagtgcagaaaagccggctgcgtgtattttgggactccagaaaacaagggcttttgcacactgtgtttcatcgagtacagagaaaacaaacattttgctgctgcctcagggaaagtcagtcccacagcgtccaggttccagaacaccattccgtgcctggggagggaatgcggcacccttggaagcaccatgtttgaaggatactgccagaagtgtttcattgaagctcagaatcagagatttcatgaggccaaaaggacagaagagcaactgagatcgagccagcgcagagatgtgcctcgaaccacacaaagcacctcaaggcccaagtgcgcccgggcctcctgcaagaacatcctggcctgccgcagcgaggagctctgcatggagtgtcagcatcaaccagaggatgggccctggggcccaccggggtga

SEQ ID NO: 196375 - DNA, 3818 bp, Homo sapiens
  Payload ID: 18746
  Gene Name: tumor necrosis factor, alpha-induced protein 3
  ENST ID: ENST00000615468
  CDS Start-End: 18-662
aggtgttggagagcacaatggctgaacaagtccttcctcaggctttgtatttgagcaatatgcggaaagctgtgaagatacgggagagaactccagaagacatttttaaacctactaatgggatcattcatcattttaaaaccatgcaccgatacacactggaaatgttcagaacttgccagttttgtcctcagtttcgggagatcatccacaaagccctcatcgacagaaacatccaggccaccctggaaagccagaagaaactcaactggtgtcgagaagtccggaagcttgtggcgctgaaaacgaacggtgacggcaattgcctcatgcatgccacttctcagtacatgtggggcgttcaggacacagacttggtactgaggaaggcgctgttcagcacgctcaaggaaacagacacacgcaactttaaattccgctggcaactggagtctctcaaatctcaggaatttgttgaaacggggctttgctatgatactcggaactggaatgatgaatgggacaatcttatcaaatggcttccacagacacacccatggcccgaagtggacttcagtacaactcactggaagaaatacacatatttgtcctttgcaacatcctcagaaggccaatcattgtcatttcagacaaaatgctaagaagtttggaatcaggttccaatttcgcccctttgaaagtgggtggaatttacttgcctctccactggcctgcccaggaatgctacagataccccattgttctcggctatgacagccatcattttgtacccttggtgaccctgaaggacagtgggcctgaaatccgagctgttccacttgttaacagagaccggggaagatttgaagacttaaaagttcactttttgacagatcctgaaaatgagatgaaggagaagctcttaaaagagtacttaatggtgatagaaatccccgtccaaggctgggaccatggcacaactcatctcatcaatgccgcaaagttggatgaagctaacttaccaaaagaaatcaatctggtagatgattactttgaacttgttcagcatgagtacaagaaatggcaggaaaacagcgagcaggggaggagagaggggcacgcccagaatcccatggaaccttccgtgccccagctttctctcatggatgtaaaatgtgaaacgcccaactgccccttcttcatgtctgtgaacacccagcctttatgccatgagtgctcagagaggcggcaaaagaatcaaaacaaactcccaaagctgaactccaagccgggccctgaggggctccctggcatggcgctcggggcctctcggggagaagcctatgagcccttggcgtggaaccctgaggagtccactggggggcctcattcggccccaccgacagcacccagcccttttctgttcagtgagaccactgccatgaagtgcaggagccccggctgccccttcacactgaatgtgcagcacaacggattttgtgaacgttgccacaacgcccggcaacttcacgccagccacgccccagaccacacaaggcacttggatcccgggaagtgccaagcctgcctccaggatgttaccaggacatttaatgggatctgcagtacttgcttcaaaaggactacagcagaggcctcctccagcctcagcaccagcctccctccttcctgtcaccagcgttccaagtcagatccctcgcggctcgtccggagcccctccccgcattcttgccacagagctggaaacgacgcccctgctggctgcctgtctcaagctgcacggactcctggggacaggacggggacgagcaagtgcagaaaagccggctgcgtgtattttgggactccagaaaacaagggcttttgcacactgtgtttcatcgagtacagagaaaacaaacattttgctgctgcctcagggaaagtcagtcccacagcgtccaggttccagaacaccattccgtgcctggggagggaatgcggcacccttggaagcaccatgtttgaaggatactgccagaagtgtttcattgaagctcagaatcagagatttcatgaggccaaaaggacagaagagcaactgagatcgagccagcgcagagatgtgcctcgaaccacacaaagcacctcaaggcccaagtgcgcccgggcctcctgcaagaacatcctggcctgccgcagcgaggagctctgcatggagtgtcagcatcccaaccagaggatgggccctggggcccaccggggtgagcctgcccccgaagacccccccaagcagcgttgccgggcccccgcctgtgatcattttggcaatgccaagtgcaacggctactgcaacgaatgctttcagttcaagcagatgtatggctaaccggaaacaggtgggtcacctcctgcaagaagtggggcctcgagctgtcagtcatcatggtgctatcctctgaacccctcagctgccactgcaacagtgggcttaagggtgtctgagcaggagaggaaagataagctcttcgtggtgcccacgatgctcaggtttggtaacccgggagtgttcccaggtggccttagaaagcaaagcttgtaactggcaagggatgatgtcagattcagcccaaggttcctcctctcctaccaagcaggaggccaggaacttctttggacttggaaggtgtgcggggactggccgaggcccctgcaccctgcgcatcaggactgcttcatcgtcttggctgagaaagggaaaagacacacaagtcgcgtgggttggagaagccagagccattccacctcccctcccccagcatctctcagagatgtgaagccagatcctcatggcagcgaggccctctgcaagaagctcaaggaagctcagggaaaatggacgtattcagagagtgtttgtagttcatggtttttccctacctgcccggttcctttcctgaggacccggcagaaatgcagaaccatccatggactgtgattctgaggctgctgagactgaacatgttcacattgacagaaaaacaagctgctctttataatatgcaccttttaaaaaattagaatattttactgggaagacgtgtaactctttgggttattactgtctttacttctaaagaagttagcttgaactgaggagtaaaagtgtgtacatatataatatacccttacattatgtatgagggatttttttaaattatattgaaatgctgccctagaagtacaataggaaggctaaataataataacctgttttctggttgttgttggggcatgagcttgtgtatacactgcttgcataaactcaaccagctgcctttttaaagggagctctagtcctttttgtgtaattcactttatttattttattacaaacttcaagattatttaagtgaagatatttcttcagctctggggaaaatgccacagtgttctcctgagagaacatccttgctttgagtcaggctgtgggcaagttcctgaccacagggagtaaattggcctctttgatacacttttgcttgcctccccaggaaagaaggaattgcatccaaggtatacatacatattcatcgatgtttcgtgcttctccttatgaaactccagctatgtaataaaaaactatactctgtgttctgttaatgcctctgagtgtcctacctccttggagatgagatagggaaggagcagggatgagactggcaatggtcacagggaaagatgtggccttttgtgatggttttattttctgttaacactgtgtcctgggggggctgggaagtcccctgcatcccatg

SEQ ID NO: 196376 - DNA, 1430 bp, Homo sapiens
  Payload ID: 18746
  Gene Name: tumor necrosis factor, alpha-induced protein 3
  ENST ID: ENST00000614035
  CDS Start-End: 18-1430
aggtgttggagagcacaatggctgaacaagtccttcctcaggctttgtatttgagcaatatgcggaaagctgtgaagatacgggagagaactccagaagacatttttaaacctactaatgggatcattcatcattttaaaaccatgcaccgatacacactggaaatgttcagaacttgccagttttgtcctcagtttcgggagatcatccacaaagccctcatcgacagaaacatccaggccaccctggaaagccagaagaaactcaactggtgtcgagaagtccggaagcttgtggcgctgaaaacgaacggtgacggcaattgcctcatgcatgccacttctcagtacatgtggggcgttcaggacacagacttggtactgaggaaggcgctgttcagcacgctcaaggaaacagacacacgcaactttaaattccgctggcaactggagtctctcaaatctcaggaatttgttgaaacggggctttgctatgatactcggaactggaatgatgaatgggacaatcttatcaaaatggcttccacagacacacccatggcccgaagtggacttcagtacaactcactggaagaaatacacatatttgtcctttgcaacatcctcagaaggccaatcattgtcatttcagacaaaatgctaagaagtttggaatcaggttccaatttcgcccctttgaaagtgggtggaatttacttgcctctccactggcctgcccaggaatgctacagataccccattgttctcggctatgacagccatcattttgtacccttggtgaccctgaaggacagtgggcctgaaatccgagctgttccacttgttaacagagaccggggaagatttgaagacttaaaagttcactttttgacagatcctgaaaatgagatgaaggagaagctcttaaaagagtacttaatggtgatagaaatccccgtccaaggctgggaccatggcacaactcatctcatcaatgccgcaaagttggatgaagctaacttaccaaaagaaatcaatctggtagatgattactttgaacttgttcagcatgagtacaagaaatggcaggaaaacagcgagcaggggaggagagaggggcacgcccagaatcccatggaaccttccgtgccccagctttctctcatggatgtaaaatgtgaaacgcccaactgccccttcttcatgtctgtgaacacccagcctttatgccatgagtgctcagagaggcggcaaaagaatcaaaacaaactcccaaagctgaactccaagccgggccctgaggggctccctggcatggcgctcggggcctctcggggagaagcctatgagcccttggcgtggaaccctgaggagtccactggggggtcattcggccccaccgacagcacccagcccttttctgttcagtga

SEQ ID NO: 196377 - DNA, 3817 bp, Homo sapiens
  Payload ID: 18746
  Gene Name: tumor necrosis factor, alpha-induced protein 3
  ENST ID: ENST00000620204
  CDS Start-End: 18-2027
aggtgttggagagcacaatggctgaacaagtccttcctcaggctttgtatttgagcaatatgcggaaagctgtgaagatacgggagagaactccagaagacatttttaaacctactaatgggatcattcatcattttaaaaccatgcaccgatacacactggaaatgttcagaacttgccagttttgtcctcagtttcgggagatcatccacaaagccctcatcgacagaaacatccaggccaccctggaaagccagaagaaactcaactggtgtcgagaagtccggaagcttgtggcgctgaaaacgaacggtgacggcaattgcctcatgcatgccacttctcagtacatgtggggcgttcaggacacagacttggtactgaggaaggcgctgttcagcacgctcaaggaaacagacacacgcaactttaaattccgctggcaactggagtctctcaaatctcaggaatttgttgaaacggggctttgctatgatactcggaactggaatgatgaatgggacaatcttatcaaaatggcttccacagacacacccatggcccgaagtggacttcagtacaactcactggaagaaatacacatatttgtcctttgcaacatcctcagaaggccaatcattgtcatttcagacaaaatgctaagaagtttggaatcaggttccaatttcgcccctttgaaagtgggtggaatttacttgcctctccactggcctgcccaggaatgctacagataccccattgttctcggctatgacagccatcattttgtacccttggtgaccctgaaggacagtgggcctgaaatccgagctgttccacttgttaacagagaccggggaagatttgaagacttaaaagttcactttttgacagatcctgaaaatgagatgaaggagaagctcttaaaagagtacttaatggtgatagaaatccccgtccaaggctgggaccatggcacaactcatctcatcaatgccgcaaagttggatgaagctaacttaccaaaagaaatcaatctggtagatgattactttgaacttgttcagcatgagtacaagaaatggcaggaaaacagcgagcaggggaggagagaggggcacgcccagaatcccatggaaccttccgtgccccagctttctctcatggatgtaaaatgtgaaacgcccaactgccccttcttcatgtctgtgaacacccagcctttatgccatgagtgctcagagaggcggcaaaagaatcaaaacaaactcccaaagctgaactccaagccgggccctgaggggctccctggcatggcgctcggggcctctcggggagaagcctatgagcccttggcgtggaaccctgaggagtccactggggggcctcattcggccccaccgacagcacccagcccttttctgttcagtgagaccactgccatgaagtgcaggagccccggctgccccttcacactgaatgtgcagcacaacggattttgtgaacgttgccacaacgcccggcaacttcacgccagccacgccccagaccacacaaggcacttggatcccgggaagtgccaagcctgcctccaggatgttaccaggacatttaatgggatctgcagtacttgcttcaaaaggactacagcagaggcctcctccagcctcagcaccagcctccctccttcctgtcaccagcgttccaagtcagatccctcgcggctcgtccggagcccctccccgcattcttgccacagagctggaaacgacgcccctgctggctgcctgtctcaagctgcacggactcctggggacaggacggggacgagcaagtgcagaaaagccggctgcgtgtattttgggactccagaaaacaagggcttttgcacactgtttcatcgagtacagagaaaacaaacattttgctgctgcctcagggaaagtcagtcccacagcgtccaggttccagaacaccattccgtgcctggggagggaatgcggcacccttggaagcaccatgtttgaaggatactgccagaagtgtttcattgaagctcagaatcagagatttcatgaggccaaaaggacagaagagcaactgagatcgagccagcgcagagatgtgcctcgaaccacacaaagcacctcaaggcccaagtgcgcccgggcctcctgcaagaacatcctggcctgccgcagcgaggagctctgcatggagtgtcagcatcccaaccagaggatgggccctggggcccaccggggtgagcctgcccccgaagacccccccaagcagcgttgccgggcccccgcctgtgatcattttggcaatgccaagtgcaacggctactgcaacgaatgctttcagttcaagcagatgtatggctaaccggaaacaggtgggtcacctcctgcaagaagtggggcctcgagctgtcagtcatcatggtgctatcctctgaacccctcagctgccactgcaacagtgggcttaagggtgtctgagcaggagaggaaagataagctcttcgtggtgcccacgatgctcaggtttggtaacccgggagtgttcccaggtggccttagaaagcaaagcttgtaactggcaagggatgatgtcagattcagcccaaggttcctcctctcctaccaagcaggaggccaggaacttctttggacttggaaggtgtgcggggactggccgaggcccctgcaccctgcgcatcaggactgcttcatcgtcttggctgagaaagggaaaagacacacaagtcgcgtgggttggagaagccagagccattccacctcccctcccccagcatctctcagagatgtgaagccagatcctcatggcagcgaggccctctgcaagaagctcaaggaagctcagggaaaatggacgtattcagagagtgtttgtagttcatggtttttccctacctgcccggttcctttcctgaggacccggcagaaatgcagaaccatccatggactgtgattctgaggctgctgagactgaacatgttcacattgacagaaaaacaagctgctctttataatatgcaccttttaaaaaattagaatattttactgggaagacgtgtaactctttgggttattactgtctttacttctaaagaagttagcttgaactgaggagtaaaagtgtgtacatatataatatacccttacattatgtatgagggatttttttaaattatattgaaatgctgccctagaagtacaataggaaggctaaataataataacctgttttctggttgttgttggggcatgagcttgtgtatacactgcttgcataaactcaaccagctgcctttttaaagggagctctagtcctttttgtgtaattcactttatttattttattacaaacttcaagattatttaagtgaagatatttcttcagctctggggaaaatgccacagtgttctcctgagagaacatccttgctttgagtcaggctgtgggcaagttcctgaccacagggagtaaattggcctctttgatacacttttgcttgcctccccaggaaagaaggaattgcatccaaggtatacatacatattcatcgatgtttcgtgcttctccttatgaaactccagctatgtaataaaaaactatactctgtgttctgttaatgcctctgagtgtcctacctccttggagatgagatagggaaggagcagggatgagactggcaatggtcacagggaaagatgtggccttttgtgatggttttattttctgttaacactgtgtcctgggggggctgggaagtcccctgcatcccatg

SEQ ID NO: 196378 - DNA, 4735 bp, Homo sapiens
  Payload ID: 18746
  Gene Name: tumor necrosis factor, alpha-induced protein 3
  Uniprot ID: P21580
  ENST ID: ENST00000612899
  CDS Start-End: 371-2743
ctttggaaagtcccgtggaaatccccgggcctacaacccgcatacaactgaaacggggcaaagcagactgcgcagtctgcagtcttcgtggcgggccaagcgagcttggagcccgcgggggcggagcggtgagagcggccgccaagagagatcacacccccagccgaccctgccagcgagcgagcccgaccccaggcgtccatggagcgtcgcctccgcccggtccctgccccgacccccgcctgcggcgcgctcctgccttgaccaggacttgggactttgcgaaaggatcgcggggcccggagaggtaaccgccgcgcctcccggagaggtaaccgccgcgcctcccggagaggtgttggagagcacaatggctgaacaagtccttcctcaggctttgtatttgagcaatatgcggaaagctgtgaagatacgggagagaactccagaagacatttttaaacctactaatgggatcattcatcattttaaaaccatgcaccgatacacactggaaatgttcagaacttgccagttttgtcctcagtttcgggagatcatccacaaagccctcatcgacagaaacatccaggccaccctggaaagccagaagaaactcaactggtgtcgagaagtccggaagcttgtggcgctgaaaacgaacggtgacggcaattgcctcatgcatgccacttctcagtacatgtggggcgttcaggacacagacttggtactgaggaaggcgctgttcagcacgctcaaggaaacagacacacgcaactttaaattccgctggcaactggagtctctcaaatctcaggaatttgttgaaacggggctttgctatgatactcggaactggaatgatgaatgggacaatcttatcaaaatggcttccacagacacacccatggcccgaagtggacttcagtacaactcactggaagaaatacacatatttgtcctttgcaacatcctcagaaggccaatcattgtcatttcagacaaaatgctaagaagtttggaatcaggttccaatttcgcccctttgaaagtgggtggaatttacttgcctctccactggcctgcccaggaatgctacagataccccattgttctcggctatgacagccatcattttgtacccttggtgaccctgaaggacagtgggcctgaaatccgagctgttccacttgttaacagagaccggggaagatttgaagacttaaaagttcactttttgacagatcctgaaaatgagatgaaggagaagctcttaaaagagtacttaatggtgatagaaatccccgtccaaggctgggaccatggcacaactcatctcatcaatgccgcaaagttggatgaagctaacttaccaaaagaaatcaatctggtagatgattactttgaacttgttcagcatgagtacaagaaatggcaggaaaacagcgagcaggggaggagagaggggcacgcccagaatcccatggaaccttccgtgccccagctttctctcatggatgtaaaatgtgaaacgcccaactgccccttcttcatgtctgtgaacacccagcctttatgccatgagtgctcagagaggcggcaaaagaatcaaaacaaactcccaaagctgaactccaagccgggccctgaggggctccctggcatggcgctcggggcctctcggggagaagcctatgagcccttggcgtggaaccctgaggagtccactggggggcctcattcggccccaccgacagcacccagcccttttctgttcagtgagaccactgccatgaagtgcaggagccccggctgccccttcacactgaatgtgcagcacaacggattttgtgaacgttgccacaacgcccggcaacttcacgccagccacgccccagaccacacaaggcacttggatcccgggaagtgccaagcctgcctccaggatgttaccaggacatttaatgggatctgcagtacttgcttcaaaaggactacagcagaggcctcctccagcctcagcaccagcctccctccttcctgtcaccagcgttccaagtcagatccctcgcggctcgtccggagcccctccccgcattcttgccacagagctggaaacgacgcccctgctggctgcctgtctcaagctgcacggactcctggggacaggacggggacgagcaagtgcagaaaagccggctgcgtgtattttgggactccagaaaacaagggcttttgcacactgtgtttcatcgagtacagagaaaacaaacattttgctgctgcctcagggaaagtcagtcccacagcgtccaggttccagaacaccattccgtgcctggggagggaatgcggcacccttggaagcaccatgtttgaaggatactgccagaagtgtttcattgaagctcagaatcagagatttcatgaggccaaaaggacagaagagcaactgagatcgagccagcgcagagatgtgcctcgaaccacacaaagcacctcaaggcccaagtgcgcccgggcctcctgcaagaacatcctggcctgccgcagcgaggagctctgcatggagtgtcagcatcccaaccagaggatgggccctggggcccaccggggtgagcctgcccccgaagacccccccaagcagcgttgccgggcccccgcctgtgatcattttggcaatgccaagtgcaacggctactgcaacgaatgctttcagttcaagcagatgtatggctaaccggaaacaggtgggtcacctcctgcaagaagtggggcctcgagctgtcagtcatcatggtgctatcctctgaacccctcagctgccactgcaacagtgggcttaagggtgtctgagcaggagaggaaagataagctcttcgtggtgcccacgatgctcaggtttggtaacccgggagtgttcccaggtggccttagaaagcaaagcttgtaactggcaagggatgatgtcagattcagcccaaggttcctcctctcctaccaagcaggaggccaggaacttctttggacttggaaggtgtgcggggactggccgaggcccctgcaccctgcgcatcaggactgcttcatcgtcttggctgagaaagggaaaagacacacaagtcgcgtgggttggagaagccagagccattccacctcccctcccccagcatctctcagagatgtgaagccagatcctcatggcagcgaggccctctgcaagaagctcaaggaagctcagggaaaatggacgtattcagagagtgtttgtagttcatggtttttccctacctgcccggttcctttcctgaggacccggcagaaatgcagaaccatccatggactgtgattctgaggctgctgagactgaacatgttcacattgacagaaaaacaagctgctctttataatatgcaccttttaaaaaattagaatattttactgggaagacgtgtaactctttgggttattactgtctttacttctaaagaagttagcttgaactgaggagtaaaagtgtgtacatatataatatacccttacattatgtatgagggatttttttaaattatattgaaatgctgccctagaagtacaataggaaggctaaataataataacctgttttctggttgttgttggggcatgagcttgtgtatacactgcttgcataaactcaaccagctgcctttttaaagggagctctagtcctttttgtgtaattcactttatttattttattacaaacttcaagattatttaagtgaagatatttcttcagctctggggaaaatgccacagtgttctcctgagagaacatccttgctttgagtcaggctgtgggcaagttcctgaccacagggagtaaattggcctctttgatacacttttgcttgcctccccaggaaagaaggaattgcatccaaggtatacatacatattcatcgatgtttcgtgcttctccttatgaaactccagctatgtaataaaaaactatactctgtgttctgttaatgcctctgagtgtcctacctccttggagatgagatagggaaggagcagggatgagactggcaatggtcacagggaaagatgtggccttttgtgatggttttattttctgttaacactgtgtcctgggggggctgggaagtcccctgcatcccatggtaccctggtattgggacagcaaaagccagtaaccatgagtatgaggaaatctctttctgttgctggcttacagtttctctgtgtgctttgtggttgctgtcatatttgctctagaagaaaaaaaaaaaaggaggggaaatgcattttccccagagataaaggctgccattttgggggtctgtacttatggcctgaaaatatttgtgatccataactctacacagcctttactcatactattaggcacactttccccttagagccccctaagtttttcccagacgaatctttataatttctttccaaagataccaaataaacttcagtgttttcatctaattctcttaaagttgatatcttaatattttgtgttgatcattatttccattcttaatgtgaaaaaaagtaattatttatacttattataaaaagtatttgaaatttgcacatttaattgtccctaatagaaagccacctattctttgttggatttcttcaagtttttctaaataaatgtaacttttcacaagagtcaacattaaaaaataaattatttaagaac

SEQ ID NO: 196379 - DNA, 1613 bp, Homo sapiens
  Payload ID: 18746
  Gene Name: tumor necrosis factor, alpha-induced protein 3
  ENST ID: ENST00000621150
  CDS Start-End: 18-1613
aggtgttggagagcacaatggctgaacaagtccttcctcaggctttgtatttgagcaatatgcggaaagctgtgaagatacgggagagaactccagaagacatttttaaacctactaatgggatcattcatcattttaaaaccatgcaccgatacacactggaaatgttcagaacttgccagttttgtcctcagtttcgggagatcatccacaaagccctcatcgacagaaacatccaggccaccctggaaagccagaagaaactcaactggtgtcgagaagtccggaagcttgtggcgctgaaaacgaacggtgacggcaattgcctcatgcatgccacttctcagtacatgtggggcgttcaggacacagacttggtactgaggaaggcgctgttcagcacgctcaaggaaacagacacacgcaactttaaattccgctggcaactggagtctctcaaatctcaggaatttgttgaaacggggctttgctatgatactcggaactggaatgatgaatgggacaatcttatcaaaatggcttccacagacacacccatggcccgaagtggacttcagtacaactcactggaagaaatacacatatttgtcctttgcaacatcctcagaaggccaatcattgtcatttcagacaaaatgctaagaagtttggaatcaggttccaatttcgcccctttgaaagtgggtggaatttacttgcctctccactggcctgcccaggaatgctacagataccccattgttctcggctatgacagccatcattttgtacccttggtgaccctgaaggacagtgggcctgaaatccgagctgttccacttgttaacagagaccggggaagatttgaagacttaaaagttcactttttgacagatcctgaaaatgagatgaaggagaagctcttaaaagagtacttaatggtgatagaaatccccgtccaaggctgggaccatggcacaactcatctcatcaatgccgcaaagttggatgaagctaacttaccaaaagaaatcaatctggtagatgattactttgaacttgttcagcatgagtacaagaaatggcaggaaaacagcgagcaggggaggagagaggggcacgcccagaatcccatggaaccttccgtgccccagctttctctcatggatgtaaaatgtgaaacgcccaactgccccttcttcatgtctgtgaacacccagcctttatgccatgagtgctcagagaggcggcaaaagaatcaaaacaaactcccaaagctgaactccaagccgggccctgaggggctccctggcatggcgctcggggcctctcggggagaagcctatgagcccttggcgtggaaccctgaggagtccactggggggcctcattcggccccaccgacagcacccagcccttttctgttcagtgagaccactgccatgaagtgcaggagccccggctgccccttcacactgaatgtgcagcacaacggattttgtgaacgttgccacaacgcccggcaacttcgccagccacgccccagaccacacaaggcacttggatcccgggaagtgccaagcctgcctccaggatgttaccaggacatttaa

SEQ ID NO: 196380 - DNA, 1424 bp, Homo sapiens
  Payload ID: 18747
  Gene Name: tumor necrosis factor, alpha-induced protein 6
  Uniprot ID: P98066
  ENST ID: ENST00000243347
  CDS Start-End: 76-909
agtcacatttcagccactgctctgagaatttgtgagcagcccctaacaggctgttacttcactacaactgacgatatgatcatcttaatttacttatttctcttgctatgggaagacactcaaggatggggattcaaggatggaatttttcataactccatatggcttgaacgagcagccggtgtgtaccacagagaagcacggtctggcaaatacaagctcacctacgcagaagctaaggcggtgtgtgaatttgaaggcggccatctcgcaacttacaagcagctagaggcagccagaaaaattggatttcatgtctgtgctgctggatggatggctaagggcagagttggataccccattgtgaagccagggcccaactgtggatttggaaaaactggcattattgattatggaatccgtctcaataggagtgaaagatgggatgcctattgctacaacccacacgcaaaggagtgtggtggcgtctttacagatccaaagcaaatttttaaatctccaggcttcccaaatgagtacgaagataaccaaatctgctactggcacattagactcaagtatggtcagcgtattcacctgagttttttagattttgaccttgaagatgacccaggttgcttggctgattatgttgaaatatatgacagttacgatgatgtccatggctttgtgggaagatactgtggagatgagcttccagatgacatcatcagtacaggaaatgtcatgaccttgaagtttctaagtgatgcttcagtgacagctggaggtttccaaatcaaatatgttgcaatggatcctgtatccaaatccagtcaaggaaaaaatacaagtactacttctactggaaataaaaactttttagctggaagatttagccacttataaaaaaaaaaaaaaggatgatcaaaacacacagtgtttatgttggaatcttttggaactcctttgatctcactgttattattaacatttatttattatttttctaaatgtgaaagcaatacataatttagggaaaattggaaaatataggaaactttaaacgagaaaatgaaacctctcataatcccactgcatagaaataacaagcgttaacattttcatatttttttctttcagtcatttttctatttgtggtatatgtatatatgtacctatatgtatttgcatttgaaattttggaatcctgctctatgtacagttttgtattatactttttaaatcttgaactttataaacattttctgaaatcattgattattctacaaaaacatgattttaaacagctgtaaaatattctatgatatgaatgttttatgcattatttaagcctgtctctattgttggaatttcaggtcattttcataaatattgttgcaataaatatccttgaacacaca

SEQ ID NO: 196381 - DNA, 795 bp, Homo sapiens
  Payload ID: 18748
  Gene Name: tumor necrosis factor, alpha-induced protein 8
  Uniprot ID: O95379
  ENST ID: ENST00000274456
  CDS Start-End: 216-782
gacctcccggctcctccccggcctgcccgccacacccttggtccctcctgcaagttccgcccctggcctctgcctccttttctcccgccggctctaacccgcgcttggctaaggtccgcgggaacccgtgagccaccgagagagcagagaactcggcgccgccaaacagcccagctcgcgcttcagcgtcccggcgccgtcgcgccactcctccgatggccacagatgtctttaattccaaaaacctggccgttcaggcacaaaagaagatcttgggtaaaatggtgtccaaatccatcgccaccaccttaatagacgacacaagtagtgaggtgctggatgagctctacagagtgaccagggagtacacccaaaacaagaaggaggcagagaagatcatcaagaacctcatcaagacagtcatcaagctggccattctttataggaataatcagtttaatcaagatgagctagcattgatggagaaatttaagaagaaagttcatcagcttgctatgaccgtggtcagtttccatcaggtggattatacctttgaccggaatgtgttatccaggctgttaaatgaatgcagagagatgctgcaccaaatcattcagcgccacctcactgccaagtcacatggacgggttaataatgtgtttgatcatttttcagattgtgaatttttggctgccttgtataatccttttgggaattttaaaccccacttacaaaaactatgtgatggtatcaacaaaatgttggatgaagagaacatatgagcacatgagttaa

SEQ ID NO: 196382 - DNA, 1990 bp, Homo sapiens
  Payload ID: 18748
  Gene Name: tumor necrosis factor, alpha-induced protein 8
  ENST ID: ENST00000415806
  CDS Start-End: 57-176
gctcgtccgagtacatgtgagcggtaatcgcccctgcagctggttatcctgacattatgcactccgaagcagaagaatccaaggaaggcctaggcttaaacactggcatatatggagagaacagttgccactcgactcagagattgagtagacacccaaagaactgcagttcttaagccttaggagaagcgagagaaatgggccagtggccacagatgtctttaattccaaaaacctggccgttcaggcacaaaagaagatcttgggtaaaatggtgtccaaatccatcgccaccaccttaatagacgacacaagtagtgaggtgctggatgagctctacagagtgaccagggagtacacccaaaacaagaaggaggcagagaagatcatcaagaacctcatcaagacagtcatcaagctggccattctttataggaataatcagtttaatcaagatgagctagcattgatggagaaatttaagaagaaagttcatcagcttgctatgaccgtggtcagtttccatcaggtggattatacctttgaccggaatgtgttatccaggctgttaaatgaatgcagagagatgctgcaccaaatcattcagcgccacctcactgccaagtcacatggacgggttaataatgtgtttgatcatttttcagattgtgaatttttggctgccttgtataatccttttgggaattttaaaccccacttacaaaaactatgtgatggtatcaacaaaatgttggatgaagagaacatatgagcacatgagttaagattgtgactgatcatgatttatttgaagatggagcactgctgatttatgaaggaaaaaagaagaattttctaaagattacacatatttcagaaagactttacccaattcagttgtcagacataatgatttatttgaaggcttgttttatttgaagaaaagcatattgccaaaaattctggttaaaagcttcctaacgggtaacagaccatgggagagatatgtggttgggtaatgcaaatgtagttatacaaagaaaaatacagatgtctccagacctgaggactttttaatagggcagttgttgtgttggtggcacattggatatttctaacatgtacaaagctatgtattttgatttactttcatttcttgctatgtatatgtacttttcttaaaatgccaagaactttctcttgctatcattgctccttttgaaacaattcaattttcatgtctacagctgactgttttgttaagattgagtcatcgacattcaggatttaagtctgaggtagtcaaccctcaggaaaaaaaaaatggcttatctgaaatcagtactgtggaaatgaactatattagctattatgaataatgtccagtataagaatatgcttctggaattgagttctccttttaagtaccaatgatacttaaatttctcagaaatgtaatggtgtgtcattgccttgaaatgcttgcttagggcttcttttatgttatcttaaaaagtgctggtgaattttccattttttacatccatttcacatgtaagagacaaaaaagtctagattggtcttgatattgagataataaaaagtaagtagcattaagaaaggtaacaatcttcattctacagatgaactcattgaaacaatttaggggaatgaggggcaaaaggggagaaatactgctaaagaacatgagcataaaaatgcgtgcgtttcagtgtttaagaaggcttgataaagaatgtcacttttttatttaactgataagatttttgttattttttactttgataagtaaaccaaagaatatttgtatttcaagcagtttgtgtggtgtttctatataattttctgtgtataaataataaagtaggcatttgtttattttgtaaaaaagaaatgaaaatctgctggccagctatgtcctctaggaaatgacagacccaaccaccagcaataaacatttccattgtca

SEQ ID NO: 196383 - DNA, 2502 bp, Homo sapiens
  Payload ID: 18748
  Gene Name: tumor necrosis factor, alpha-induced protein 8
  Uniprot ID: O95379
  ENST ID: ENST00000503646
  CDS Start-End: 689-1285
agactccttaaatccatgtcttttgtacgttcttttcactaaatttgccatagtgtttctattggtttttgcctatataaaatcggaaacgaagaaaaagaaacgaactggaaaataaatttgtcaaaagagtatatttttttctcataatttccaagcggatctttcagatatgttatttgaggactttttgcctcagactggcgataaaacaagtgttctacaaaatacctccgtaagacaggcctatcagtggcagctcttgtccccgctttgcagaagggaaaaccaaggctccacagagctaaggggacttcctctcagccaatttgtaggggcctgtgggccagacccgggggcagaattgagatctgttgtgaaggctgtccggcttctttattctatcagcatttcaaatcctgaaaacctcccctttggcattttgaaggaattcatccccagtttttgctggtagccgggagggaaccgtgctctccccctgaggaaggccctttggagtaactgcagcaatgagtgcccgggctgtgcttggagtaccagtgctcgcccggggctatactgaatgagtaagcagccccgtctgcttttgctgtgcaaagagcgaacttgcggctcgtccgagtacatgtgagcggtaatcgcccctgcagctggttatcctgacattatgcactccgaagcagaagaatccaaggaagtggccacagatgtctttaattccaaaaacctggccgttcaggcacaaaagaagatcttgggtaaaatggtgtccaaatccatcgccaccaccttaatagacgacacaagtagtgaggtgctggatgagctctacagagtgaccagggagtacacccaaaacaagaaggaggcagagaagatcatcaagaacctcatcaagacagtcatcaagctggccattctttataggaataatcagtttaatcaagatgagctagcattgatggagaaatttaagaagaaagttcatcagcttgctatgaccgtggtcagtttccatcaggtggattatacctttgaccggaatgtgttatccaggctgttaaatgaatgcagagagatgctgcaccaaatcattcagcgccacctcactgccaagtcacatggacgggttaataatgtgtttgatcatttttcagattgtgaatttttggctgccttgtataatccttttgggaattttaaaccccacttacaaaaactatgtgatggtatcaacaaaatgttggatgaagagaacatatgagcacatgagttaagattgtgactgatcatgatttatttgaagatggagcactgctgatttatgaaggaaaaaagaagaattttctaaagattacacatatttcagaaagactttacccaattcagttgtcagacataatgatttatttgaaggcttgttttatttgaagaaaagcatattgccaaaaattctggttaaaagcttcctaacgggtaacagaccatgggagagatatgtggttgggtaatgcaaatgtagttatacaaagaaaaatacagatgtctccagacctgaggactttttaatagggcagttgttgtgttggtggcacattggatatttctaacatgtacaaagctatgtattttgatttactttcatttcttgctatgtatatgtacttttcttaaaatgccaagaactttctcttgctatcattgctccttttgaaacaattcaattttcatgtctacagctgactgttttgttaagattgagtcatcgacattcaggatttaagtctgaggtagtcaaccctcaggaaaaaaaaaatggcttatctgaaatcagtactgtggaaatgaactatattagctattatgaataatgtccagtataagaatatgcttctggaattgagttctccttttaagtaccaatgatacttaaatttctcagaaatgtaatggtgtgtcattgccttgaaatgcttgcttagggcttcttttatgttatcttaaaaagtgctggtgaattttccattttttacatccatttcacatgtaagagacaaaaaagtctagattggtcttgatattgagataataaaaagtaagtagcattaagaaaggtaacaatcttcattctacagatgaactcattgaaacaatttaggggaatgaggggcaaaaggggagaaatactgctaaagaacatgagcataaaaatgcgtgcgtttcagtgtttaagaaggcttgataaagaatgtcacttttttatttaactgataagatttttgttattttttactttgataagtaaaccaaagaatatttgtatttcaagcagtttgtgtggtgtttctatataattttctgtgtataaataataaagtaggcatttgtttattttgtaaaaaagaaatgaaaatctgctggccagctatgtcctctaggaaatgacagacccaaccaccagcaataaacatttccattgtc

SEQ ID NO: 196384 - DNA, 8681 bp, Homo sapiens
  Payload ID: 18748
  Gene Name: tumor necrosis factor, alpha-induced protein 8
  Uniprot ID: O95379
  ENST ID: ENST00000504771
  CDS Start-End: 1778-2374
ttctcctcttctcccttctctggctggctatatcttcctcccttcatcctgctctttcagtgaaattgagataacatgttagaatcttaggcaggttagaatctctcagcagtaggatgtgatttaatatctagacctcttacattaatatttataatagccttcactgcttgtgaatagcataagcactcttttctgttcaaagtcaatactgaaataaaacccaagagtatgttttataaaaatttacttttaatggtgcaatggtaataatctatgtagtccttatggttttcaaatccctttgtgcttatattaccttatttaatacagacataaatctgtgaagtaaataatactatttttatcttcattttacaaatgaggaactggaggctcagagaggttaatttgcataaggtcatacaaatgatagatggcagaactggatttaagttcagactccttaaatccatgtcttttgtacgttcttttcactaaatttgccatagtgtttctattggtttttgcctatataaaatcggaaacgaagaaaaagaaacgaactggaaaataaatttgtcaaaagagtatatttttttctcataatttccaagcggatctttcagatatgttatttgaggactttttgcctcagactggcgataaaacaagtgttctacaaaatacctccgtaagacaggcctatcagtggcagctcttgtccccgctttgcagaagggaaaaccaaggctccacagagctaaggggacttcctctcagccaatttgtaggggcctgtgggccagacccgggggcagaattgagatctgttgtgaaggctgtccggcttctttattctatcagcatttcaaatcctgaaaacctcccctttggcattttgaaggaattcatccccagtttttgctggtagccgggagggaaccgtgctctccccctgaggaaggccctttggagtaactgcagcaatgagtgcccgggctgtgcttggagtaccagtgctcgcccggggctatactgaatgagtaagcagccccgtctgcttttgctgtgcaaaggtaagggtggaggccgctccactttcttcaaaaggccccgctctgggacttgtgaaattgtgctctcttaagctggtccttgcaaccccatggacgatatccatgcgactttcctacaaaaataacataccaaagccgctttaaaatccgtaatttttgggttgcaagactccaagacaaagtcaaatgggcatcaaaaaatgtaatccaaaaatacagaggcattggttctaccctatatgcatttgctatttatgtaaaactacagtgtgctctgagatgagactttttttttctttttatacctttttttccgcccgtctggtgcgtttgccgacggttcttctcggccctgtgtctcgggagagtcggctgccgtctgggcctgtgccccacctgcgtgcgcccgggccgagccagccccgccaggtcgcctccgcccggctgccggcccgagcgcgcggctccgggggcggactcccgccgcccagctgacacgcgattcgtcactcttgcagaactttccccctgaaaatccctgcaccagaacccgctctcccgccccggggaggttttgattttagtggctttcttccttttattttccgtcgtgtgcggatttcgctgcagagcgaacttgcggctcgtccgagtacatgtgagcggtaatcgcccctgcagctggttatcctgacattatgcactccgaagcagaagaatccaaggaagtggccacagatgtctttaattccaaaaacctggccgttcaggcacaaaagaagatcttgggtaaaatggtgtccaaatccatcgccaccaccttaatagacgacacaagtagtgaggtgctggatgagctctacagagtgaccagggagtacacccaaaacaagaaggaggcagagaagatcatcaagaacctcatcaagacagtcatcaagctggccattctttataggaataatcagtttaatcaagatgagctagcattgatggagaaatttaagaagaaagttcatcagcttgctatgaccgtggtcagtttccatcaggtggattatacctttgaccggaatgtgttatccaggctgttaaatgaatgcagagagatgctgcaccaaatcattcagcgccacctcactgccaagtcacatggacgggttaataatgtgtttgatcatttttcagattgtgaatttttggctgccttgtataatccttttgggaattttaaaccccacttacaaaaactatgtgatggtatcaacaaaatgttggatgaagagaacatatgagcacatgagttaagattgtgactgatcatgatttatttgaagatggagcactgctgatttatgaaggaaaaaagaagaattttctaaagattacacatatttcagaaagactttacccaattcagttgtcagacataatgatttatttgaaggcttgttttatttgaagaaaagcatattgccaaaaattctggttaaaagcttcctaacgggtaacagaccatgggagagatatgtggttgggtaatgcaaatgtagttatacaaagaaaaatacagatgtctccagacctgaggactttttaatagggcagttgttgtgttggtggcacattggatatttctaacatgtacaaagctatgtattttgatttactttcatttcttgctatgtatatgtacttttcttaaaatgccaagaactttctcttgctatcattgctccttttgaaacaattcaattttcatgtctacagctgactgttttgttaagattgagtcatcgacattcaggatttaagtctgaggtagtcaaccctcaggaaaaaaaaaatggcttatctgaaatcagtactgtggaaatgaactatattagctattatgaataatgtccagtataagaatatgcttctggaattgagttctccttttaagtaccaatgatacttaaatttctcagaaatgtaatggtgtgtcattgccttgaaatgcttgcttagggcttcttttatgttatcttaaaaagtgctggtgaattttccattttttacatccatttcacatgtaagagacaaaaaagtctagattggtcttgatattgagataataaaaagtaagtagcattaagaaaggtaacaatcttcattctacagatgaactcattgaaacaatttaggggaatgaggggcaaaaggggagaaatactgctaaagaacatgagcataaaaatgcgtgcgtttcagtgtttaagaaggcttgataaagaatgtcacttttttatttaactgataagatttttgttattttttactttgataagtaaaccaaagaatatttgtatttcaagcagtttgtgtggtgtttctatataattttctgtgtataaataataaagtaggcatttgtttattttgtaaaaaagaaatgaaaatctgctggccagctatgtcctctaggaaatgacagacccaaccaccagcaataaacatttccattgtcactgtgtctatgatttttttttttttttttttgagtctcgctctgttgtttaggctagaatgcagtggcatgattttggctcactgcaacctctgcctcccaggttcaagtgattctcctgcctctgcctcccaagtagctgggattacaggcatgcaccaccacacccagctaatttttgtatttttagtcgagatggggtttcaccatgttgcccaggctggtcttgaactcctgacttcaaatgatctgcctgcctcggcctccgaaagtgttgggattacaggtgtgagccactgtgcctatgatttagtgtactctcttgccttaaatttgcctgcctcccagaatattgacattaaaataatagtttaccaggaaaggttccacaactaaaaattccagaagttgagatctgctctaacccatttcagcctagagagggtggtcagtttctctgacaccctcatttgcttggctaagacaagcagcaaaggtgtagagtttcttcctgtttgatattaaatcctgacactaagatttgaactgaaagtatcattctcacttcctagagccagtaggtgatcagtatatgctgtaacaataacacagtgactacagaaatgacccttctagcttcataacttgctaagtggcttataaatggaattcagcagccttccttgaccagctgttttcctcacatgtgaaggctgagaatgtgatggggggtgtgagctactgactggatgtgttctgttctccagatctcaaacagcagaggtatgggaaacgaaagccctgggcagtccatggatgcttcttgctcatctgtagctatagacaggaccaaccagagagagaaaacgtacggagggagaaatctggatctctctggacacactggatcatagggttgtgccagcaggctagcaatcaaatgtgcatgggattgggggagcaatgcttcatctcccacagagggaaggcagtgaggagtagaccgaaggagggaatcctgtttgctaccatttctcagcattttctggaggggacccatctccttaccagtgctgtgcctgaaaagcatgtcttggatcaggtccaaagtcgtgattagcaagttcatttctaatacaataggactccccttgagcatttagggtggcaaggagcgtgggagctgggaagaatccccacgtgcttagggtagataaatctgagccgagttaatactaatttggggatcctatgaacctttttataaaatagtatctgttcacgttttgaaaaaaattgtgttgtaattgattttattttgtgctggtggcttctctgcaaaaattatgagtggatatgataagtggatgataatactaatggacaactaacgcagagtagtttgtattatgtgtcgggcacattaactcatttaattctgccacaatcttcaccatcttatagataaggaaactaggggaatagaagttaaggaatttcctgaggtcacatgtgctcgaggtgtcccagccggaatatgtataaaatcttattttcacttaaagatgatatggctaaaggcagtgctaggaacatctttggctcagagaagcgtgggcagtatgctgctgaaatggttcctcatatagtgacattttaggcagtacctaagtcagcacaggtctggcctgttctctaaagatctgtgtagatgttgtacaaagacatttttcaaagttttcaacatgactcctactttgggggcatcttgtggctcagttttctgtctcgtggaacttcacttctaggtgctcacaatgacttttaacgttgacttctgaggtgcagtgagctgctcccccacagctgtccctagcagtggtgggttcagagcatgacaaggcactcaatgtgcattcaccaagagaagcaaggaagcagcagttcagtactgtgctccctagagtaggcacggcatcagtttcaaacttcaacattattttccagatttggaggctcaaaatatttgagcaagttaagttaagaaatagcctttttctgattattaggcctttcatatacaactcaaaattagtttaagagtaaagcatggggtgggtgcggtggcttatgcttgtaagcccagaactttgggaggcggaggtgggaggatcacttgaggtgaggagttcgagaccagcctggccaacgtggtgaaaccccactgctactaaaaatacacaagattagccagatgtggtggcaggcacctgtaatcccagctacttgggaggctaaggcaggagaatcgctggaacctgggaggcagaggttgcagtgagctgagattgtaccactgcactgcagcctgggcaacaagaacgaaaccccgtctcaaaaaaaaaaaaaaaaaaaaaaagcatgagttaagaactttgatcgtacagaaatattgcgttttaaactcttatataatagtatgccattcacaattatctggaaagttctttttctcccaccatgtgaatacacacacacacacacacacacacacaatttttaagcccccaaaggcttaaaatagtactttttgtggtctgtaccggtcagttggatttttactaagaattttaatttatccttgagatacttgatgagtgtatataagcagttgcaatttagcatacaaaacctgacaaatggtaaataaaagaatatgtttatccaaatgatgaaatatttgtagtaaaaagtgctattcaattgccaggaaattaaaatactccagtaaaatgaattaaattagcatgttaataagagtgataatatttaaaagttttagtcaatcttgcatttccatacttgcattatctaaactagttgaacttttcagtgttttacttgatatattgcattcttgagcattaggcttctaggtgatttgttaaactcatagcaggttttagtacacagtgctgtttatgacagaaaaaattttatcctacctctgaaataattgtactttctgtgattcagataaaaactttatagaaactccctaatgaaaatattgaagcattaaccagaaaatgagtcagctttttgtttccaaaatgatgcaacaggaaaacctttaactacttataatcccgtatagtcaccatcaccacgaagtattgaaaatctgttttctcttttactaagtgtctgcacggtcacttatgtatacccaaagccagaaagatatttttatctcagggaaattccagaaatggaaacatttttgtgtaatattgattcatttctgtctcaccaaagatgtgttttccacgtagcaaagaacatcagccccacgttatagggaacaagcgagtcccaaatcgtaccatctgctgagcactgagaaaggatatggacaagtcagtcagcattcacaattaagagaaaaacatctgtgctttggaaaatgttcttcaaggatagagaattgtgccctatgtccaccaaatttgcatgagatctttataagattagacagccagtggataaggccccttatctttcttcatggatggctgaggaaattctccgccttccctgacatcagctgcataactgtatttctgcctcgtggaaataaagtagatgatcaggcacttgcggtttgttcttaatacaagaaagacaatttgatttttaaaagttttgatttgtagaataatgtaagacaatatgtttctttctactttggtttttccattcaaaagcttacagatgaattcattcgtttaaaactgccaggctgagtgcggtggctcatgcctgtaatcccaacacttcgggagactgaggtgggcggatcacctgaggtccagagttcaagaccagcctgaccaacatggtgaaaccccatctctactaaaaatacaaaattagccgggtgcagtgccacatgcctgtaatcccagctacttgggaggctgaggcaggagaaccacttgaacccaggaggcagaggttgcagtgagccaagattacaccactgcactccagcctgggcaacaagagtgagactttgtctcaaaaaaaaaaaaagaaactctgtctcgaagtaaataaataaatttttaaaaaccaacctgatgtgaagttgaaacacaagacgcggaaataaaaactcagagtataaatatctatattgttaccattatctgggataattgatgatttataagaagctgaggtttcgtcttcctagaaatggacttttattaggccagcaagaatgaccacttagccatttaaatgatttgtcagcatcttttgctgctctcttctaagaccattggttttcactaaaggataaatacctgctaagcaaattataaaatactataagacatttaatctcctggaagaggacttgctgataattggatcaaagttccagcattattgctcttttcgaatcatatggacttagtgttctcatgaccgaggagtcacatttttagcttgctaaaatattcactggagaacatggtgaaatccacgagtggaaacgttccatggtattttcaaacgccacgtgtcaggaatttggcatgccttcctctgggagaggcactggagtgtggccagatggaacccagcagggtacagagggcatttgtgggagcagttaggaaaccaggacgtccagcttctgcctgccagggagctcgctcatgttgtctctgaaatttgcataagagcaattacctcatattctaattttaaagatacaatttttaaagacatggaaggctctgagacctcctgaaggctattcctatgtgaggtattgtttacgggtggcctttcactatttccaaatcagcgatgaaaagaagactgagtctaaaataaatgaagcaacagacttcagcagcctgagagaattttgttcaattccagtctccttaaaaaaaaatcggtttttgctttcaatttaggaaaattgttttgggttgcattgttgaaagtaatgatttctagcagctacttatgtataatctcttaaccaattaaattctgaatctcttaaatca

SEQ ID NO: 196385 - DNA, 711 bp, Homo sapiens
  Payload ID: 18748
  Gene Name: tumor necrosis factor, alpha-induced protein 8
  ENST ID: ENST00000504642
  CDS Start-End: 44-646
gggctgtgcttggagtaccagtgctcgcccggggctatactgaatgagtaagcagccccgtctgcttttgctgtgcaaagtggccacagatgtctttaattccaaaaacctggccgttcaggcacaaaagaagatcttgggtaaaatggtgtccaaatccatcgccaccaccttaatagacgacacaagtagtgaggtgctggatgagctctacagagtgaccagggagtacacccaaaacaagaaggaggcagagaagatcatcaagaacctcatcaagacagtcatcaagctggccattctttataggaataatcagtttaatcaagatgagctagcattgatggagaaatttaagaagaaagttcatcagcttgctatgaccgtggtcagtttccatcaggtggattatacctttgaccggaatgtgttatccaggctgttaaatgaatgcagagagatgctgcaccaaatcattcagcgccacctcactgccaagtcacatggacgggttaataatgtgtttgatcatttttcagattgtgaatttttggctgccttgtataatccttttgggaattttaaaccccacttacaaaaactatgtgatggtatcaacaaaatgttggatgaagagaacatatgagcacatgagttaagattgtgactgatcatgatttatttgaagatggagcactgctgatttatgaa

SEQ ID NO: 196386 - DNA, 1385 bp, Homo sapiens
  Payload ID: 18748
  Gene Name: tumor necrosis factor, alpha-induced protein 8
  Uniprot ID: O95379
  ENST ID: ENST00000513374
  CDS Start-End: 391-1023
gattttgaatatactcctgtttgcttgtcacaggtaatcttgcatttctatgtagttgtagtttacagggagcaagtgcaggcagcaaccagtccatccctgttgtgaatgtggagacctctctggactcacaattaaaggctacctaatgcattccactacaagtgacgaaacctagctcccagaataacaagcaagacaactttcaaagtgactgtagttgaccagtgccttctgtgcatttatgtggtaagcttatggtagatttttcaaaagaatagtataaattattttgaattattcttgagaaggactgagtctccccgagggtgatgcaggttccatagtgtacacgtcaacagggtggttgcatgcattcctcaagtctgtatgactctaccaagatactgtgaagttgtccttctgattgcacacggggagaaaatgctgaaactagtggccacagatgtctttaattccaaaaacctggccgttcaggcacaaaagaagatcttgggtaaaatggtgtccaaatccatcgccaccaccttaatagacgacacaagtagtgaggtgctggatgagctctacagagtgaccagggagtacacccaaaacaagaaggaggcagagaagatcatcaagaacctcatcaagacagtcatcaagctggccattctttataggaataatcagtttaatcaagatgagctagcattgatggagaaatttaagaagaaagttcatcagcttgctatgaccgtggtcagtttccatcaggtggattatacctttgaccggaatgtgttatccaggctgttaaatgaatgcagagagatgctgcaccaaatcattcagcgccacctcactgccaagtcacatggacgggttaataatgtgtttgatcatttttcagattgtgaatttttggctgccttgtataatccttttgggaattttaaaccccacttacaaaaactatgtgatggtatcaacaaaatgttggatgaagagaacatatgagcacatgagttaagattgtgactgatcatgatttatttgaagatggagcactgctgatttatgaaggaaaaaagaagaattttctaaagattacacatatttcagaaagactttacccaattcagttgtcagacataatgatttatttgaaggcttgttttatttgaagaaaagcatattgccaaaaattctggttaaaagcttcctaacgggtaacagaccatgggagagatatgtggttgggtaatgcaaatgtagttatacaaagaaaaatacagatgtctccagacctgaggactttttaatagggcagttgttgtgttggtggcacattggatatttctaacatgtacaaagctatg

SEQ ID NO: 196387 - DNA, 541 bp, Homo sapiens
  Payload ID: 18748
  Gene Name: tumor necrosis factor, alpha-induced protein 8
  ENST ID: ENST00000388882
  CDS Start-End: 338-541
ctggcctctgcctccttttctcccgccggctctaacccgcgcttggctaaggtccgcgggaacccgtgagccaccgagagagcagagaactcggcgccgccaaacagcccagctcgcgcttcagcgtcccggcgccgtcgcgccactcctccgagatcttcctgtgtcacccaggctgaagtgcagtggtgagatcatagctcactgcagcctctaactcctgggctcaagcgatcctcccacctcagtctcctgagtagctggaaccacagtggccacagatgtctttaattccaaaaacctggccgttcaggcacaaaagaagatcttgggtaaaatggtgtccaaatccatcgccaccaccttaatagacgacacaagtagtgaggtgctggatgagctctacagagtgaccagggagtacacccaaaacaagaaggaggcagagaagatcatcaagaacctcatcaagacagtcatcaagctggccattctttataggaataatcagtttaatcaagatgagctagcattgatggag

SEQ ID NO: 196388 - DNA, 3814 bp, Homo sapiens
  Payload ID: 18749
  Gene Name: tumor necrosis factor, alpha-induced protein 8-like 1
  Uniprot ID: Q8WVP5
  ENST ID: ENST00000327473
  CDS Start-End: 116-676
ccccggccccggctccggcgctgctcccaccgccgcggcaacggccccggcccacggaggcggctggacggacccccgacggttggacgtacggactctgcttcgagagtaggccatggacaccttcagcaccaagagcctggctctgcaggcgcagaagaagctcctgagtaagatggcgtccaaggcagtggtggccgtgctggtggatgacaccagcagtgaggtgctggatgagctgtaccgcgccaccagggagttcacgcgcagccgcaaggaggcccagaagatgctcaagaacctggtcaaggtggccctgaagctgggactgctgctgcgtggggaccagctgggcggtgaggagctggcgctgctgcggcgcttccgccaccgggcgcgctgcctggccatgacggccgtcagcttccaccaggtggacttcaccttcgaccggcgcgtgctggccgccgggctgctcgagtgccgcgacctgctgcaccaggccgtgggtccccacctgaccgccaagtcccacggccgcatcaaccacgtgttcggccacctagccgactgcgacttcctggctgcgctctacggccccgccgagccctaccgctcccacctgcgcaggatctgcgagggcctgggccggatgctggacgagggcagcctctgaaccccggcgccgcccaaccgcgcccctcgcgccttttggggctctcctgctgggcgcgggtggggtttgtgggtttttttccacctcttttctcccaatcggactccggccaaactcccctagacagatgggtgacctgtctcctttgagaggatgctgaggcatctgtagcagctgtttcaaacaccaatgtcacctctcctcctggcccccgcccaatggggagaggaatttggggccctactctggggaccacctttcacccgtttgtactttctgggccacgccgacccctgggtcgcttgatgtaaaagccaaaagctgctgcctcccacttggatcatgtcgcctgggattttcatccctcgcacaaggactacgggttcacacggtgaactgggggaagggaagtgttagggggcaagtcgcggcacccccccttccataaactcacgtcctaacccccaggacctcagaagatgatctgatttggaaataggatcattacagatggaattagttcagatgatctcatcttggagtagggtgggccccaattcaaggactggggtccttaaaaaaagggggcctggggcagggcgcggtggctcacgcctgtaatcccagcactttgagaggctgaggcgggcggatcacgaggtcaggagatcgagaccatcctggctaacacggtgaaaccccatctctactgaaaatacaaaaaattagctgggcatggtggcacatgcctgtagtcccagctactcgggaggctgaggcaggataatcacttgaaccaggaggaggaggttgcagtgagccgagattgtgccactgcactccagcctgggtgacagagcaagactctgtctcaaaaaaagaagcgggggagtgggggattgaggccacgtgcagtggctcactactctaattccagcactttgggaggccgaggcaggaagattgcttgaactcagaagttcaagaccagtctgggcaacatggtgagaccctcgtctctacaaaaaaaaaattatcgtggtgggccgggcgtggtggctcacacctgtaatcccagcactttgggaggctgaggcgggcagatcacaaggtcaagagatcgagaccatcctggccaacatggtgaaaccccgtctctactaaaaatacaaaaattagccgggcatggtgttgcgtgcctgtagtcccagctacttgggaggctgaggcaggagaatcgcttgaacctgggaggcgcaggttgcagggaggcggaggttgcagtgagccgagattgcaccactgcacttcagcctggtgacagagcgagactcgtctcaaaaaaaaaaaaaaaaaaaaaaaaaaaagtgactgtggtggtgcacacgtataatcccagctacttgagagatgacgagggaagatcacttgagcccaggagttaagaggctgcagtgaccgatgatcatgccactgcactccagcttgggtgagagtgggactctgtcttagaaagaaaaaaaaaagtatttggacacagacatgcatgcaaggaaggccaatgatgccggccaccaccaggagctgggagaggcccagggcagatccccttcagccttggagggacctagccctggccacaccttcatctcagacttgcggcccagagaactgaatgagaataaatgtgcgtgaagcccctcagtccacaggatgtggtactggaagcccccactcaagaaggctccagtgaatgctggcacgttcagccaggatgcctccgtgaagctggagacctctgccctgggtcgggaggggaaactgctccaatccagggactgccacatgggaggggacggagcgtgcccacctcccaggggtgaggggggacccacctgagatgtgtgcacattttatttatttattgttttgagacaaagtctcgctgtgtcacccaggctggagtgcagtggtgaaatctcggctcattgcagccccttccttccaggctcaagtgatcctcccacctcagccccgggtagctgggactacaggtgtgcacgagcacacccggctaatctttgtattttttgtagacagaaggtctcaccatgttgcccaggatggtctcgaactcctgggctcaagcgacctacctacctcggcctcacaaagtgtgcacattgtaatatcgtgatttcatatttggagaatcagcaaccaaccagccaaccatgttgcttttataagacagagctgagaaagcaaagcttggctgtcgtcttggctctggtaccacccacgagatgcgggcgattctcagctcagggcgtggaggcgtggtgtgggggagtctatttgccatttttgtttgtcagcagggggcaggggttctcaaagattgcaaaatgctgctgcaggtcaggaaggttattttgggtgcctgtgggggaggtgaaacaaggtcccatgactgttttgcagaaccttgtctgtggagggtagaggttgcggcaggggcctgtgggccttacttggtgagaaggtaggtctagctggctccattcagtatttgagacatttggaatttgtctgcatttaaaaccaagagatcacacacacctgtctggatttggagtttctcttgaaaactcgccagtccggccgtctgagcctgcactgacgcctggtgaagctgtgcaggggccgcccctctccctttcaccacagtcctctccactccctttcgcctctccctggcctgctgcactcactgataggaaattctgaccccagactcggagcagccttcccgtggttcggtttttgcttccgcgaaaaagccaaaggccttggccagagagccagctgttcctacctctaccccacgcttccaaggcaaccttctccacttatcttaggccgagagacagctcttcaagaacgtacatggatcctgattttctcacgaagtcccgatggaaccctgtgctgttgagacatcagtgtgtaaaactctctgtgtccctgttgggctgtccagacagtctggactcttgtaaatttgagatttaattaaaggaaacaaaccaaataggactgcggaacaatttaaataaaagcacacaccagcctggg

SEQ ID NO: 196389 - DNA, 3845 bp, Homo sapiens
  Payload ID: 18749
  Gene Name: tumor necrosis factor, alpha-induced protein 8-like 1
  Uniprot ID: Q8WVP5
  ENST ID: ENST00000536716
  CDS Start-End: 147-707
gcatcggtccaggcatcggtggcggggagccaggcctaggccagcccgggcccacccagactggcccctaatgagctcccaagtggcctgtggggacttggcctcagttttgccagctgtgaactgggaccgtcgctgctaaggccatggacaccttcagcaccaagagcctggctctgcaggcgcagaagaagctcctgagtaagatggcgtccaaggcagtggtggccgtgctggtggatgacaccagcagtgaggtgctggatgagctgtaccgcgccaccagggagttcacgcgcagccgcaaggaggcccagaagatgctcaagaacctggtcaaggtggccctgaagctgggactgctgctgcgtggggaccagctgggcggtgaggagctggcgctgctgcggcgcttccgccaccgggcgcgctgcctggccatgacggccgtcagcttccaccaggtggacttcaccttcgaccggcgcgtgctggccgccgggctgctcgagtgccgcgacctgctgcaccaggccgtgggtccccacctgaccgccaagtcccacggccgcatcaaccacgtgttcggccacctagccgactgcgacttcctggctgcgctctacggccccgccgagccctaccgctcccacctgcgcaggatctgcgagggcctgggccggatgctggacgagggcagcctctgaaccccggcgccgcccaaccgcgcccctcgcgccttttggggctctcctgctgggcgcgggtggggtttgtgggtttttttccacctcttttctcccaatcggactccggccaaactcccctagacagatgggtgacctgtctcctttgagaggatgctgaggcatctgtagcagctgtttcaaacaccaatgtcacctctcctcctggcccccgcccaatggggagaggaatttggggccctactctggggaccacctttcacccgtttgtactttctgggccacgccgacccctgggtcgcttgatgtaaaagccaaaagctgctgcctcccacttggatcatgtcgcctgggattttcatccctcgcacaaggactacgggttcacacggtgaactgggggaagggaagtgttagggggcaagtcgcggcacccccccttccataaactcacgtcctaacccccaggacctcagaagatgatctgatttggaaataggatcattacagatggaattagttcagatgatctcatcttggagtagggtgggccccaattcaaggactggggtccttaaaaaaagggggcctggggcagggcgcggtggctcacgcctgtaatcccagcactttgagaggctgaggcgggcggatcacgaggtcaggagatcgagaccatcctggctaacacggtgaaaccccatctctactgaaaatacaaaaaattagctgggcatggtggcacatgcctgtagtcccagctactcgggaggctgaggcaggataatcacttgaaccaggaggaggaggttgcagtgagccgagattgtgccactgcactccagcctgggtgacagagcaagactctgtctcaaaaaaagaagcgggggagtgggggattgaggccacgtgcagtggctcactactctaattccagcactttgggaggccgaggcaggaagattgcttgaactcagaagttcaagaccagtctgggcaacatggtgagaccctcgtctctacaaaaaaaaaattatcgtggtgggccgggcgtggtggctcacacctgtaatcccagcactttgggaggctgaggcgggcagatcacaaggtcaagagatcgagaccatcctggccaacatggtgaaaccccgtctctactaaaaatacaaaaattagccgggcatggtgttgcgtgcctgtagtcccagctacttgggaggctgaggcaggagaatcgcttgaacctgggaggcgcaggttgcagggaggcggaggttgcagtgagccgagattgcaccactgcacttcagcctggtgacagagcgagactcgtctcaaaaaaaaaaaaaaaaaaaaaaaaaaaagtgactgtggtggtgcacacgtataatcccagctacttgagagatgacgagggaagatcacttgagcccaggagttaagaggctgcagtgaccgatgatcatgccactgcactccagcttgggtgagagtgggactctgtcttagaaagaaaaaaaaaagtatttggacacagacatgcatgcaaggaaggccaatgatgccggccaccaccaggagctgggagaggcccagggcagatccccttcagccttggagggacctagccctggccacaccttcatctcagacttgcggcccagagaactgaatgagaataaatgtgcgtgaagcccctcagtccacaggatgtggtactggaagcccccactcaagaaggctccagtgaatgctggcacgttcagccaggatgcctccgtgaagctggagacctctgccctgggtcgggaggggaaactgctccaatccagggactgccacatgggaggggacggagcgtgcccacctcccaggggtgaggggggacccacctgagatgtgtgcacattttatttatttattgttttgagacaaagtctcgctgtgtcacccaggctggagtgcagtggtgaaatctcggctcattgcagccccttccttccaggctcaagtgatcctcccacctcagccccgggtagctgggactacaggtgtgcacgagcacacccggctaatctttgtattttttgtagacagaaggtctcaccatgttgcccaggatggtctcgaactcctgggctcaagcgacctacctacctcggcctcacaaagtgtgcacattgtaatatcgtgatttcatatttggagaatcagcaaccaaccagccaaccatgttgcttttataagacagagctgagaaagcaaagcttggctgtcgtcttggctctggtaccacccacgagatgcgggcgattctcagctcagggcgtggaggcgtggtgtgggggagtctatttgccatttttgtttgtcagcagggggcaggggttctcaaagattgcaaaatgctgctgcaggtcaggaaggttattttgggtgcctgtgggggaggtgaaacaaggtcccatgactgttttgcagaaccttgtctgtggagggtagaggttgcggcaggggcctgtgggccttacttggtgagaaggtaggtctagctggctccattcagtatttgagacatttggaatttgtctgcatttaaaaccaagagatcacacacacctgtctggatttggagtttctcttgaaaactcgccagtccggccgtctgagcctgcactgacgcctggtgaagctgtgcaggggccgcccctctccctttcaccacagtcctctccactccctttcgcctctccctggcctgctgcactcactgataggaaattctgaccccagactcggagcagccttcccgtggttcggtttttgcttccgcgaaaaagccaaaggccttggccagagagccagctgttcctacctctaccccacgcttccaaggcaaccttctccacttatcttaggccgagagacagctcttcaagaacgtacatggatcctgattttctcacgaagtcccgatggaaccctgtgctgttgagacatcagtgtgtaaaactctctgtgtccctgttgggctgtccagacagtctggactcttgtaaatttgagatttaattaaaggaaacaaaccaaataggactgcggaacaatttaaataaaagcacacaccagcctggg

SEQ ID NO: 196390 - DNA, 1178 bp, Homo sapiens
  Payload ID: 18750
  Gene Name: tumor necrosis factor, alpha-induced protein 8-like 2
  Uniprot ID: Q6P589
  ENST ID: ENST00000368910
  CDS Start-End: 127-681
ggccaagccaaagggctctcacactaagtgaagcttctccattctgtaagctttccgggaacatccaaggcaagactggcacccagcacagcagtgactgaccacataccccactctccaggacccatggagtccttcagctcaaagagcctggcactgcaagcagagaagaagctactgagtaagatggcgggtcgctctgtggctcatctcttcatagatgagacaagcagtgaggtgctagatgagctctaccgtgtgtccaaggagtacacgcacagccggccccaggcccagcgcgtgatcaaggacctgatcaaagtggccatcaaggtggctgtgctgcaccgcaatggctcctttggccccagtgagctggccctggctacccgctttcgccagaagctgcggcagggtgccatgacggcacttagctttggtgaggtagacttcaccttcgaggctgctgttctggctggcctgctgaccgagtgccgggatgtgctgctagagttggtggaacaccacctcacgcccaagtcacatggccgcatccgccacgtgtttgatcacttctctgacccaggtctgctcacggccctctatgggcctgacttcactcagcaccttggcaagatctgtgacggactcaggaagctgctagacgaagggaagctctgagagccctgagcctagcacattccaccttgacaaaatggttgactgagaaaacacagataatgggcttcctaaccctgctcacctggcactaacacttttcaatcttcaggcttcattccttcccaagagtgcttttgactctgagaccagcccacccccaaacagctagtggagaaggagcaatgctgaggggtgaggcctctctcccactccagccccaggacaggaaacagaactgcctgaaaaaggtgaagtgaaacttggatctctatttctcccataagggacttctgaaacagggaagccccctcccatgtgaaccaaggaaaggaggcacagcccagagaacccctttggggatactaaagacagaagaggggaaggtggcccttagagacagagcttggacagatgccagaggctctgttccagagtgcaggaagaaggggctagggcaggggagattctcataggggaaataaaactactaaaatatg

SEQ ID NO: 196391 - DNA, 2262 bp, Homo sapiens
  Payload ID: 18751
  Gene Name: tumor necrosis factor, alpha-induced protein 8-like 3
  Uniprot ID: Q5GJ75
  ENST ID: ENST00000327536
  CDS Start-End: 101-979
acttgctagtcttacctcaagtaatgggaaacgaccagacctcctaaagagtcagtgtgcaagttagggctactgtcccaagaaggacacctgagtccaaatggggaaaccacggcaaaacccaagcacactggtttccacactctgtgaggcagagccaaaggggaaactgtgggtcaacggatatgcagggacccaaggcacaagggatgccacgttacaaacaagactcatccccttatcttttcatcttcagaggggaaagggacttgccgccccgctgtccgccctgagtgcgccgcggctgcccgagcgccccgcagacgggcgggtggccgtggacgcccagccagcagcccgcagcatggattcggattccggggagcagagcgagggcgagcccgtgaccgccgcaggtcctgatgtttttagttcaaagagtcttgcgcttcaagcccagaagaagattctgagcaaaatagccagcaaaactgtggccaacatgttgattgatgacaccagcagcgagatctttgatgagctctacaaagtcaccaaagagcacacacacaacaagaaggaagcccacaagatcatgaaagacttaatcaaggtggcgatcaaaatcgggatcctctaccggaacaaccagtttagccaagaggagctggttattgtggagaagttccggaagaagctgaaccagaccgccatgaccattgtcagcttctatgaggtggaatacaccttcgataggaacgtgctctccaatctcctgcatgagtgcaaggacctggtgcatgaactggtgcagcggcacctgacgcccaggacccacgggcgcatcaaccacgtctttaaccactttgccgatgtggagttcctctccaccctctatagtctggatggagactgtaggcccaacctcaagaggatttgtgaaggaatcaataagttgctagatgagaaagtcctttaaatgccttccctcctactggactttgctgctttaaagttacagcactcaaccatgatctgggtgagaatcaagaacataagcagaaacccttgtcaaagatgtccatgttctttcctgttcatccctctgatgctgattctgatgctgaactgagctcaggtgtgtttttcttccaagctttctagcaaggtttctacttaaaatcacctgtgtgcaagcccaaaggacatttcatctattctaagcagaaaggctgttttgttcattacagtgagtgctgttcatctcatggagtgggaggagcactaaaccaggagacagaggacatggatttggtttccagcttaaccagttaggactctgtcctctgcattctggaaccatgatgcctgcctgcctgcctcacagggctgttgtgaggaccagatgagatgatgtatgttcatacttttggaatctctaatttaaagtcttaatattttgtcttctgagtgtgaggggataaacctggatgtagactattaagcagcataggagaaaagaacaatagaatctaatggactgggtttgcaatctctctctaaatgcactgcttcagacaaagtgaaatccaaaggtgtgaaaaagtatagctgcaaattggaaaaatgtgtttcaagagtcgtctttttggccaggcatggtggctcacacctgtaatcccagcactttgggaggccgaggtgggcagattgcctgaggtccggagttcaagatcagcctggccaacatgatgaaaccctatctctactaaaattacaaaaattagccaggcgtggtggtacacgcctgtaatcccagctactcaggaggctgaggcaggagaattgtttgaacctgggagatggaggctgcagtgagctgagatcacgccactgtactccagcctgggcaacagagcaagactctgtctctaaaaaataataataataataataatttttttaaaaagaggtgtttttgaggtcttagatgttcaggttgatgatcctgcagagggaaactttccatgggggggtggggagagagagttttccatccacaatatagaaacagagaagcactgtgctccctctgcaggaccagccttcccttatctaaggggcatggagctcagggaggctttattccatatgcacgggagaatcaggcagaatgaacccctacccatctttcttggcttttcagtcattttgtgctgttttctctggttcattaataaattgaaactgccctccaaacaa

SEQ ID NO: 196392 - DNA, 4041 bp, Homo sapiens
  Payload ID: 18752
  Gene Name: tumor protein D52
  Uniprot ID: P55327
  ENST ID: ENST00000379096
  CDS Start-End: 116-670
gcgggagtcgccggcggaggcgaggaggagctctgcgcggcgcggcgggcgatccgagccgggacgggctgcaggcgggggtgctgcagaggacacgaggcggcgggctggagacatggaccgcggcgagcaaggtctgctgagaacagacccagtccctgaggaaggagaagatgttgctgccacgatcagtgccacagagaccctctcggaagaggagcaggaagagctaagaagagaacttgcaaaggtagaagaagaaatccagactctgtctcaagtgttagcagcaaaagagaagcatctagcagagatcaagcggaaacttggaatcaattctctacaggaactaaaacagaacattgccaaagggtggcaagacgtgacagcaacatctgcttacaagaagacatctgaaaccttatcccaggctggacagaaggcctcagctgctttttcgtctgttggctcagtcatcaccaaaaagctggaagatgtaaaaaactccccaacttttaaatcatttgaagaaaaggtcgaaaacttaaagtctaaagtagggggaaccaagcctgctggtggtgattttggagaagtcttgaattcggctgcaaatgctagtgccaccaccacggagcctcttccagaaaagacacaggagagcctgtgagattcctacctttgttctgctacccactgccagatgctgcaagcgaggtccaagcacatcttgtcaacatgcattgccatgaatttctaccagatgtgcttttatttagctttacatattcctttgaccaaatagtttgtgggttaaacaaaatgaaaatatcttcacctctattcttgggaaacaccctttagtgtacatttatgttcctttatttaggaaacaccattataaaaacacttatagtaaatggggacattcactataatgatctaagaagctacagattgtcatagttgttttcctgctttacaaaattgctccagatctggaatgccagtttgacctttgtcttctataatatttcctttttttcccctctttgaatctctgtatatttgattcttaactaaaattgttctcttaaatattctgaatcctggtaattaaaagtttgggtgtattttctttacctccaaggaaagaactactagctacaaaaaatattttggaataagcattgttttggtataaggtacatattttggttgaagacaccagactgaagtaaacagctgtgcatccaatttattatagttttgtaagtaacaatatgtaatcaaacttctaggtgacttgagagtggaacctcctatatcattatttagcaccgtttgtgacagtaaccatttcagtgtattgtttattataccacttatatcaacttatttttcaccaggttaaaattttaatttctacaaaataacattctgaatcaagcacactgtatgttcagtaggttgaactatgaacactgtcatcaatgttcagttcaaaagcctgaaagtttagatctagaagctggtaaaaatgacaatatcaatcacattaggggaaccattgttgtcttcacttaatccatttagcactatttaaaataagcacaccaagttatatgactaatataacttgaaaattttttatactgaggggttggtgataactcttgaggatgtaatgcattaataaaaatcaactcatcattttctacttgttttcaatgtgttggaaactgtaaaatgatactgtagaacctgtctcctactttgaaaactgaatgtcagggctgagtgaatcaaagtgtctagacatatttgcatagaggccaaggtattctattctaataactgcttactcaacactaccaccttttccttatactgtatatgattatggcctacaatgttgtatttgttatttattaaattgtgattgttttattattgtttatgccaaatgttaactgccaagcttggagtgacctaaagcattttttaaaagcatggctagatttacttcagtataaattatcttatgaaaaccaaattttaaaagccacaggtgttgattgttataaaataacatgctgccattcttgattgctagagtttttgttagtactttggatgcaattaaaactatgtgctatcacatgtgaaaagcttaataaattccatctatcagtagtataggtctcaatatttattatgagaccagtggtctggaaacagcttgttgtaccgaatcaactggagtctatgcttaaaaaaaaaaaatttttttttaaccatccttaaattattgcttaatggtatcatattaacatattctaaataagggctttaaggcacaggctgttgaagcattttctcagaggagtggatctgtagaagtctgtctttctatagaaatattgtgcttactcaagtgttaaattattttttctatgaactagtctacttcttaaaattcaaacatattcttttgatcacattgtttcttgagcatcctgccctgctactaacttttcaacaaggcaaaatggagtaaagtggcaatttctttagatgagtgaaataccctcaagtctcttttctgcccaaaaagggaaaagtgatagaaatgggggtggcaagtggggtgagtggatgaaggtgggtattgggggtggctgtgaaagaaaataatggagaatcacttttctagacatctacctatacttaatctaagaaacaaagtaatctactgtaaagtactctgccccttgaaagaagtattaaaaagagtgaggatggatttagaaaaaaacatgaatttagaaatattcaaaatggtttttgtggcagattcaatattatgaattcacagatatttaaagaatgagaaacatagtaattagtagaaatgccagaaacagttcctggttcctcttgtgtttgacactaagaaaatagcaagagtgtgaaatctcagatacttatgaaatctcacagatgtaaggactcaagtgtagaagaaaatatccccttcttacaaaaagaaatgtcaatttatggagtttgtgggaaatagggcaagaattcttatgcttatgagagccaagtagtcagtggaagagagtagagctcaaaactggattatcaccttagcaacttagaatagtttgaaatagaaaaaaagtatttaatttggatctggatctgttaagatatgcacagtctattttttgtatagtattggaaaataaaaatgctataatttgggtatgggttcttttgtatacattacctgcccattgaggaaaggggcaagtccattatgcaacttctctccaaacccttcatattctggatatgatacttaaagagccatgagcagctacattctgcctatcagaaggcatttattaaatgactgcttgctgaagatgtgtccaaagagatcctacattaaggtcatttgtcagaatgatgtttgtgtttgtttagagttggctgacctccaactcctggggtcaaggaatcctactgccttagcttcccaaatagctaggactataggcatgcacccggccatgtgttttatttatagctcttaaagcccagatgaagaaatcacatttttgcccatagtgaagaaacatttggccattgattagtccttattttcagtgactgtcctgttttcattagattagagagaccctgtgtgggccacagttaatataaaccattatcacttttaagtaaacctgcacatcttagatttcataatttccttattgttctgactcaaaatgaactaagagcttttcactttttgtttgtaagttctcagagagtcgggtctgcaagtgcttttgcctgccaggattttgtactcaaataaatgctatttggcaactaaaattcttgccagctctcatgtaattttgatgttactgaggttggttggtagtttattttattaattttgtggttcttctatcatatagaaaaagccaaatacagttttgtttgaatatttgtaaa

SEQ ID NO: 196393 - DNA, 2563 bp, Homo sapiens
  Payload ID: 18752
  Gene Name: tumor protein D52
  Uniprot ID: P55327
  ENST ID: ENST00000379097
  CDS Start-End: 364-1038
gcctgaactgtttgtacctctgggccatattgcagaaccctgcccttctttgttgactgaggaaagctcgctccctgcccaggtttttcattgttgatcgaaattaacaccaggtggtgaatagagcccctcctaaggttgctcaggataaatcatttattaaataggtctgcttatcaggaggggcgtgaaggctcccaaaaggaaatgctggcacctgggcccagaagccagggcctctaactcctggggttgatttcttcagtgaagttgcaccctacaaagggaatatggccaaagcggcactcaactgaaggctgatatcaggcgattagacagccatgcattctgcgtttgtctggaatggattgtagagagatggacttatatgaggactaccagtccccgtttgattttgatgcaggagtgaacaaaagctatctctacttgtctcctagtggaaattcatctccacccggatcacctactcttcagaaatttggtctgctgagaacagacccagtccctgaggaaggagaagatgttgctgccacgatcagtgccacagagaccctctcggaagaggagcaggaagagctaagaagagaacttgcaaaggtagaagaagaaatccagactctgtctcaagtgttagcagcaaaagagaagcatctagcagagatcaagcggaaacttggaatcaattctctacaggaactaaaacagaacattgccaaagggtggcaagacgtgacagcaacatctgcttacaagaagacatctgaaaccttatcccaggctggacagaaggcctcagctgctttttcgtctgttggctcagtcatcaccaaaaagctggaagatgtaaaaaactccccaacttttaaatcatttgaagaaaaggtcgaaaacttaaagtctaaagtagggggaaccaagcctgctggtggtgattttggagaagtcttgaattcggctgcaaatgctagtgccaccaccacggagcctcttccagaaaagacacaggagagcctgtgagattcctacctttgttctgctacccactgccagatgctgcaagcgaggtccaagcacatcttgtcaacatgcattgccatgaatttctaccagatgtgcttttatttagctttacatattcctttgaccaaatagtttgtgggttaaacaaaatgaaaatatcttcacctctattcttgggaaacaccctttagtgtacatttatgttcctttatttaggaaacaccattataaaaacacttatagtaaatggggacattcactataatgatctaagaagctacagattgtcatagttgttttcctgctttacaaaattgctccagatctggaatgccagtttgacctttgtcttctataatatttcctttttttcccctctttgaatctctgtatatttgattcttaactaaaattgttctcttaaatattctgaatcctggtaattaaaagtttgggtgtattttctttacctccaaggaaagaactactagctacaaaaaatattttggaataagcattgttttggtataaggtacatattttggttgaagacaccagactgaagtaaacagctgtgcatccaatttattatagttttgtaagtaacaatatgtaatcaaacttctaggtgacttgagagtggaacctcctatatcattatttagcaccgtttgtgacagtaaccatttcagtgtattgtttattataccacttatatcaacttatttttcaccaggttaaaattttaatttctacaaaataacattctgaatcaagcacactgtatgttcagtaggttgaactatgaacactgtcatcaatgttcagttcaaaagcctgaaagtttagatctagaagctggtaaaaatgacaatatcaatcacattaggggaaccattgttgtcttcacttaatccatttagcactatttaaaataagcacaccaagttatatgactaatataacttgaaaattttttatactgaggggttggtgataactcttgaggatgtaatgcattaataaaaatcaactcatcattttctacttgttttcaatgtgttggaaactgtaaaatgatactgtagaacctgtctcctactttgaaaactgaatgtcagggctgagtgaatcaaagtgtctagacatatttgcatagaggccaaggtattctattctaataactgcttactcaacactaccaccttttccttatactgtatatgattatggcctacaatgttgtatttgttatttattaaattgtgattgttttattattgtttatgccaaatgttaactgccaagcttggagtgacctaaagcattttttaaaagcatggctagatttacttcagtataaattatcttatgaaaaccaaattttaaaagccacaggtgttgattgttataaaataacatgctgccattcttgattgctagagtttttgttagtactttggatgcaattaaaactatgtgctatcacatgtgaaaagcttaataaattccatctatcagt

SEQ ID NO: 196394 - DNA, 4339 bp, Homo sapiens
  Payload ID: 18752
  Gene Name: tumor protein D52
  Uniprot ID: P55327
  ENST ID: ENST00000448733
  CDS Start-End: 379-1095
cagtgtctgatgtttgcctgaactgtttgtacctctgggccatattgcagaaccctgcccttctttgttgactgaggaaagctcgctccctgcccaggtttttcattgttgatcgaaattaacaccaggtggtgaatagagcccctcctaaggttgctcaggataaatcatttattaaataggtctgcttatcaggaggggcgtgaaggctcccaaaaggaaatgctggcacctgggcccagaagccagggcctctaactcctggggttgatttcttcagtgaagttgcaccctacaaagggaatatggccaaagcggcactcaactgaaggctgatatcaggcgattagacagccatgcattctgcgtttgtctggaatggattgtagagagatggacttatatgaggactaccagtccccgtttgattttgatgcaggagtgaacaaaagctatctctacttgtctcctagtggaaattcatctccacccggatcacctactcttcagaaatttggtctgctgagaacagacccagtccctgaggaaggagaagatgttgctgccacgatcagtgccacagagaccctctcggaagaggagcaggaagagctaagaagagaacttgcaaaggtagaagaagaaatccagactctgtctcaagtgttagcagcaaaagagaagcatctagcagagatcaagcggaaacttggaatcaattctctacaggaactaaaacagaacattgccaaagggtggcaagacgtgacagcaacatctgcttacaagaagacatctgaaaccttatcccaggctggacagaaggcctcagctgctttttcgtctgttggctcagtcatcaccaaaaagctggaagatgtaaatatacgttccattcagcattcaattagcatgcctgctatgagaaactccccaacttttaaatcatttgaagaaaaggtcgaaaacttaaagtctaaagtagggggaaccaagcctgctggtggtgattttggagaagtcttgaattcggctgcaaatgctagtgccaccaccacggagcctcttccagaaaagacacaggagagcctgtgagattcctacctttgttctgctacccactgccagatgctgcaagcgaggtccaagcacatcttgtcaacatgcattgccatgaatttctaccagatgtgcttttatttagctttacatattcctttgaccaaatagtttgtgggttaaacaaaatgaaaatatcttcacctctattcttgggaaacaccctttagtgtacatttatgttcctttatttaggaaacaccattataaaaacacttatagtaaatggggacattcactataatgatctaagaagctacagattgtcatagttgttttcctgctttacaaaattgctccagatctggaatgccagtttgacctttgtcttctataatatttcctttttttcccctctttgaatctctgtatatttgattcttaactaaaattgttctcttaaatattctgaatcctggtaattaaaagtttgggtgtattttctttacctccaaggaaagaactactagctacaaaaaatattttggaataagcattgttttggtataaggtacatattttggttgaagacaccagactgaagtaaacagctgtgcatccaatttattatagttttgtaagtaacaatatgtaatcaaacttctaggtgacttgagagtggaacctcctatatcattatttagcaccgtttgtgacagtaaccatttcagtgtattgtttattataccacttatatcaacttatttttcaccaggttaaaattttaatttctacaaaataacattctgaatcaagcacactgtatgttcagtaggttgaactatgaacactgtcatcaatgttcagttcaaaagcctgaaagtttagatctagaagctggtaaaaatgacaatatcaatcacattaggggaaccattgttgtcttcacttaatccatttagcactatttaaaataagcacaccaagttatatgactaatataacttgaaaattttttatactgaggggttggtgataactcttgaggatgtaatgcattaataaaaatcaactcatcattttctacttgttttcaatgtgttggaaactgtaaaatgatactgtagaacctgtctcctactttgaaaactgaatgtcagggctgagtgaatcaaagtgtctagacatatttgcatagaggccaaggtattctattctaataactgcttactcaacactaccaccttttccttatactgtatatgattatggcctacaatgttgtatttgttatttattaaattgtgattgttttattattgtttatgccaaatgttaactgccaagcttggagtgacctaaagcattttttaaaagcatggctagatttacttcagtataaattatcttatgaaaaccaaattttaaaagccacaggtgttgattgttataaaataacatgctgccattcttgattgctagagtttttgttagtactttggatgcaattaaaactatgtgctatcacatgtgaaaagcttaataaattccatctatcagtagtataggtctcaatatttattatgagaccagtggtctggaaacagcttgttgtaccgaatcaactggagtctatgcttaaaaaaaaaaaatttttttttaaccatccttaaattattgcttaatggtatcatattaacatattctaaataagggctttaaggcacaggctgttgaagcattttctcagaggagtggatctgtagaagtctgtctttctatagaaatattgtgcttactcaagtgttaaattattttttctatgaactagtctacttcttaaaattcaaacatattcttttgatcacattgtttcttgagcatcctgccctgctactaacttttcaacaaggcaaaatggagtaaagtggcaatttctttagatgagtgaaataccctcaagtctcttttctgcccaaaaagggaaaagtgatagaaatgggggtggcaagtggggtgagtggatgaaggtgggtattgggggtggctgtgaaagaaaataatggagaatcacttttctagacatctacctatacttaatctaagaaacaaagtaatctactgtaaagtactctgccccttgaaagaagtattaaaaagagtgaggatggatttagaaaaaaacatgaatttagaaatattcaaaatggtttttgtggcagattcaatattatgaattcacagatatttaaagaatgagaaacatagtaattagtagaaatgccagaaacagttcctggttcctcttgtgtttgacactaagaaaatagcaagagtgtgaaatctcagatacttatgaaatctcacagatgtaaggactcaagtgtagaagaaaatatccccttcttacaaaaagaaatgtcaatttatggagtttgtgggaaatagggcaagaattcttatgcttatgagagccaagtagtcagtggaagagagtagagctcaaaactggattatcaccttagcaacttagaatagtttgaaatagaaaaaaagtatttaatttggatctggatctgttaagatatgcacagtctattttttgtatagtattggaaaataaaaatgctataatttgggtatgggttcttttgtatacattacctgcccattgaggaaaggggcaagtccattatgcaacttctctccaaacccttcatattctggatatgatacttaaagagccatgagcagctacattctgcctatcagaaggcatttattaaatgactgcttgctgaagatgtgtccaaagagatcctacattaaggtcatttgtcagaatgatgtttgtgtttgtttagagttggctgacctccaactcctggggtcaaggaatcctactgccttagcttcccaaatagctaggactataggcatgcacccggccatgtgttttatttatagctcttaaagcccagatgaagaaatcacatttttgcccatagtgaagaaacatttggccattgattagtccttattttcagtgactgtcctgttttcattagattagagagaccctgtgtgggccacagttaatataaaccattatcacttttaagtaaacctgcacatcttagatttcataatttccttattgttctgactcaaaatgaactaagagcttttcactttttgtttgtaagttctcagagagtcgggtctgcaagtgcttttgcctgccaggattttgtactcaaataaatgctatttggcaact

SEQ ID NO: 196395 - DNA, 1594 bp, Homo sapiens
  Payload ID: 18752
  Gene Name: tumor protein D52
  ENST ID: ENST00000519303
  CDS Start-End: 603-785
gtgcgtgtgtgggggagagggagagaaggttctgggaggtggcgaaggggctagcgtcaggggctggcggccgtgatgcgctttgggtggaaagccgcgtgaagggagcacggcgcagccagctcctgtaagtgactggaaccaggaacagaggacagtgagtcgctctcgtccctccaggtctgctgagaacagacccagtccctgaggaaggagaagatgttgctgccacgatcagtgccacagagaccctctcggaagaggagcaggaagagctaagaagagaacttgcaaaggtagaagaagaaatccagactctgtctcaagtgttagcagcaaaagagaagcatctagcagagatcaagcggaaacttggaatcaattctctacaggaactaaaacagaacattgccaaagggtggcaagacgtgacagcaacatctgcttacaagaagacatctgaaaccttatcccaggctggacagaaggcctcagctgctttttcgtctgttggctcagtcatcaccaaaaagctggaagatgtaaaattgcaagccttttcacattcctttagtatacgttccattcagcattcaattagcatgcctgctatgagaaactccccaacttttaaatcatttgaagaaaaggtcgaaaacttaaagtctaaagtagggggaaccaagcctgctggtggtgattttggagaagtcttgaattcggctgcaaatgctagtgccaccaccacggagcctcttccagaaaagacacaggagagcctgtgagattcctacctttgttctgctacccactgccagatgctgcaagcgaggtccaagcacatcttgtcaacatgcattgccatgaatttctaccagatgtgcttttatttagctttacatattcctttgaccaaatagtttgtgggttaaacaaaatgaaaatatcttcacctctattcttgggaaacaccctttagtgtacatttatgttcctttatttaggaaacaccattataaaaacacttatagtaaatggggacattcactataatgatctaagaagctacagattgtcatagttgttttcctgctttacaaaattgctccagatctggaatgccagtttgacctttgtcttctataatatttcctttttttcccctctttgaatctctgtatatttgattcttaactaaaattgttctcttaaatattctgaatcctggtaattaaaagtttgggtgtattttctttacctccaaggaaagaactactagctacaaaaaatattttggaataagcattgttttggtataaggtacatattttggttgaagacaccagactgaagtaaacagctgtgcatccaatttattatagttttgtaagtaacaatatgtaatcaaacttctaggtgacttgagagtggaacctcctatatcattatttagcaccgtttgtgacagtaaccatttcagtgtattgtttattataccacttatatcaacttatttttcaccaggttaaaattttaatttctacaaaataacattctgaatcaagcacactgtatgttcagtaggttgaactat

SEQ ID NO: 196396 - DNA, 2638 bp, Homo sapiens
  Payload ID: 18752
  Gene Name: tumor protein D52
  Uniprot ID: P55327
  ENST ID: ENST00000520527
  CDS Start-End: 364-1107
gcctgaactgtttgtacctctgggccatattgcagaaccctgcccttctttgttgactgaggaaagctcgctccctgcccaggtttttcattgttgatcgaaattaacaccaggtggtgaatagagcccctcctaaggttgctcaggataaatcatttattaaataggtctgcttatcaggaggggcgtgaaggctcccaaaaggaaatgctggcacctgggcccagaagccagggcctctaactcctggggttgatttcttcagtgaagttgcaccctacaaagggaatatggccaaagcggcactcaactgaaggctgatatcaggcgattagacagccatgcattctgcgtttgtctggaatggattgtagagagatggacttatatgaggactaccagtccccgtttgattttgatgcaggagtgaacaaaagctatctctacttgtctcctagtggaaattcatctccacccggatcacctactcttcagaaatttggtctgctgagaacagacccagtccctgaggaaggagaagatgttgctgccacgatcagtgccacagagaccctctcggaagaggagcaggaagagctaagaagagaacttgcaaaggtagaagaagaaatccagactctgtctcaagtgttagcagcaaaagagaagcatctagcagagatcaagcggaaacttggaatcaattctctacaggaactaaaacagaacattgccaaagggtggcaagacgtgacagcaacatctgcttacaagaagacatctgaaaccttatcccaggctggacagaaggcctcagctgctttttcgtctgttggctcagtcatcaccaaaaagctggaagatgtaaaattgcaagccttttcacattcctttagtatacgttccattcagcattcaattagcatgcctgctatgagaaactccccaacttttaaatcatttgaagaaaaggtcgaaaacttaaagtctaaagtagggggaaccaagcctgctggtggtgattttggagaagtcttgaattcggctgcaaatgctagtgccaccaccacggagcctcttccagaaaagacacaggagagcctgtgagattcctacctttgttctgctacccactgccagatgctgcaagcgaggtccaagcacatcttgtcaacatgcattgccatgaatttctaccagatgtgcttttatttagctttacatattcctttgaccaaatagtttgtgggttaaacaaaatgaaaatatcttcacctctattcttgggaaacaccctttagtgtacatttatgttcctttatttaggaaacaccattataaaaacacttatagtaaatggggacattcactataatgatctaagaagctacagattgtcatagttgttttcctgctttacaaaattgctccagatctggaatgccagtttgacctttgtcttctataatatttcctttttttcccctctttgaatctctgtatatttgattcttaactaaaattgttctcttaaatattctgaatcctggtaattaaaagtttgggtgtattttctttacctccaaggaaagaactactagctacaaaaaatattttggaataagcattgttttggtataaggtacatattttggttgaagacaccagactgaagtaaacagctgtgcatccaatttattatagttttgtaagtaacaatatgtaatcaaacttctaggtgacttgagagtggaacctcctatatcattatttagcaccgtttgtgacagtaaccatttcagtgtattgtttattataccacttatatcaacttatttttcaccaggttaaaattttaatttctacaaaataacattctgaatcaagcacactgtatgttcagtaggttgaactatgaacactgtcatcaatgttcagttcaaaagcctgaaagtttagatctagaagctggtaaaaatgacaatatcaatcacattaggggaaccattgttgtcttcacttaatccatttagcactatttaaaataagcacaccaagttatatgactaatataacttgaaaattttttatactgaggggttggtgataactcttgaggatgtaatgcattaataaaaatcaactcatcattttctacttgttttcaatgtgttggaaactgtaaaatgatactgtagaacctgtctcctactttgaaaactgaatgtcagggctgagtgaatcaaagtgtctagacatatttgcatagaggccaaggtattctattctaataactgcttactcaacactaccaccttttccttatactgtatatgattatggcctacaatgttgtatttgttatttattaaattgtgattgttttattattgtttatgccaaatgttaactgccaagcttggagtgacctaaagcattttttaaaagcatggctagatttacttcagtataaattatcttatgaaaaccaaattttaaaagccacaggtgttgattgttataaaataacatgctgccattcttgattgctagagtttttgttagtactttggatgcaattaaaactatgtgctatcacatgtgaaaagcttaataaattccatctatcagtagtata

SEQ ID NO: 196397 - DNA, 2596 bp, Homo sapiens
  Payload ID: 18752
  Gene Name: tumor protein D52
  Uniprot ID: P55327
  ENST ID: ENST00000517427
  CDS Start-End: 364-1065
gcctgaactgtttgtacctctgggccatattgcagaaccctgcccttctttgttgactgaggaaagctcgctccctgcccaggtttttcattgttgatcgaaattaacaccaggtggtgaatagagcccctcctaaggttgctcaggataaatcatttattaaataggtctgcttatcaggaggggcgtgaaggctcccaaaaggaaatgctggcacctgggcccagaagccagggcctctaactcctggggttgatttcttcagtgaagttgcaccctacaaagggaatatggccaaagcggcactcaactgaaggctgatatcaggcgattagacagccatgcattctgcgtttgtctggaatggattgtagagagatggacttatatgaggactaccagtccccgtttgattttgatgcaggagtgaacaaaagctatctctacttgtctcctagtggaaattcatctccacccggatcacctactcttcagaaatttggtctgctgagaacagacccagtccctgaggaaggagaagatgttgctgccacgatcagtgccacagagaccctctcggaagaggagcaggaagagctaagaagagaacttgcaaaggtagaagaagaaatccagactctgtctcaagtgttagcagcaaaagagaagcatctagcagagatcaagcggaaacttggaatcaattctctacaggaactaaaacagaacattgccaaagggtggcaagacgtgacagcaacatctgcttacaagaagacatctgaaaccttatcccaggctggacagaaggcctcagctgctttttcgtctgttggctcagtcatcaccaaaaagctggaagatgtaaaattgcaagccttttcacattcctttagaaactccccaacttttaaatcatttgaagaaaaggtcgaaaacttaaagtctaaagtagggggaaccaagcctgctggtggtgattttggagaagtcttgaattcggctgcaaatgctagtgccaccaccacggagcctcttccagaaaagacacaggagagcctgtgagattcctacctttgttctgctacccactgccagatgctgcaagcgaggtccaagcacatcttgtcaacatgcattgccatgaatttctaccagatgtgcttttatttagctttacatattcctttgaccaaatagtttgtgggttaaacaaaatgaaaatatcttcacctctattcttgggaaacaccctttagtgtacatttatgttcctttatttaggaaacaccattataaaaacacttatagtaaatggggacattcactataatgatctaagaagctacagattgtcatagttgttttcctgctttacaaaattgctccagatctggaatgccagtttgacctttgtcttctataatatttcctttttttcccctctttgaatctctgtatatttgattcttaactaaaattgttctcttaaatattctgaatcctggtaattaaaagtttgggtgtattttctttacctccaaggaaagaactactagctacaaaaaatattttggaataagcattgttttggtataaggtacatattttggttgaagacaccagactgaagtaaacagctgtgcatccaatttattatagttttgtaagtaacaatatgtaatcaaacttctaggtgacttgagagtggaacctcctatatcattatttagcaccgtttgtgacagtaaccatttcagtgtattgtttattataccacttatatcaacttatttttcaccaggttaaaattttaatttctacaaaataacattctgaatcaagcacactgtatgttcagtaggttgaactatgaacactgtcatcaatgttcagttcaaaagcctgaaagtttagatctagaagctggtaaaaatgacaatatcaatcacattaggggaaccattgttgtcttcacttaatccatttagcactatttaaaataagcacaccaagttatatgactaatataacttgaaaattttttatactgaggggttggtgataactcttgaggatgtaatgcattaataaaaatcaactcatcattttctacttgttttcaatgtgttggaaactgtaaaatgatactgtagaacctgtctcctactttgaaaactgaatgtcagggctgagtgaatcaaagtgtctagacatatttgcatagaggccaaggtattctattctaataactgcttactcaacactaccaccttttccttatactgtatatgattatggcctacaatgttgtatttgttatttattaaattgtgattgttttattattgtttatgccaaatgttaactgccaagcttggagtgacctaaagcattttttaaaagcatggctagatttacttcagtataaattatcttatgaaaaccaaattttaaaagccacaggtgttgattgttataaaataacatgctgccattcttgattgctagagtttttgttagtactttggatgcaattaaaactatgtgctatcacatgtgaaaagcttaataaattccatctatcagtagtata

SEQ ID NO: 196398 - DNA, 2702 bp, Homo sapiens
  Payload ID: 18752
  Gene Name: tumor protein D52
  Uniprot ID: P55327
  ENST ID: ENST00000517462
  CDS Start-End: 364-819
gcctgaactgtttgtacctctgggccatattgcagaaccctgcccttctttgttgactgaggaaagctcgctccctgcccaggtttttcattgttgatcgaaattaacaccaggtggtgaatagagcccctcctaaggttgctcaggataaatcatttattaaataggtctgcttatcaggaggggcgtgaaggctcccaaaaggaaatgctggcacctgggcccagaagccagggcctctaactcctggggttgatttcttcagtgaagttgcaccctacaaagggaatatggccaaagcggcactcaactgaaggctgatatcaggcgattagacagccatgcattctgcgtttgtctggaatggattgtagagagatggacttatatgaggactaccagtccccgtttgattttgatgcaggagtgaacaaaagctatctctacttgtctcctagtggaaattcatctccacccggatcacctactcttcagaaatttggtctgctgagaacagacccagtccctgaggaaggagaagatgttgctgccacgatcagtgccacagagaccctctcggaagaggagcaggaagagctaagaagagaacttgcaaaggtagaagaagaaatccagactctgtctcaagtgttagcagcaaaagagaagcatctagcagagatcaagcggaaacttggaatcaattctctacaggaactaaaacagaacattgccaaagggtggcaagacgtgacagcaacatctgcgaggagcaagcttctagcagcagaaaccgaactgctctgtcttctgtattgagagccatctgcagagctgttacaagaagacatctgaaaccttatcccaggctggacagaaggcctcagctgctttttcgtctgttggctcagtcatcaccaaaaagctggaagatgtaaaattgcaagccttttcacattcctttagtatacgttccattcagcattcaattagcatgcctgctatgagaaactccccaacttttaaatcatttgaagaaaaggtcgaaaacttaaagtctaaagtagggggaaccaagcctgctggtggtgattttggagaagtcttgaattcggctgcaaatgctagtgccaccaccacggagcctcttccagaaaagacacaggagagcctgtgagattcctacctttgttctgctacccactgccagatgctgcaagcgaggtccaagcacatcttgtcaacatgcattgccatgaatttctaccagatgtgcttttatttagctttacatattcctttgaccaaatagtttgtgggttaaacaaaatgaaaatatcttcacctctattcttgggaaacaccctttagtgtacatttatgttcctttatttaggaaacaccattataaaaacacttatagtaaatggggacattcactataatgatctaagaagctacagattgtcatagttgttttcctgctttacaaaattgctccagatctggaatgccagtttgacctttgtcttctataatatttcctttttttcccctctttgaatctctgtatatttgattcttaactaaaattgttctcttaaatattctgaatcctggtaattaaaagtttgggtgtattttctttacctccaaggaaagaactactagctacaaaaaatattttggaataagcattgttttggtataaggtacatattttggttgaagacaccagactgaagtaaacagctgtgcatccaatttattatagttttgtaagtaacaatatgtaatcaaacttctaggtgacttgagagtggaacctcctatatcattatttagcaccgtttgtgacagtaaccatttcagtgtattgtttattataccacttatatcaacttatttttcaccaggttaaaattttaatttctacaaaataacattctgaatcaagcacactgtatgttcagtaggttgaactatgaacactgtcatcaatgttcagttcaaaagcctgaaagtttagatctagaagctggtaaaaatgacaatatcaatcacattaggggaaccattgttgtcttcacttaatccatttagcactatttaaaataagcacaccaagttatatgactaatataacttgaaaattttttatactgaggggttggtgataactcttgaggatgtaatgcattaataaaaatcaactcatcattttctacttgttttcaatgtgttggaaactgtaaaatgatactgtagaacctgtctcctactttgaaaactgaatgtcagggctgagtgaatcaaagtgtctagacatatttgcatagaggccaaggtattctattctaataactgcttactcaacactaccaccttttccttatactgtatatgattatggcctacaatgttgtatttgttatttattaaattgtgattgttttattattgtttatgccaaatgttaactgccaagcttggagtgacctaaagcattttttaaaagcatggctagatttacttcagtataaattatcttatgaaaaccaaattttaaaagccacaggtgttgattgttataaaataacatgctgccattcttgattgctagagtttttgttagtactttggatgcaattaaaactatgtgctatcacatgtgaaaagcttaataaattccatctatcagt

SEQ ID NO: 196399 - DNA, 2856 bp, Homo sapiens
  Payload ID: 18752
  Gene Name: tumor protein D52
  Uniprot ID: P55327
  ENST ID: ENST00000518937
  CDS Start-End: 217-840
aggtcgaccgggtcaggtggttgggtgacgccccaggaaagcgctccaggccgagggcgggcggcgccgccgcgcccgacgcctctgggggtggggacttcgcgggagtcgccggcggaggcgaggaggagctctgcgcggcgcggcgggcgatccgagccgggacgggctgcaggcgggggtgctgcagaggacacgaggcggcgggctggagacatggaccgcggcgagcaaggtctgctgagaacagacccagtccctgaggaaggagaagatgttgctgccacgatcagtgccacagagaccctctcggaagaggagcaggaagagctaagaagagaacttgcaaaggtagaagaagaaatccagactctgtctcaagtgttagcagcaaaagagaagcatctagcagagatcaagcggaaacttggaatcaattctctacaggaactaaaacagaacattgccaaagggtggcaagacgtgacagcaacatctgcttacaagaagacatctgaaaccttatcccaggctggacagaaggcctcagctgctttttcgtctgttggctcagtcatcaccaaaaagctggaagatgtaaaattgcaagccttttcacattcctttagtatacgttccattcagcattcaattagcatgcctgctatgagaaactccccaacttttaaatcatttgaagaaaaggtcgaaaacttaaagtctaaagtagggggaaccaagcctgctggtggtgattttggagaagtcttgaattcggctgcaaatgctagtgccaccaccacggagcctcttccagaaaagacacaggagagcctgtgagattcctacctttgttctgctacccactgccagatgctgcaagcgaggtccaagcacatcttgtcaacatgcattgccatgaatttctaccagatgtgcttttatttagctttacatattcctttgaccaaatagtttgtgggttaaacaaaatgaaaatatcttcacctctattcttgggaaacaccctttagtgtacatttatgttcctttatttaggaaacaccattataaaaacacttatagtaaatggggacattcactataatgatctaagaagctacagattgtcatagttgttttcctgctttacaaaattgctccagatctggaatgccagtttgacctttgtcttctataatatttcctttttttcccctctttgaatctctgtatatttgattcttaactaaaattgttctcttaaatattctgaatcctggtaattaaaagtttgggtgtattttctttacctccaaggaaagaactactagctacaaaaaatattttggaataagcattgttttggtataaggtacatattttggttgaagacaccagactgaagtaaacagctgtgcatccaatttattatagttttgtaagtaacaatatgtaatcaaacttctaggtgacttgagagtggaacctcctatatcattatttagcaccgtttgtgacagtaaccatttcagtgtattgtttattataccacttatatcaacttatttttcaccaggttaaaattttaatttctacaaaataacattctgaatcaagcacactgtatgttcagtaggttgaactatgaacactgtcatcaatgttcagttcaaaagcctgaaagtttagatctagaagctggtaaaaatgacaatatcaatcacattaggggaaccattgttgtcttcacttaatccatttagcactatttaaaataagcacaccaagttatatgactaatataacttgaaaattttttatactgaggggttggtgataactcttgaggatgtaatgcattaataaaaatcaactcatcattttctacttgttttcaatgtgttggaaactgtaaaatgatactgtagaacctgtctcctactttgaaaactgaatgtcagggctgagtgaatcaaagtgtctagacatatttgcatagaggccaaggtattctattctaataactgcttactcaacactaccaccttttccttatactgtatatgattatggcctacaatgttgtatttgttatttattaaattgtgattgttttattattgtttatgccaaatgttaactgccaagcttggagtgacctaaagcattttttaaaagcatggctagatttacttcagtataaattatcttatgaaaaccaaattttaaaagccacaggtgttgattgttataaaataacatgctgccattcttgattgctagagtttttgttagtactttggatgcaattaaaactatgtgctatcacatgtgaaaagcttaataaattccatctatcagtagtataggtctcaatatttattatgagaccagtggtctggaaacagcttgttgtaccgaatcaactggagtctatgcttaaaaaaaaaaaatttttttttaaccatccttaaattattgcttaatggtatcatattaacatattctaaataagggctttaaggcacaggctgttgaagcattttctcagaggagtggatctgtagaagtctgtctttctatagaaatattgtgcttactcaagtgttaaattattttttctatgaactagtctacttcttaaaattcaaacatattcttttgatcacattgtttcttgagcatcctgccctgctactaacttttcaacaaggcaaaatggagtaaagtggcaatttctttagatgagtgaaataccctcaagtctcttttctgcccaaaaagggaaaagtgatagaaatgggggtggcaagtggggtgagtggatgaaggtgggtattgggggtggctgtg

SEQ ID NO: 196400 - DNA, 587 bp, Homo sapiens
  Payload ID: 18752
  Gene Name: tumor protein D52
  ENST ID: ENST00000523753
  CDS Start-End: 66-182
gatccgagccgggacgggctgcaggcgggggtgctgcagaggacacgaggcggcgggctggagacatggaccgcggcgagcaagctttttatttcatctggaatttctggcttgaattagggaaagatttatcttttctccactcatataaaatgtctgctgagaacagacccagtccctgaggaaggagaagatgttgctgccacgatcagtgccacagagaccctctcggaagaggagcaggaagagctaagaagagaacttgcaaaggtagaagaagaaatccagactctgtctcaagtgttagcagcaaaagagaagcatctagcagagatcaagcggaaacttggaatcaattctctacaggaactaaaacagaacattgccaaagggtggcaagacgtgacagcaacatctgcttacaagaagacatctgaaaccttatcccaggctggacagaaggcctcagctgctttttcgtctgttggctcagtcatcaccaaaaagctggaagatgtaaaattgcaagccttttcacattcctttagtatacgttccattcagcattcaattagcatgcctgctat

SEQ ID NO: 196401 - DNA, 723 bp, Homo sapiens
  Payload ID: 18752
  Gene Name: tumor protein D52
  ENST ID: ENST00000521241
  CDS Start-End: 131-466
gggggtggggacttcgcgggagtcgccggcggaggcgaggaggagctctgcgcggcgcggcgggcgatccgagccgggacgggctgcaggcgggggtgctgcagaggacacgaggcggcgggctggagacatggaccgcggcgagcaaggtctgctgagaacagacccagtccctgaggaaggagaagatgttgctgccacgatcagtgccacagagaccctctcggaagaggagcaggaagagctaagaagagaacttgcaaaggtagaagaagaaatccagactctgtctcaagtgttagcagcaaaagagaagcatctagcagagatcaagcggaaacttggaatcaattctctacaggaactaaaacagaacattgccaaagggtggcaagacgtgacagcaacatctgcgaggagcaagcttctagcagcagaaaccgaactgctctgtcttctgtattgagagccatctgcagagctgttacaagaagacatctgaaaccttatcccaggctggacagaaggcctcagctgctttttcgtctgttggctcagtcatcaccaaaaagctggaagatgtaaaattgcaagccttttcacattcctttagtatacgttccattcagcattcaattagcatgcctgctatgagaaactccccaacttttaaatcatttgaagaaaaggtcgaaaacttaaagtctaaagtagggggaacca

SEQ ID NO: 196402 - DNA, 584 bp, Homo sapiens
  Payload ID: 18752
  Gene Name: tumor protein D52
  ENST ID: ENST00000518517
  CDS Start-End: 29-145
agaggacacgaggcggcgggctggagacatggaccgcggcgagcaagctttttatttcatctggaatttctggcttgaattagggaaagatttatcttttctccactcatataaaatgtctgctgagaacagacccagtccctgaggaaggagaagatgttgctgccacgatcagtgccacagagaccctctcggaagaggagcaggaagagctaagaagagaacttgcaaaggtagaagaagaaatccagactctgtctcaagtgttagcagcaaaagagaagcatctagcagagatcaagcggaaacttggaatcaattctctacaggaactaaaacagaacattgccaaagggtggcaagacgtgacagcaacatctgcttacaagaagacatctgaaaccttatcccaggctggacagaaggcctcagctgctttttcgtctgttggctcagtcatcaccaaaaagctggaagatgtaaaaaactccccaacttttaaatcatttgaagaaaaggtcgaaaacttaaagtctaaagtagggggaaccaagcctgctggtggtgattttggagaagtcttg

SEQ ID NO: 196403 - DNA, 785 bp, Homo sapiens
  Payload ID: 18752
  Gene Name: tumor protein D52
  ENST ID: ENST00000521354
  CDS Start-End: 114-299
gggagtcgccggcggaggcgaggaggagctctgcgcggcgcggcgggcgatccgagccgggacgggctgcaggcgggggtgctgcagaggacacgaggcggcgggctggagacatggaccgcggcgagcaaggtagaagaagaaatccagactctgtctcaagtgttagcagcaaaagagaagcatctagcagagatcaagcggaaacttggaatcaattctctacaggaactaaaacagaacattgccaaagggtggcaagacgtgacagcaacatctgcttacaagaagacatctgaaaccttatcccaggctggacagaaggcctcagctgctttttcgtctgttggctcagtcatcaccaaaaagctggaagatgtaaaaaactccccaacttttaaatcatttgaagaaaaggtcgaaaacttaaagtctaaagtagggggaaccaagcctgctggtggtgattttggagaagtcttgaattcggctgcaaatgctagtgccaccaccacggagcctcttccagaaaagacacaggagagcctgtgagattcctacctttgttctgctacccactgccagatgctgcaagcgaggtccaagcacatcttgtcaacatgcattgccatgaatttctaccagatgtgcttttatttagctttacatattcctttgaccaaatagtttgtgggttaaacaaaatgaaaatatcttcacctctattcttgggaaacaccctttagtgtacatttatgttcctttatttaggaaacaccattata

SEQ ID NO: 196404 - DNA, 445 bp, Homo sapiens
  Payload ID: 18752
  Gene Name: tumor protein D52
  ENST ID: ENST00000520795
  CDS Start-End: 1-445
tcgggcttggactcgggctttggctcggcgcggggctgagcgcggcccggcggctcgagcaggtgccgagcctcctgggccggcgccgcaagttgcatctcccggatccggatctggcatcctggggccctggaaggagcggctctggcgggggcagatgggactgcatgtgtgagtgtctgctgagaacagacccagtccctgaggaaggagaagatgttgctgccacgatcagtgccacagagaccctctcggaagaggagcaggaagagctaagaagagaacttgcaaaggtagaagaagaaatccagactctgtctcaagtgttagcagcaaaagagaagcatctagcagagatcaagcggaaacttggaatcaattctctacaggaactaaaacagaacattgccaaagggtggcaagacgtgacagcaacatctgcgta

SEQ ID NO: 196405 - DNA, 1468 bp, Homo sapiens
  Payload ID: 18753
  Gene Name: tumor protein D52-like 1
  ENST ID: ENST00000304877
  CDS Start-End: 304-933
gcccttatagcgccgggagtgggtgccttccgccggctgtacagagcgccggcaggtggcgcccagcggcgagcttgttccagcttggtttgggccaggtggactggaaggggcggaggtaaccagaagcggctagtggcggctgcctgcgtccccaaccccctccgcgcagcgctcgcgacacgcgtgccaggagtgggagcgagcggcggggccagctgcgttctgagcctgggcgcagctgccatctgctctgggaagcaccagggtgtccccgccgccctcagctcgaagtcagccaccatggaggcgcaggcacaaggtttgttggagactgaaccgttgcaaggaacagacgaagatgcagtagccagtgctgacttctctagcatgctctctgaggaggaaaaggaagagttaaaagcagagttagttcagctagaagacgaaattacaacactacgacaagttttgtcagcgaaagaaaggcatctagttgagataaaacaaaaactcggcatgaacctgatgaatgaattaaaacagaacttcagcaaaagctggcatgacatgcagactaccactgcctacaagaaaacacatgaaaccctgagtcacgcagggcaaaaggcaactgcagctttcagcaacgttggaacggccatcagcaagaagttcggagacatgaggtctcactccatcggttactccattcgccattccataagtatgcctgctatgaggaattctcctactttcaaatcatttgaggagagggttgagacaactgtcacaagcctcaagacgaaagtaggcggtacgaaccctaatggaggcagttttgaggaggtcctcagctccacggcccatgccagtgcccagagcttggcaggaggctcccggcggaccaaggaggaggagctgcagtgctaagtccagccagcgtgcagctgcatccagaaaccggccactacccagcccatctctgcctgtgcttatccagataagaagaccaaaatcccgctgggaaaaacccaggccttgacattgttattcaaatggcccctccagaaagtttaatgatttccatttgtatttgtgttgatgatggaccacttgaccatcacatttcagtattcatagatgactgtcacattttaaaatgttcccacttgagcaggtacacaactggtcataattcctgtctgtgtaattcgatgtatatttttccaaacatgtagctattgtttgctttgatttttgcttggcctcctttatgatgtgcatgtccttgaaggctgaatgaacagtccctttcagttcagcagatcaacaggatggagctcttcatgactgtctccagcaataggatgatttactataaatttcatccaactacttgtgatctctctcacctacatcaattatgtatgttaatttcagcaattaaaagaattgattttaatga

SEQ ID NO: 196406 - DNA, 2147 bp, Homo sapiens
  Payload ID: 18753
  Gene Name: tumor protein D52-like 1
  Uniprot ID: Q16890
  ENST ID: ENST00000368388
  CDS Start-End: 188-583
aggtaaccagaagcggctagtggcggctgcctgcgtccccaaccccctccgcgcagcgctcgcgacacgcgtgccaggagtgggagcgagcggcggggccagctgcgttctgagcctgggcgcagctgccatctgctctgggaagcaccagggtgtccccgccgccctcagctcgaagtcagccaccatggaggcgcaggcacaaggtttgttggagactgaaccgttgcaaggaacagacgaagatgcagtagccagtgctgacttctctagcatgctctctgaggaggaaaaggaagagttaaaagcagagttagttcagctagaagacgaaattacaacactacgacaagttttgtcagcgaaagaaaggcatctagttgagataaaacaaaaactcggcatgaacctgatgaatgaattaaaacagaacttcagcaaaagctggcatgacatgcagactaccactgcctacaagaaaacacatgaaaccctgagtcacgcagggcaaaaggcaactgcagctttcagcaacgttggaacggccatcagcaagaagttcggagacatgagacgaaagtaggcggtacgaaccctaatggaggcagttttgaggaggtcctcagctccacggcccatgccagtgcccagagcttggcaggaggctcccggcggaccaaggaggaggagctgcagtgctaagtccagccagcgtgcagctgcatccagaaaccggccactacccagcccatctctgcctgtgcttatccagataagaagaccaaaatcccgctgggaaaaacccaggccttgacattgttattcaaatggcccctccagaaagtttaatgatttccatttgtatttgtgttgatgatggaccacttgaccatcacatttcagtattcatagatgactgtcacattttaaaatgttcccacttgagcaggtacacaactggtcataattcctgtctgtgtaattcgatgtatatttttccaaacatgtagctattgtttgctttgatttttgcttggcctcctttatgatgtgcatgtccttgaaggctgaatgaacagtccctttcagttcagcagatcaacaggatggagctcttcatgactgtctccagcaataggatgatttactataaatttcatccaactacttgtgatctctctcacctacatcaattatgtatgttaatttcagcaattaaaagaattgattttaatgactttgaattcttaatttctttgtcttaaaagttgctagttatgattttacagatgcaattttaaatcaacttttagccaggtgcggcggctcacacctgtaatcccaactattttggatgccaaggtgagaggattgcttgaggccaggagttaaagatcagcctgggcaacacagaccctgtctctacaaaaaaagaaaaaaattagccagacatagtgttgcttgcctgtagtcccagctactctagaggctgaggcaggaggattgcatgagcctaggagttcgaaactgcagtgagctatgattgcaccactgcactactccagcctgggtgacagagtgggacactgtctccaaaaatagtaataataagtagtcaacttttactgctaatttggtgaacatgagagaggatatgaaaataaatattacctcagctatcctaggatgttaaaataatctccaattttaaaattctctccaatctacatacagtagtagttagtcagataaaggatatccaaaaaagagatagctagaaaatgggagaagcagagttctgcaacccctttcagtttgtaaattgttcacatgtatgaaaataactggtatttatcaatccactcagatttctgcactaacttttatcttatatatcatatgtatctcttttctttttctaaatgggaacatatatttgttattaggtggcagagatatagccttaagatatatttgtaaaatgcacactgaatagacatccaacctaaaaaaaatcactatttaaaaagcccatataatatatacatatttgttagcatgctaattgttcatgttttgtgtttattaaatagaagtgatatatatgacattttgaagtaaagcacatctgaaaaattctactcaaa

SEQ ID NO: 196407 - DNA, 1308 bp, Homo sapiens
  Payload ID: 18753
  Gene Name: tumor protein D52-like 1
  Uniprot ID: Q16890
  ENST ID: ENST00000368402
  CDS Start-End: 220-654
ttggtttgggccaggtggactggaaggggcggaggtaaccagaagcggctagtggcggctgcctgcgtccccaaccccctccgcgcagcgctcgcgacacgcgtgccaggagtgggagcgagcggcggggccagctgcgttctgagcctgggcgcagctgccatctgctctgggaagcaccagggtgtccccgccgccctcagctcgaagtcagccaccatggaggcgcaggcacaaggtttgttggagactgaaccgttgcaaggaacagacgaagatgcagtagccagtgctgacttctctagcatgctctctgaggaggaaaaggaagagttaaaagcagagttagttcagctagaagacgaaattacaacactacgacaagttttgtcagcgaaagaaaggcatctagttgagataaaacaaaaactcggcatgaacctgatgaatgaattaaaacagaacttcagcaaaagctggcatgacatgcagactaccactgcctacaagaaaacacatgaaaccctgagtcacgcagggcaaaaggcaactgcagctttcagcaacgttggaacggccatcagcaagaagttcggagacatgagttactccattcgccattccataagtatgcctgctatgagacgaaagtaggcggtacgaaccctaatggaggcagttttgaggaggtcctcagctccacggcccatgccagtgcccagagcttggcaggaggctcccggcggaccaaggaggaggagctgcagtgctaagtccagccagcgtgcagctgcatccagaaaccggccactacccagcccatctctgcctgtgcttatccagataagaagaccaaaatcccgctgggaaaaacccaggccttgacattgttattcaaatggcccctccagaaagtttaatgatttccatttgtatttgtgttgatgatggaccacttgaccatcacatttcagtattcatagatgactgtcacattttaaaatgttcccacttgagcaggtacacaactggtcataattcctgtctgtgtaattcgatgtatatttttccaaacatgtagctattgtttgctttgatttttgcttggcctcctttatgatgtgcatgtccttgaaggctgaatgaacagtccctttcagttcagcagatcaacaggatggagctcttcatgactgtctccagcaataggatgatttactataaatttcatccaactacttgtgatctctctcacctacatcaattatgtatgttaatttcagcaattaaaagaattgattttaatga

SEQ ID NO: 196408 - DNA, 1165 bp, Homo sapiens
  Payload ID: 18753
  Gene Name: tumor protein D52-like 1
  Uniprot ID: Q16890
  ENST ID: ENST00000392482
  CDS Start-End: 208-516
ccttggtgtgtgcataaggccacatgacctcaggtcaggaataaaagcttagggctgagcagctcactctttggttgagaatccagttggctcccctggagtgaagttctacacagaccctggaggaaccaccccatctgtttgttggagactgaaccgttgcaaggaacagacgaagatgcagtagccagtgctgacttctctagcatgctctctgaggaggaaaaggaagagttaaaagcagagttagttcagctagaagacgaaattacaacactacgacaagttttgtcagcgaaagaaaggcatctagttgagataaaacaaaaactcggcatgaacctgatgaatgaattaaaacagaacttcagcaaaagctggcatgacatgcagactaccactgcctacaagaaaacacatgaaaccctgagtcacgcagggcaaaaggcaactgcagctttcagcaacgttggaacggccatcagcaagaagttcggagacatgagacgaaagtaggcggtacgaaccctaatggaggcagttttgaggaggtcctcagctccacggcccatgccagtgcccagagcttggcaggaggctcccggcggaccaaggaggaggagctgcagtgctaagtccagccagcgtgcagctgcatccagaaaccggccactacccagcccatctctgcctgtgcttatccagataagaagaccaaaatcccgctgggaaaaacccaggccttgacattgttattcaaatggcccctccagaaagtttaatgatttccatttgtatttgtgttgatgatggaccacttgaccatcacatttcagtattcatagatgactgtcacattttaaaatgttcccacttgagcaggtacacaactggtcataattcctgtctgtgtaattcgatgtatatttttccaaacatgtagctattgtttgctttgatttttgcttggcctcctttatgatgtgcatgtccttgaaggctgaatgaacagtccctttcagttcagcagatcaacaggatggagctcttcatgactgtctccagcaataggatgatttactataaatttcatccaactacttgtgatctctctcacctacatcaattatgtatgttaatttcagcaattaaaagaattgatttt

SEQ ID NO: 196409 - DNA, 811 bp, Homo sapiens
  Payload ID: 18753
  Gene Name: tumor protein D52-like 1
  Uniprot ID: Q16890
  ENST ID: ENST00000534199
  CDS Start-End: 221-529
gcggcttgtggctcccaagttagggagtgagaggatcgcccgccgagggggtggctccgcagcccggctgcgcgagacgcttcccgctcggggacccgccttccgaggccaggtgaacgttaccggccccctgacctccagcagatccacacgtttgttggagactgaaccgttgcaaggaacagacgaagatgcagtagccagtgctgacttctctagcatgctctctgaggaggaaaaggaagagttaaaagcagagttagttcagctagaagacgaaattacaacactacgacaagttttgtcagcgaaagaaaggcatctagttgagataaaacaaaaactcggcatgaacctgatgaatgaattaaaacagaacttcagcaaaagctggcatgacatgcagactaccactgcctacaagaaaacacatgaaaccctgagtcacgcagggcaaaaggcaactgcagctttcagcaacgttggaacggccatcagcaagaagttcggagacatgagacgaaagtaggcggtacgaaccctaatggaggcagttttgaggaggtcctcagctccacggcccatgccagtgcccagagcttggcaggaggctcccggcggaccaaggaggaggagctgcagtgctaagtccagccagcgtgcagctgcatccagaaaccggccactacccagcccatctctgcctgtgcttatccagataagaagaccaaaatcccgctgggaaaaacccaggccttgacattgttattcaaatggcccctccagaaagtttaatgatttccatttgtat

SEQ ID NO: 196410 - DNA, 915 bp, Homo sapiens
  Payload ID: 18753
  Gene Name: tumor protein D52-like 1
  Uniprot ID: Q16890
  ENST ID: ENST00000524679
  CDS Start-End: 302-610
acatctctgccttctcattttctcttaatttttttctttttttggcttcttggtattctttgctttcttggagctcgtcacacatttaggaggatttttgtcttttctggaatttttagttgttttttggtgggagggtctgtcagtgcatctagtcctccacactatggaagcagaagttggtttaaattcactttaaaaattgccttctgttttatcaattctgcctaaaggtttgttggagactgaaccgttgcaaggaacagacgaagatgcagtagccagtgctgacttctctagcatgctctctgaggaggaaaaggaagagttaaaagcagagttagttcagctagaagacgaaattacaacactacgacaagttttgtcagcgaaagaaaggcatctagttgagataaaacaaaaactcggcatgaacctgatgaatgaattaaaacagaacttcagcaaaagctggcatgacatgcagactaccactgcctacaagaaaacacatgaaaccctgagtcacgcagggcaaaaggcaactgcagctttcagcaacgttggaacggccatcagcaagaagttcggagacatgagacgaaagtaggcggtacgaaccctaatggaggcagttttgaggaggtcctcagctccacggcccatgccagtgcccagagcttggcaggaggctcccggcggaccaaggaggaggagctgcagtgctaagtccagccagcgtgcagctgcatccagaaaccggccactacccagcccatctctgcctgtgcttatccagataagaagaccaaaatcccgctgggaaaaacccaggccttgacattgttattcaaatggcccctccagaaagtttaatgatttccatttgtatttgtgttgatgatggaccacttg

SEQ ID NO: 196411 - DNA, 684 bp, Homo sapiens
  Payload ID: 18753
  Gene Name: tumor protein D52-like 1
  ENST ID: ENST00000534368
  CDS Start-End: 409-684
gccattctcctgcctcagcctcctgagtagctgggactacaggtgcccgccaccaggcccggctaattttttgtatttttagtagaggcggggttttgcagtgttaaccaggatggtctcgatctcctgaccttgtgatcagcccaccttggcctcccaaagtgctgggattacaggcttgagccaccgcgcctggcccagcttttcttttattagatagcaatgaggatgggatccgaagtagagcttccaacgaccctcaggagcgctgagcgaccaagtgaagtacctacaggacccatttgtgttcactgatctattggagcagctggggattgtggtttgttggagactgaaccgttgcaaggaacagacgaagatgcagtagccagtgctgacttctctagcatgctctctgaggaggaaaaggaagagttaaaagcagagttagttcagctagaagacgaaattacaacactacgacaagttttgtcagcgaaagaaaggcatctagttgagataaaacaaaaactcggcatgaacctgatgaatgaattaaaacagaacttcagcaaaagctggcatgacatgcagactaccactgcctacaagaaaacacatgaaaccctgagtcacgcagggcaaaaggcaactgcagctttcagcaacgttggaacggccatc

SEQ ID NO: 196412 - DNA, 2356 bp, Homo sapiens
  Payload ID: 18753
  Gene Name: tumor protein D52-like 1
  Uniprot ID: Q16890
  ENST ID: ENST00000534000
  CDS Start-End: 297-911
tagcgccgggagtgggtgccttccgccggctgtacagagcgccggcaggtggcgcccagcggcgagcttgttccagcttggtttgggccaggtggactggaaggggcggaggtaaccagaagcggctagtggcggctgcctgcgtccccaaccccctccgcgcagcgctcgcgacacgcgtgccaggagtgggagcgagcggcggggccagctgcgttctgagcctgggcgcagctgccatctgctctgggaagcaccagggtgtccccgccgccctcagctcgaagtcagccaccatggaggcgcaggcacaaggtttgttggagactgaaccgttgcaaggaacagacgaagatgcagtagccagtgctgacttctctagcatgctctctgaggaggaaaaggaagagttaaaagcagagttagttcagctagaagacgaaattacaacactacgacaagttttgtcagcgaaagaaaggcatctagttgagataaaacaaaaactcggcatgaacctgatgaatgaattaaaacagaacttcagcaaaagctggcatgacatgcagactaccactgcctacaagaaaacacatgaaaccctgagtcacgcagggcaaaaggcaactgcagctttcagcaacgttggaacggccatcagcaagaagttcggagacatgagttactccattcgccattccataagtatgcctgctatgaggaattctcctactttcaaatcatttgaggagagggttgagacaactgtcacaagcctcaagacgaaagtaggcggtacgaaccctaatggaggcagttttgaggaggtcctcagctccacggcccatgccagtgcccagagcttggcaggaggctcccggcggaccaaggaggaggagctgcagtgctaagtccagccagcgtgcagctgcatccagaaaccggccactacccagcccatctctgcctgtgcttatccagataagaagaccaaaatcccgctgggaaaaacccaggccttgacattgttattcaaatggcccctccagaaagtttaatgatttccatttgtatttgtgttgatgatggaccacttgaccatcacatttcagtattcatagatgactgtcacattttaaaatgttcccacttgagcaggtacacaactggtcataattcctgtctgtgtaattcgatgtatatttttccaaacatgtagctattgtttgctttgatttttgcttggcctcctttatgatgtgcatgtccttgaaggctgaatgaacagtccctttcagttcagcagatcaacaggatggagctcttcatgactgtctccagcaataggatgatttactataaatttcatccaactacttgtgatctctctcacctacatcaattatgtatgttaatttcagcaattaaaagaattgattttaatgactttgaattcttaatttctttgtcttaaaagttgctagttatgattttacagatgcaattttaaatcaacttttagccaggtgcggcggctcacacctgtaatcccaactattttggatgccaaggtgagaggattgcttgaggccaggagttaaagatcagcctgggcaacacagaccctgtctctacaaaaaaagaaaaaaattagccagacatagtgttgcttgcctgtagtcccagctactctagaggctgaggcaggaggattgcatgagcctaggagttcgaaactgcagtgagctatgattgcaccactgcactactccagcctgggtgacagagtgggacactgtctccaaaaatagtaataataagtagtcaacttttactgctaatttggtgaacatgagagaggatatgaaaataaatattacctcagctatcctaggatgttaaaataatctccaattttaaaattctctccaatctacatacagtagtagttagtcagataaaggatatccaaaaaagagatagctagaaaatgggagaagcagagttctgcaacccctttcagtttgtaaattgttcacatgtatgaaaataactggtatttatcaatccactcagatttctgcactaacttttatcttatatatcatatgtatctcttttctttttctaaatgggaacatatatttgttattaggtggcagagatatagccttaagatatatttgtaaaatgcacactgaatagacatccaacctaaaaaaaatcactatttaaaaagcccatataatatatacatatttgttagcatgctaattgttcatgttttgtgtttattaaatagaagtgatatatatgacattttgaagtaaagcacatctgaaaaattctactcaaa

SEQ ID NO: 196413 - DNA, 789 bp, Homo sapiens
  Payload ID: 18753
  Gene Name: tumor protein D52-like 1
  ENST ID: ENST00000528193
  CDS Start-End: 53-553
ctctgggaagcaccagggtgtccccgccgccctcagctcgaagtcagccaccatggaggcgcaggcacaaggtttgttggagactgaaccgttgcaaggaacagacgaagatgcagtagccagtgctgacttctctagcatgctctctgaggaggaaaaggaagagttaaaagcagagttagttcagctagaagacgaaattacaacactacgacaagttttgtcagcgaaagaaaggcatctagttgagataaaacaaaaactcggcatgaacctgatgaatgaattaaaacagaacttcagcaaaagctggcatgacatgcagactaccactgcctacaagaaaacacatgaaaccctgagtcacgcagggcaaaaggcaactgcagctttcagcaacgttggaacggccatcagcaagaagttcggagacatgagttactccattcgccattccataagtatgcctgctatgaggaattctcctactttcaaatcatttgaggagagggttgagacaactgtcacaagcctcaaggtacagatgaagtgaattctgtacgaaagtaggcggtacgaaccctaatggaggcagttttgaggaggtcctcagctccacggcccatgccagtgcccagagcttggcaggaggctcccggcggaccaaggaggaggagctgcagtgctaagtccagccagcgtgcagctgcatccagaaaccggccactacccagcccatctctgcctgtgcttatccagataagaagaccaaaatcccgctgggaaaaa

SEQ ID NO: 196414 - DNA, 1022 bp, Homo sapiens
  Payload ID: 18753
  Gene Name: tumor protein D52-like 1
  Uniprot ID: Q16890
  ENST ID: ENST00000532429
  CDS Start-End: 413-940
ggagaggcccctcctcaggaaatgcgcccgtggaatgctctaccctcttccgcagccagtcgcccctggccttcccaacctcgcggctgcccgaaggacctgttgtgccgggtccggaaagcgtgtttcgctccctttcccttgagggagtggggagggaatgtgactcttttcgcccagcgccgtggactcgcggcttgtggctcccaagttagggagtgagaggatcgcccgccgagggggtggctccgcagcccggctgcgcgagacgcttcccgctcggggacccgccttccgaggccaggtgaacgttaccggccccctgacctccagcagatccacacgtttgttggagactgaaccgttgcaaggaacagacgaagatgcagtagccagtgctgacttctctagcatgctctctgaggaggaaaaggaagagttaaaagcagagttagttcagctagaagacgaaattacaacactacgacaagttttgtcagcgaaagaaaggcatctagttgagataaaacaaaaactcggcatgaacctgatgaatgaattaaaacagaacttcagcaaaagctggcatgacatgcagactaccactgcctacaagaaaacacatgaaaccctgagtcacgcagggcaaaaggcaactgcagctttcagcaacgttggaacggccatcagcaagaagttcggagacatgagttactccattcgccattccataagtatgcctgctatgaggaattctcctactttcaaatcatttgaggagagggttgagacaactgtcacaagcctcaagacgaaagtaggcggtacgaaccctaatggaggcagttttgaggaggtcctcagctccacggcccatgccagtgcccagagcttggcaggaggctcccggcggaccaaggaggaggagctgcagtgctaagtccagccagcgtgcagctgcatccagaaaccggccactacccagcccatctctgcctgtgcttatccagataagaagacca

SEQ ID NO: 196415 - DNA, 999 bp, Homo sapiens
  Payload ID: 18753
  Gene Name: tumor protein D52-like 1
  ENST ID: ENST00000527711
  CDS Start-End: 160-735
gcctgcgtccccaaccccctccgcgcagcgctcgcgacacgcgtgccaggagtgggagcgagcggcggggccagctgcgttctgagcctgggcgcagctgccatctgctctgggaagcaccagggtgtccccgccgccctcagctcgaagtcagccaccatggaggcgcaggcacaaggtttgttggagactgaaccgttgcaaggaacagacgaagatgcagtagccagtgctgacttctctagcatgctctctgaggaggaaaaggaagagttaaaagcagagttagttcagctagaagacgaaattacaacactacgacaagttttgtcagcgaaagaaaggcatctagttgagataaaacaaaaactcggcatgaacctgatgaatgaattaaaacagaacttcagcaaaagctggcatgacatgcagactaccactgcctacaagaaaacacatgaaaccctgagtcacgcagggcaaaaggcaactgcagctttcagcaacgttggaacggccatcagcaagaagttcggagacatgaggaattctcctactttcaaatcatttgaggagagggttgagacaactgtcacaagcctcaagacgaaagtaggcggtacgaaccctaatggaggcagttttgaggaggtcctcagctccacggcccatgccagtgcccagagcttggcaggaggctcccggcggaccaaggaggaggagctgcagtgctaagtccagccagcgtgcagctgcatccagaaaccggccactacccagcccatctctgcctgtgcttatccagataagaagaccaaaatcccgctgggaaaaacccaggccttgacattgttattcaaatggcccctccagaaagtttaatgatttccatttgtatttgtgttgatgatggaccacttgaccatcacatttcagtattcatagatgactgtcacattttaaaatgttcccacttgagcaggtacacaactggtcata

SEQ ID NO: 196416 - DNA, 2362 bp, Homo sapiens
  Payload ID: 18754
  Gene Name: tumor protein D52-like 2
  Uniprot ID: O43399
  ENST ID: ENST00000217121
  CDS Start-End: 73-762
ggcgagcttctcccggcgccgcccgctcggctcccatagcgcccgcgacagcggtccggacgccgcccgaacatggactccgccggccaagatatcaacctgaattctcctaacaaaggtctgctgtctgactccatgacggatgttcctgtcgacacaggtgtggctgcccggactcctgctgttgagggtctgacagaggctgaggaggaggagctcagggctgagcttaccaaggtggaagaggaaattgtcactctgcgccaggtcctggcagccaaggagaggcactgtggagagctcaagaggaggctgggcctctccaccctgggggagctgaaacagaacctgtccaggagctggcatgacgtgcaggtctctagcgcctatgtgaaaacttctgagaaacttggagagtggaatgagaaagtgacccagtcagacctctacaagaagactcaggaaactctttcacaggcaggacagaagacttcagctgccctgtccacagtgggctctgccatcagcaggaagcttggagacatgagggctcatccattttcacactcctttagcagctactccatccgccactcaataagtatgccagccatgaggaactctgcgaccttcaagtcgtttgaggaccgagttgggaccataaagtctaaggttgtgggtgacagagagaacggcagtgacaacctcccttcctcagcggggagtggtgacaagcccctgtcggatcccgcacctttctaagcctgtggttgcttcacccgctgcagagcacacgcaacccagcctcagcatcacagccgcagctctgttcagcggagcagccagccagggcggatgagcagagccggccctgaggacagtcctgcccatccacgcggagatgtggctgccgcgtttgcatgaatttgaagaacacaggcttgtacacagatgttttacactcacgtttgtagatgaaacagatcactgtgctgtccttcctaggggtgcaggaagtggacagggcggagggtttgaaagaatattgagccaaagcccaggctccctttgggaatcatgttagcccatcagaatgttgaaggattgaagagttctaagcataaaataagtggcattttctgacttcttcctcctcctccttccctgactcacagaaggaatgcaatcacccagcaagtcctacctgttacgcaattttttatctcaaaatgccgaacgagaaaactgtccattttctgagacccccagaaaggaaactgaccctcagcagctgcctgattgttacgcgaatctagctttaacggaagcaaattcattattttttaaatgcagtggacttttcaaaaagtttaaattaggcaaagcagctttagcctcatagaatattatttctttggactcaagctgaaatacaagccttacattgccttatgctttatttctttctaatttttatatgtatatagatgagggttccttaatggttgtgagcattgtgtggaattttacacctggcctgcgtggcagcctcttccagttgaggtgttttatgtcacgcacactccatcccagtgtacaaaacctgcttctcttctcaaccgtggcagctcccgctggctcctatgccctgccctaaagggctcttgagcctctgggaatgggaggggccaagagaaggaaaaccctgtctttagcaccctttaaaagaactgtgccccccttctcagtgctgcctttgcatgggcctggcccggctcacattcgtcagtgactccaaccctcctgcttgctgtacttgggatgaaacgaccccacaggtcaggtggagggtggggcgtgggcatcagccaggattgccgttacagtctttttctcaggagctacaaagatctcttcctgttactaaatagtcgcaccccagcagcctctctcgcacaccggggccctgcatgtcagatggcgtggtctgcagggggagctctgtgccttagtggctcttggcaggacactgagggcctgcctgtggtgtgcccggctctgccactcccgggaggggaagggctgctcagctcaaggtgtcctgttcggtagagcaagtgtcctctgacagccgtgtccccggacagttcagacacccttggggatggcactccacacacgacagagatgcaggggccagggaagcccagcgctcggtgcccttcgtccagggttaaaatcggcctgtggggtgtggtgagaaggcaggttgtgcgggtgttgaccgatgtatcttttccttaaagttattataataatgggtaatttgtcaataaagcattcctttgggggaaagtccgcc

SEQ ID NO: 196417 - DNA, 2302 bp, Homo sapiens
  Payload ID: 18754
  Gene Name: tumor protein D52-like 2
  Uniprot ID: O43399
  ENST ID: ENST00000351424
  CDS Start-End: 73-702
ggcgagcttctcccggcgccgcccgctcggctcccatagcgcccgcgacagcggtccggacgccgcccgaacatggactccgccggccaagatatcaacctgaattctcctaacaaaggtctgctgtctgactccatgacggatgttcctgtcgacacaggtgtggctgcccggactcctgctgttgagggtctgacagaggctgaggaggaggagctcagggctgagcttaccaaggtggaagaggaaattgtcactctgcgccaggtcctggcagccaaggagaggcactgtggagagctcaagaggaggctgggcctctccaccctgggggagctgaaacagaacctgtccaggagctggcatgacgtgcaggtctctagcgcctacaagaagactcaggaaactctttcacaggcaggacagaagacttcagctgccctgtccacagtgggctctgccatcagcaggaagcttggagacatgagggctcatccattttcacactcctttagcagctactccatccgccactcaataagtatgccagccatgaggaactctgcgaccttcaagtcgtttgaggaccgagttgggaccataaagtctaaggttgtgggtgacagagagaacggcagtgacaacctcccttcctcagcggggagtggtgacaagcccctgtcggatcccgcacctttctaagcctgtggttgcttcacccgctgcagagcacacgcaacccagcctcagcatcacagccgcagctctgttcagcggagcagccagccagggcggatgagcagagccggccctgaggacagtcctgcccatccacgcggagatgtggctgccgcgtttgcatgaatttgaagaacacaggcttgtacacagatgttttacactcacgtttgtagatgaaacagatcactgtgctgtccttcctaggggtgcaggaagtggacagggcggagggtttgaaagaatattgagccaaagcccaggctccctttgggaatcatgttagcccatcagaatgttgaaggattgaagagttctaagcataaaataagtggcattttctgacttcttcctcctcctccttccctgactcacagaaggaatgcaatcacccagcaagtcctacctgttacgcaattttttatctcaaaatgccgaacgagaaaactgtccattttctgagacccccagaaaggaaactgaccctcagcagctgcctgattgttacgcgaatctagctttaacggaagcaaattcattattttttaaatgcagtggacttttcaaaaagtttaaattaggcaaagcagctttagcctcatagaatattatttctttggactcaagctgaaatacaagccttacattgccttatgctttatttctttctaatttttatatgtatatagatgagggttccttaatggttgtgagcattgtgtggaattttacacctggcctgcgtggcagcctcttccagttgaggtgttttatgtcacgcacactccatcccagtgtacaaaacctgcttctcttctcaaccgtggcagctcccgctggctcctatgccctgccctaaagggctcttgagcctctgggaatgggaggggccaagagaaggaaaaccctgtctttagcaccctttaaaagaactgtgccccccttctcagtgctgcctttgcatgggcctggcccggctcacattcgtcagtgactccaaccctcctgcttgctgtacttgggatgaaacgaccccacaggtcaggtggagggtggggcgtgggcatcagccaggattgccgttacagtctttttctcaggagctacaaagatctcttcctgttactaaatagtcgcaccccagcagcctctctcgcacaccggggccctgcatgtcagatggcgtggtctgcagggggagctctgtgccttagtggctcttggcaggacactgagggcctgcctgtggtgtgcccggctctgccactcccgggaggggaagggctgctcagctcaaggtgtcctgttcggtagagcaagtgtcctctgacagccgtgtccccggacagttcagacacccttggggatggcactccacacacgacagagatgcaggggccagggaagcccagcgctcggtgcccttcgtccagggttaaaatcggcctgtggggtgtggtgagaaggcaggttgtgcgggtgttgaccgatgtatcttttccttaaagttattataataatgggtaatttgtcaataaagcattcctttgggggaaagtccgcc

SEQ ID NO: 196418 - DNA, 2297 bp, Homo sapiens
  Payload ID: 18754
  Gene Name: tumor protein D52-like 2
  Uniprot ID: O43399
  ENST ID: ENST00000346249
  CDS Start-End: 77-697
acgcggcgagcttctcccggcgccgcccgctcggctcccatagcgcccgcgacagcggtccggacgccgcccgaacatggactccgccggccaagatatcaacctgaattctcctaacaaaggtctgctgtctgactccatgacggatgttcctgtcgacacaggtgtggctgcccggactcctgctgttgagggtctgacagaggctgaggaggaggagctcagggctgagcttaccaaggtggaagaggaaattgtcactctgcgccaggtcctggcagccaaggagaggcactgtggagagctcaagaggaggctgggcctctccaccctgggggagctgaaacagaacctgtccaggagctggcatgacgtgcaggtctctagcgcctatgtgaaaacttctgagaaacttggagagtggaatgagaaagtgacccagtcagacctctacaagaagactcaggaaactctttcacaggcaggacagaagacttcagctgccctgtccacagtgggctctgccatcagcaggaagcttggagacatgaggaactctgcgaccttcaagtcgtttgaggaccgagttgggaccataaagtctaaggttgtgggtgacagagagaacggcagtgacaacctcccttcctcagcggggagtggtgacaagcccctgtcggatcccgcacctttctaagcctgtggttgcttcacccgctgcagagcacacgcaacccagcctcagcatcacagccgcagctctgttcagcggagcagccagccagggcggatgagcagagccggccctgaggacagtcctgcccatccacgcggagatgtggctgccgcgtttgcatgaatttgaagaacacaggcttgtacacagatgttttacactcacgtttgtagatgaaacagatcactgtgctgtccttcctaggggtgcaggaagtggacagggcggagggtttgaaagaatattgagccaaagcccaggctccctttgggaatcatgttagcccatcagaatgttgaaggattgaagagttctaagcataaaataagtggcattttctgacttcttcctcctcctccttccctgactcacagaaggaatgcaatcacccagcaagtcctacctgttacgcaattttttatctcaaaatgccgaacgagaaaactgtccattttctgagacccccagaaaggaaactgaccctcagcagctgcctgattgttacgcgaatctagctttaacggaagcaaattcattattttttaaatgcagtggacttttcaaaaagtttaaattaggcaaagcagctttagcctcatagaatattatttctttggactcaagctgaaatacaagccttacattgccttatgctttatttctttctaatttttatatgtatatagatgagggttccttaatggttgtgagcattgtgtggaattttacacctggcctgcgtggcagcctcttccagttgaggtgttttatgtcacgcacactccatcccagtgtacaaaacctgcttctcttctcaaccgtggcagctcccgctggctcctatgccctgccctaaagggctcttgagcctctgggaatgggaggggccaagagaaggaaaaccctgtctttagcaccctttaaaagaactgtgccccccttctcagtgctgcctttgcatgggcctggcccggctcacattcgtcagtgactccaaccctcctgcttgctgtacttgggatgaaacgaccccacaggtcaggtggagggtggggcgtgggcatcagccaggattgccgttacagtctttttctcaggagctacaaagatctcttcctgttactaaatagtcgcaccccagcagcctctctcgcacaccggggccctgcatgtcagatggcgtggtctgcagggggagctctgtgccttagtggctcttggcaggacactgagggcctgcctgtggtgtgcccggctctgccactcccgggaggggaagggctgctcagctcaaggtgtcctgttcggtagagcaagtgtcctctgacagccgtgtccccggacagttcagacacccttggggatggcactccacacacgacagagatgcaggggccagggaagcccagcgctcggtgcccttcgtccagggttaaaatcggcctgtggggtgtggtgagaaggcaggttgtgcgggtgttgaccgatgtatcttttccttaaagttattataataatgggtaatttgtcaataaagcattcctttgggggaaagtccgcc

SEQ ID NO: 196419 - DNA, 2237 bp, Homo sapiens
  Payload ID: 18754
  Gene Name: tumor protein D52-like 2
  Uniprot ID: O43399
  ENST ID: ENST00000348257
  CDS Start-End: 77-637
acgcggcgagcttctcccggcgccgcccgctcggctcccatagcgcccgcgacagcggtccggacgccgcccgaacatggactccgccggccaagatatcaacctgaattctcctaacaaaggtctgctgtctgactccatgacggatgttcctgtcgacacaggtgtggctgcccggactcctgctgttgagggtctgacagaggctgaggaggaggagctcagggctgagcttaccaaggtggaagaggaaattgtcactctgcgccaggtcctggcagccaaggagaggcactgtggagagctcaagaggaggctgggcctctccaccctgggggagctgaaacagaacctgtccaggagctggcatgacgtgcaggtctctagcgcctacaagaagactcaggaaactctttcacaggcaggacagaagacttcagctgccctgtccacagtgggctctgccatcagcaggaagcttggagacatgaggaactctgcgaccttcaagtcgtttgaggaccgagttgggaccataaagtctaaggttgtgggtgacagagagaacggcagtgacaacctcccttcctcagcggggagtggtgacaagcccctgtcggatcccgcacctttctaagcctgtggttgcttcacccgctgcagagcacacgcaacccagcctcagcatcacagccgcagctctgttcagcggagcagccagccagggcggatgagcagagccggccctgaggacagtcctgcccatccacgcggagatgtggctgccgcgtttgcatgaatttgaagaacacaggcttgtacacagatgttttacactcacgtttgtagatgaaacagatcactgtgctgtccttcctaggggtgcaggaagtggacagggcggagggtttgaaagaatattgagccaaagcccaggctccctttgggaatcatgttagcccatcagaatgttgaaggattgaagagttctaagcataaaataagtggcattttctgacttcttcctcctcctccttccctgactcacagaaggaatgcaatcacccagcaagtcctacctgttacgcaattttttatctcaaaatgccgaacgagaaaactgtccattttctgagacccccagaaaggaaactgaccctcagcagctgcctgattgttacgcgaatctagctttaacggaagcaaattcattattttttaaatgcagtggacttttcaaaaagtttaaattaggcaaagcagctttagcctcatagaatattatttctttggactcaagctgaaatacaagccttacattgccttatgctttatttctttctaatttttatatgtatatagatgagggttccttaatggttgtgagcattgtgtggaattttacacctggcctgcgtggcagcctcttccagttgaggtgttttatgtcacgcacactccatcccagtgtacaaaacctgcttctcttctcaaccgtggcagctcccgctggctcctatgccctgccctaaagggctcttgagcctctgggaatgggaggggccaagagaaggaaaaccctgtctttagcaccctttaaaagaactgtgccccccttctcagtgctgcctttgcatgggcctggcccggctcacattcgtcagtgactccaaccctcctgcttgctgtacttgggatgaaacgaccccacaggtcaggtggagggtggggcgtgggcatcagccaggattgccgttacagtctttttctcaggagctacaaagatctcttcctgttactaaatagtcgcaccccagcagcctctctcgcacaccggggccctgcatgtcagatggcgtggtctgcagggggagctctgtgccttagtggctcttggcaggacactgagggcctgcctgtggtgtgcccggctctgccactcccgggaggggaagggctgctcagctcaaggtgtcctgttcggtagagcaagtgtcctctgacagccgtgtccccggacagttcagacacccttggggatggcactccacacacgacagagatgcaggggccagggaagcccagcgctcggtgcccttcgtccagggttaaaatcggcctgtggggtgtggtgagaaggcaggttgtgcgggtgttgaccgatgtatcttttccttaaagttattataataatgggtaatttgtcaataaagcattcctttgggggaaagtccgcc

SEQ ID NO: 196420 - DNA, 2339 bp, Homo sapiens
  Payload ID: 18754
  Gene Name: tumor protein D52-like 2
  Uniprot ID: O43399
  ENST ID: ENST00000352482
  CDS Start-End: 77-739
acgcggcgagcttctcccggcgccgcccgctcggctcccatagcgcccgcgacagcggtccggacgccgcccgaacatggactccgccggccaagatatcaacctgaattctcctaacaaaggtctgctgtctgactccatgacggatgttcctgtcgacacaggtgtggctgcccggactcctgctgttgagggtctgacagaggctgaggaggaggagctcagggctgagcttaccaaggtggaagaggaaattgtcactctgcgccaggtcctggcagccaaggagaggcactgtggagagctcaagaggaggctgggcctctccaccctgggggagctgaaacagaacctgtccaggagctggcatgacgtgcaggtctctagcgcctatgtgaaaacttctgagaaacttggagagtggaatgagaaagtgacccagtcagacctctacaagaagactcaggaaactctttcacaggcaggacagaagacttcagctgccctgtccacagtgggctctgccatcagcaggaagcttggagacatgagcagctactccatccgccactcaataagtatgccagccatgaggaactctgcgaccttcaagtcgtttgaggaccgagttgggaccataaagtctaaggttgtgggtgacagagagaacggcagtgacaacctcccttcctcagcggggagtggtgacaagcccctgtcggatcccgcacctttctaagcctgtggttgcttcacccgctgcagagcacacgcaacccagcctcagcatcacagccgcagctctgttcagcggagcagccagccagggcggatgagcagagccggccctgaggacagtcctgcccatccacgcggagatgtggctgccgcgtttgcatgaatttgaagaacacaggcttgtacacagatgttttacactcacgtttgtagatgaaacagatcactgtgctgtccttcctaggggtgcaggaagtggacagggcggagggtttgaaagaatattgagccaaagcccaggctccctttgggaatcatgttagcccatcagaatgttgaaggattgaagagttctaagcataaaataagtggcattttctgacttcttcctcctcctccttccctgactcacagaaggaatgcaatcacccagcaagtcctacctgttacgcaattttttatctcaaaatgccgaacgagaaaactgtccattttctgagacccccagaaaggaaactgaccctcagcagctgcctgattgttacgcgaatctagctttaacggaagcaaattcattattttttaaatgcagtggacttttcaaaaagtttaaattaggcaaagcagctttagcctcatagaatattatttctttggactcaagctgaaatacaagccttacattgccttatgctttatttctttctaatttttatatgtatatagatgagggttccttaatggttgtgagcattgtgtggaattttacacctggcctgcgtggcagcctcttccagttgaggtgttttatgtcacgcacactccatcccagtgtacaaaacctgcttctcttctcaaccgtggcagctcccgctggctcctatgccctgccctaaagggctcttgagcctctgggaatgggaggggccaagagaaggaaaaccctgtctttagcaccctttaaaagaactgtgccccccttctcagtgctgcctttgcatgggcctggcccggctcacattcgtcagtgactccaaccctcctgcttgctgtacttgggatgaaacgaccccacaggtcaggtggagggtggggcgtgggcatcagccaggattgccgttacagtctttttctcaggagctacaaagatctcttcctgttactaaatagtcgcaccccagcagcctctctcgcacaccggggccctgcatgtcagatggcgtggtctgcagggggagctctgtgccttagtggctcttggcaggacactgagggcctgcctgtggtgtgcccggctctgccactcccgggaggggaagggctgctcagctcaaggtgtcctgttcggtagagcaagtgtcctctgacagccgtgtccccggacagttcagacacccttggggatggcactccacacacgacagagatgcaggggccagggaagcccagcgctcggtgcccttcgtccagggttaaaatcggcctgtggggtgtggtgagaaggcaggttgtgcgggtgttgaccgatgtatcttttccttaaagttattataataatgggtaatttgtcaataaagcattcctttgggggaaagtccgcc

SEQ ID NO: 196421 - DNA, 2275 bp, Homo sapiens
  Payload ID: 18754
  Gene Name: tumor protein D52-like 2
  Uniprot ID: O43399
  ENST ID: ENST00000358548
  CDS Start-End: 73-675
ggcgagcttctcccggcgccgcccgctcggctcccatagcgcccgcgacagcggtccggacgccgcccgaacatggactccgccggccaagatatcaacctgaattctcctaacaaaggtctgctgtctgactccatgacggatgttcctgtcgacacaggtgtggctgcccggactcctgctgttgagggtctgacagaggctgaggaggaggagctcagggctgagcttaccaaggtggaagaggaaattgtcactctgcgccaggtcctggcagccaaggagaggcactgtggagagctcaagaggaggctgggcctctccaccctgggggagctgaaacagaacctgtccaggagctggcatgacgtgcaggtctctagcgcctacaagaagactcaggaaactctttcacaggcaggacagaagacttcagctgccctgtccacagtgggctctgccatcagcaggaagcttggagacatgagcagctactccatccgccactcaataagtatgccagccatgaggaactctgcgaccttcaagtcgtttgaggaccgagttgggaccataaagtctaaggttgtgggtgacagagagaacggcagtgacaacctcccttcctcagcggggagtggtgacaagcccctgtcggatcccgcacctttctaagcctgtggttgcttcacccgctgcagagcacacgcaacccagcctcagcatcacagccgcagctctgttcagcggagcagccagccagggcggatgagcagagccggccctgaggacagtcctgcccatccacgcggagatgtggctgccgcgtttgcatgaatttgaagaacacaggcttgtacacagatgttttacactcacgtttgtagatgaaacagatcactgtgctgtccttcctaggggtgcaggaagtggacagggcggagggtttgaaagaatattgagccaaagcccaggctccctttgggaatcatgttagcccatcagaatgttgaaggattgaagagttctaagcataaaataagtggcattttctgacttcttcctcctcctccttccctgactcacagaaggaatgcaatcacccagcaagtcctacctgttacgcaattttttatctcaaaatgccgaacgagaaaactgtccattttctgagacccccagaaaggaaactgaccctcagcagctgcctgattgttacgcgaatctagctttaacggaagcaaattcattattttttaaatgcagtggacttttcaaaaagtttaaattaggcaaagcagctttagcctcatagaatattatttctttggactcaagctgaaatacaagccttacattgccttatgctttatttctttctaatttttatatgtatatagatgagggttccttaatggttgtgagcattgtgtggaattttacacctggcctgcgtggcagcctcttccagttgaggtgttttatgtcacgcacactccatcccagtgtacaaaacctgcttctcttctcaaccgtggcagctcccgctggctcctatgccctgccctaaagggctcttgagcctctgggaatgggaggggccaagagaaggaaaaccctgtctttagcaccctttaaaagaactgtgccccccttctcagtgctgcctttgcatgggcctggcccggctcacattcgtcagtgactccaaccctcctgcttgctgtacttgggatgaaacgaccccacaggtcaggtggagggtggggcgtgggcatcagccaggattgccgttacagtctttttctcaggagctacaaagatctcttcctgttactaaatagtcgcaccccagcagcctctctcgcacaccggggccctgcatgtcagatggcgtggtctgcagggggagctctgtgccttagtggctcttggcaggacactgagggcctgcctgtggtgtgcccggctctgccactcccgggaggggaagggctgctcagctcaaggtgtcctgttcggtagagcaagtgtcctctgacagccgtgtccccggacagttcagacacccttggggatggcactccacacacgacagagatgcaggggccagggaagcccagcgctcggtgcccttcgtccagggttaaaatcggcctgtggggtgtggtgagaaggcaggttgtgcgggtgttgaccgatgtatcttttccttaaagttattataataatgggtaatttgtcaataaagcattcctttgggggaaagtccgcc

SEQ ID NO: 196422 - DNA, 1094 bp, Homo sapiens
  Payload ID: 18754
  Gene Name: tumor protein D52-like 2
  Uniprot ID: O43399
  ENST ID: ENST00000369927
  CDS Start-End: 124-615
gattacgaaacgccgcggagctgaggcagttccgctggctagtgtgtacgcggcgagcttctcccggcgccgcccgctcggctcccatagcgcccgcgacagcggtccggacgccgcccgaacatggactccgccggccaaggtgtggctgcccggactcctgctgttgagggtctgacagaggctgaggaggaggagctcagggctgagcttaccaaggtggaagaggaaattgtcactctgcgccaggtcctggcagccaaggagaggcactgtggagagctcaagaggaggctgggcctctccaccctgggggagctgaaacagaacctgtccaggagctggcatgacgtgcaggtctctagcgcctacaagaagactcaggaaactctttcacaggcaggacagaagacttcagctgccctgtccacagtgggctctgccatcagcaggaagcttggagacatgaggaactctgcgaccttcaagtcgtttgaggaccgagttgggaccataaagtctaaggttgtgggtgacagagagaacggcagtgacaacctcccttcctcagcggggagtggtgacaagcccctgtcggatcccgcacctttctaagcctgtggttgcttcacccgctgcagagcacacgcaacccagcctcagcatcacagccgcagctctgttcagcggagcagccagccagggcggatgagcagagccggccctgaggacagtcctgcccatccacgcggagatgtggctgccgcgtttgcatgaatttgaagaacacaggcttgtacacagatgttttacactcacgtttgtagatgaaacagatcactgtgctgtccttcctaggggtgcaggaagtggacagggcggagggtttgaaagaatattgagccaaagcccaggctccctttgggaatcatgttagcccatcagaatgttgaaggattgaagagttctaagcataaaataagtggcattttctgacttcttcctcctcctccttccctgactcacagaaggaatgcaatcacccagcaagtcctacctgttacgcaattttttatctcaaaatgccgaacgag

SEQ ID NO: 196423 - DNA, 2310 bp, Homo sapiens
  Payload ID: 18754
  Gene Name: tumor protein D52-like 2
  ENST ID: ENST00000615907
  CDS Start-End: 139-807
agccgtcgcatcgcggattacgaaacgccgcggagctgaggcagttccgctggctagtgtgtacgcggcgagcttctcccggcgccgcccgctcggctcccatagcgcccgcgacagcggtccggacgccgcccgaacatggactccgccggccaagatatcaacctgaattctcctaacaaaggtctgctgtctgactccatgacggatgttcctgtcgacacaggtgtggctgcccggactcctgctgttgagggtctgacagaggctgaggaggaggagctcagggctgagcttaccaaggtggaagaggaaattgtcactctgcgccaggtcctggcagccaaggagaggcactgtggagagctcaagaggaggctgggcctctccaccctgggggagctgaaacagaacctgtccaggagctggcatgacgtgcaggtctctagcgcctatgtgaaaacttctgagaaacttggagagtggaatgagaaagtgacccagtcagacctctacaagaagactcaggaaactctttcacaggcaggacagaagacttcagctgccctgtccacagtgggctctgccatcagcaggaagcttggagacatgagtctaaggttgtgggtgacagagagaacggcagtgacaacctcccttcctcagcggggagtggtgacaagcccctgtcggatcccgcacctttctaagcctgtggttgcttcacccgctgcagagcacacgcaacccagcctcagcatcacagccgcagctctgttcagcggagcagccagccagggcggatgagcagagccggccctgaggacagtcctgcccatccacgcggagatgtggctgccgcgtttgcatgaatttgaagaacacaggcttgtacacagatgttttacactcacgtttgtagatgaaacagatcactgtgctgtccttcctaggggtgcaggaagtggacagggcggagggtttgaaagaatattgagccaaagcccaggctccctttgggaatcatgttagcccatcagaatgttgaaggattgaagagttctaagcataaaataagtggcattttctgacttcttcctcctcctccttccctgactcacagaaggaatgcaatcacccagcaagtcctacctgttacgcaattttttatctcaaaatgccgaacgagaaaactgtccattttctgagacccccagaaaggaaactgaccctcagcagctgcctgattgttacgcgaatctagctttaacggaagcaaattcattattttttaaatgcagtggacttttcaaaaagtttaaattaggcaaagcagctttagcctcatagaatattatttctttggactcaagctgaaatacaagccttacattgccttatgctttatttctttctaatttttatatgtatatagatgagggttccttaatggttgtgagcattgtgtggaattttacacctggcctgcgtggcagcctcttccagttgaggtgttttatgtcacgcacactccatcccagtgtacaaaacctgcttctcttctcaaccgtggcagctcccgctggctcctatgccctgccctaaagggctcttgagcctctgggaatgggaggggccaagagaaggaaaaccctgtctttagcaccctttaaaagaactgtgccccccttctcagtgctgcctttgcatgggcctggcccggctcacattcgtcagtgactccaaccctcctgcttgctgtacttgggatgaaacgaccccacaggtcaggtggagggtggggcgtgggcatcagccaggattgccgttacagtctttttctcaggagctacaaagatctcttcctgttactaaatagtcgcaccccagcagcctctctcgcacaccggggccctgcatgtcagatggcgtggtctgcagggggagctctgtgccttagtggctcttggcaggacactgagggcctgcctgtggtgtgcccggctctgccactcccgggaggggaagggctgctcagctcaaggtgtcctgttcggtagagcaagtgtcctctgacagccgtgtccccggacagttcagacacccttggggatggcactccacacacgacagagatgcaggggccagggaagcccagcgctcggtgcccttcgtccagggttaaaatcggcctgtggggtgtggtgagaaggcaggttgtgcgggtgttgaccgatgtatcttttccttaaagttattataataatgggtaatttgtcaataaagcattcctttgggggaaagtccgcc

SEQ ID NO: 196424 - DNA, 2197 bp, Homo sapiens
  Payload ID: 18754
  Gene Name: tumor protein D52-like 2
  ENST ID: ENST00000611972
  CDS Start-End: 139-597
agccgtcgcatcgcggattacgaaacgccgcggagctgaggcagttccgctggctagtgtgtacgcggcgagcttctcccggcgccgcccgctcggctcccatagcgcccgcgacagcggtccggacgccgcccgaacatggactccgccggccaagatatcaacctgaattctcctaacaaaggtctgctgtctgactccatgacggatgttcctgtcgacacaggtgtggctgcccggactcctgctgttgagggtctgacagaggctgaggaggaggagctcagggctgagcttaccaaggtggaagaggaaattgtcactctgcgccaggtcctggcagccaaggagaggcactgtggagagctcaagaggaggctgggcctctccaccctgggggagctgaaacagaacctgtccaggagctggcatgacgtgcaggtctctagcgcgaactctgcgaccttcaagtcgtttgaggaccgagttgggaccataaagtctaaggttgtgggtgacagagagaacggcagtgacaacctcccttcctcagcggggagtggtgacaagcccctgtcggatcccgcacctttctaagcctgtggttgcttcacccgctgcagagcacacgcaacccagcctcagcatcacagccgcagctctgttcagcggagcagccagccagggcggatgagcagagccggccctgaggacagtcctgcccatccacgcggagatgtggctgccgcgtttgcatgaatttgaagaacacaggcttgtacacagatgttttacactcacgtttgtagatgaaacagatcactgtgctgtccttcctaggggtgcaggaagtggacagggcggagggtttgaaagaatattgagccaaagcccaggctccctttgggaatcatgttagcccatcagaatgttgaaggattgaagagttctaagcataaaataagtggcattttctgacttcttcctcctcctccttccctgactcacagaaggaatgcaatcacccagcaagtcctacctgttacgcaattttttatctcaaaatgccgaacgagaaaactgtccattttctgagacccccagaaaggaaactgaccctcagcagctgcctgattgttacgcgaatctagctttaacggaagcaaattcattattttttaaatgcagtggacttttcaaaaagtttaaattaggcaaagcagctttagcctcatagaatattatttctttggactcaagctgaaatacaagccttacattgccttatgctttatttctttctaatttttatatgtatatagatgagggttccttaatggttgtgagcattgtgtggaattttacacctggcctgcgtggcagcctcttccagttgaggtgttttatgtcacgcacactccatcccagtgtacaaaacctgcttctcttctcaaccgtggcagctcccgctggctcctatgccctgccctaaagggctcttgagcctctgggaatgggaggggccaagagaaggaaaaccctgtctttagcaccctttaaaagaactgtgccccccttctcagtgctgcctttgcatgggcctggcccggctcacattcgtcagtgactccaaccctcctgcttgctgtacttgggatgaaacgaccccacaggtcaggtggagggtggggcgtgggcatcagccaggattgccgttacagtctttttctcaggagctacaaagatctcttcctgttactaaatagtcgcaccccagcagcctctctcgcacaccggggccctgcatgtcagatggcgtggtctgcagggggagctctgtgccttagtggctcttggcaggacactgagggcctgcctgtggtgtgcccggctctgccactcccgggaggggaagggctgctcagctcaaggtgtcctgttcggtagagcaagtgtcctctgacagccgtgtccccggacagttcagacacccttggggatggcactccacacacgacagagatgcaggggccagggaagcccagcgctcggtgcccttcgtccagggttaaaatcggcctgtggggtgtggtgagaaggcaggttgtgcgggtgttgaccgatgtatcttttccttaaagttattataataatgggtaatttgtcaataaagcattcctttgggggaaagtccgcc

SEQ ID NO: 196425 - DNA, 1484 bp, Homo sapiens
  Payload ID: 18755
  Gene Name: tumor protein D52-like 3
  Uniprot ID: Q96J77
  ENST ID: ENST00000314556
  CDS Start-End: 193-603
ggtgtccattgtaccagctgggccatggatccctcccgcctgaaatctgactccacctgccaagagtctgagcctgcaggcctagatttcgactctgctggccaagattatttctctgcagcccaataattcgactctttctaccaagaattggacctggactctcttaacgaagatcttctttcccagtccatgccacatgccaggacagagacctctgtgggcacatatgaatcccactcgacttctgaactggaggatctgacagagcccgagcaaagagagctcaaaaccaaactcactaaattggaggctgaaattgtaaccctacgccacgtactagcagccaaagagagacgctgtggggaactcaagaggaagttaggcctcaccgccttggtagggctgagacagaatctgtccaagagctggcttgatgttcaggtctccaacacctatgtgaaacagaagacatcagctgctctgtccaccatgggcactctcatctgcaggaagcttggaggcgtgaagaagtcggccacattcagatcttttgaaggattgatcttcaataaatacacgttaaatcaaggaaggaattaacatcatatacttcagacatcaaatatggaatccaagagactatcaacaacatgaacttgttcacaagttccttctgcttttaaacaaaaatatcgtgtttattcaaagccaatctgagaccctactctgtatcaagaactgtcccaggttctgaaagcatagaattagacatcgtatgtgccctctagaaacacttagactttcaaatcattataattcaatgagtcctaaaatagagctgtgtgccagagataaaagaagtcctgaggaaggggtgttcaactctgtcttggtaggtcagtaaagactttagagagacagaaagtcttagaggactaggagaagtttgccagacagacaagaatagaacattccagacaacatgcagaggaactgagtcacaaaggaatgtataagaatggcatattctaggaactaacactgtggctagagaggaaggggaaatggtgttacatgagtgagggaggggaaatggtgttacgtgagtaagaaaaaataagcagggggcaaaatcataagtagtcttacatactacattagatatcaatatttaagcctgtaggaaatgggaggcattgaagcacttaagtaaaaaagtaactatcaaatttttgttttagattactctggtcatcagagaaatagattaagtatttaagaggtagaatctctcagacttaggaaccaactgcatgaggcggggcttggggggataaatttgcaagataataaggatgtagaattgaaaaggcctgatattattgaagctggagttgcacattcattttgctttggcttttttgtatcagtggtcatgggcaccaaataaaatgcttccatgaacatttggattctggctc

SEQ ID NO: 196426 - DNA, 2296 bp, Homo sapiens
  Payload ID: 18755
  Gene Name: tumor protein D52-like 3
  Uniprot ID: Q96J77
  ENST ID: ENST00000344545
  CDS Start-End: 222-644
acaggccaggtcgtcaactcaactgtcaaggtgtccattgtaccagctgggccatggatccctcccgcctgaaatctgactccacctgccaagagtctgagcctgcaggcctagatttcgactctgctggccaagattatttctctgcagcccaataattcgactctttctaccaagaattggacctggactctcttaacgaagatcttctttcccagtccatgccacatgccaggacagagacctctgtgggcacatatgaatcccactcgacttctgaactggaggatctgacagagcccgagcaaagagagctcaaaaccaaactcactaaattggaggctgaaattgtaaccctacgccacgtactagcagccaaagagagacgctgtggggaactcaagaggaagttaggcctcaccgccttggtagggctgagacagaatctgtccaagagctggcttgatgttcaggtctccaacacctatgtgaaacagaagacatcagctgctctgtccaccatgggcactctcatctgcaggaagcttggaggcgtgaagaagtcggccacattcagatcttttgaaggtctgatggggacaatcaagtccaaagtctcagggggcaaaagagcttggccctgactgtctttcttctgcggagggtggggttgatctgctctcagttttggggtgtggggaagacccactccagattccggggagtgggaatgagccactcccagttctggagagtgaggatgaccatctccactttctggaaccagaatgagcccccttggtaaccttgcctggtactaaaccagtgcaaggacccccttcccttattacatttgcaactctgcccaacaaaaacaagcaagcaaaccacaatggtaaagtggttaattcaggaaattgacagaatccagttttgagaaaagaacacagatatttgctgcttttaagatagagaacccaaagttttgtacctggttatttttcacttaagtttgtagacgaaatgtgccattatattagctttcctgagactgtatctaatgggcaagtcagtggctccagaggggtcttaggccaaagcccaaactctcttttggaaaactagcttattagaaagccaaagtagagttctgtttaagcttgaaagaggtatgaagtaatctgtagtgtttttttggtttgtttgtttgttttcccttccccatttccttccttccctcagtctcaaagtcaccttgaaagcttcacctggcctacaacttttattttaaaaagatgatcaagaaaacttcatcttctctgagactcagaaaaagaggggaaaatagtggtagtgcactaattgttacattactaatatagcttttgtaaaactcgtttgttttcaaaggtctggactaagcaaaacaacagtgtcagtttaggaaattattactactttgaacacaaactgaaattgcaactttgccttgtgctttgtttataatttctttatatatcaaaatgagtgttttaaagtttaacccttgaagcagcatgtctttgccatagcagcacttcacttaaaaggaagaaattgcctctctggcagcaattcctagttagttaccacctccagctgaggggctggaggaaaacaggtatagccaaattcaagaaagataaacccctgtctcaaggaacattttaaaaagaacgtctgtcccctgtgatgctggctgttatgcctttgaatggacctaactatacatctttgctcttaactccaagtctgcccttctttttaggaaaccctaaaggagaaggaagcagaatataaccctctggagagctcaagacagtaggaacctggacggtgcttgtttgaattttctgatatctgattttcacacgaatatactttttgtttgttttccttttccattttcaaaatgccaagatctgggagcctctttcactcctctagacacactgcctgagatagaagtttgcatcttattggctgtgggcagagactaggacccttatgggtacatttcagtaatctctcactgcctaaaatggtaatccctccagcctaagaggatgattctgttttgttgactcttgaatgctcccccaacattcctttggttttcctataagcaaaaccaaataccactataaatacaaaagcatctggtaaactgtaaagttactcatgtatcccaaccctccacagatttctgaagacaaagttttgcttggattaaaacaagatgttttactattttgca

SEQ ID NO: 196427 - DNA, 1321 bp, Homo sapiens
  Payload ID: 18755
  Gene Name: tumor protein D52-like 3
  Uniprot ID: Q96J77
  ENST ID: ENST00000381428
  CDS Start-End: 222-620
acaggccaggtcgtcaactcaactgtcaaggtgtccattgtaccagctgggccatggatccctcccgcctgaaatctgactccacctgccaagagtctgagcctgcaggcctagatttcgactctgctggccaagattatttctctgcagcccaataattcgactctttctaccaagaattggacctggactctcttaacgaagatcttctttcccagtccatgccacatgccaggacagagacctctgtgggcacatatgaatcccactcgacttctgaactggaggatctgacagagcccgagcaaagagagctcaaaaccaaactcactaaattggaggctgaaattgtaaccctacgccacgtactagcagccaaagagagacgctgtggggaactcaagaggaagttaggcctcaccgccttggtagggctgagacagaatctgtccaagagctggcttgatgttcaggtctccaacacctatgtgaaacagaagacatcagctgctctgtccaccatgggcactctcatctgcaggaagcttggaggcgtgaagaagtcggccacattcagatcttttgaaggaaaccctaaaggagaaggaagcagaatataaccctctggagagctcaagacagtaggaacctggacggtgcttgtttgaattttctgatatctgattttcacacgaatatactttttgtttgttttccttttccattttcaaaatgccaagatctgggagcctctttcactcctctagacacactgcctgagatagaagtttgcatcttattggctgtgggcagagactaggacccttatgggtacatttcagtaatctctcactgcctaaaatggtaatccctccagcctaagaggatgattctgttttgttgactcttgaatgctcccccaacattcctttggttttcctataagcaaaaccaaataccactataaatacaaaagcatctggtaaactgtaaagttactcatgtatcccaaccctccacagatttctgaagacaaagttttgcttggattaaaacaagatgttttactattttgcatgttcgatttttaatttgttgtgtttatcaaccaaaatggctttgtatgctggagaacaagaggtgagcctgcagcatacaagaaatgaaagtagtccaacaggcaaaggctttgacatatttcaggaaggcttgtgttagggacaatctcagactattatcatgggccaaacctgagagatgttatattttatttaataatttctacaacagtagtaagtttccccaataaattctcaactcc

SEQ ID NO: 196428 - DNA, 2579 bp, Homo sapiens
  Payload ID: 18756
  Gene Name: tumor protein p53
  Uniprot ID: P04637
  ENST ID: ENST00000269305
  CDS Start-End: 191-1372
gttttcccctcccatgtgctcaagactggcgctaaaagttttgagcttctcaaaagtctagagccaccgtccagggagcaggtagctgctgggctccggggacactttgcgttcgggctgggagcgtgctttccacgacggtgacacgcttccctggattggcagccagactgccttccgggtcactgccatggaggagccgcagtcagatcctagcgtcgagccccctctgagtcaggaaacattttcagacctatggaaactacttcctgaaaacaacgttctgtcccccttgccgtcccaagcaatggatgatttgatgctgtccccggacgatattgaacaatggttcactgaagacccaggtccagatgaagctcccagaatgccagaggctgctccccccgtggcccctgcaccagcagctcctacaccggcggcccctgcaccagccccctcctggcccctgtcatcttctgtcccttcccagaaaacctaccagggcagctacggtttccgtctgggcttcttgcattctgggacagccaagtctgtgacttgcacgtactcccctgccctcaacaagatgttttgccaactggccaagacctgccctgtgcagctgtgggttgattccacacccccgcccggcacccgcgtccgcgccatggccatctacaagcagtcacagcacatgacggaggttgtgaggcgctgcccccaccatgagcgctgctcagatagcgatggtctggcccctcctcagcatcttatccgagtggaaggaaatttgcgtgtggagtatttggatgacagaaacacttttcgacatagtgtggtggtgccctatgagccgcctgaggttggctctgactgtaccaccatccactacaactacatgtgtaacagttcctgcatgggcggcatgaaccggaggcccatcctcaccatcatcacactggaagactccagtggtaatctactgggacggaacagctttgaggtgcgtgtttgtgcctgtcctgggagagaccggcgcacagaggaagagaatctccgcaagaaaggggagcctcaccacgagctgcccccagggagcactaagcgagcactgcccaacaacaccagctcctctccccagccaaagaagaaaccactggatggagaatatttcacccttcagatccgtgggcgtgagcgcttcgagatgttccgagagctgaatgaggccttggaactcaaggatgcccaggctgggaaggagccaggggggagcagggctcactccagccacctgaagtccaaaaagggtcagtctacctcccgccataaaaaactcatgttcaagacagaagggcctgactcagactgacattctccacttcttgttccccactgacagcctcccacccccatctctccctcccctgccattttgggttttgggtctttgaacccttgcttgcaataggtgtgcgtcagaagcacccaggacttccatttgctttgtcccggggctccactgaacaagttggcctgcactggtgttttgttgtggggaggaggatggggagtaggacataccagcttagattttaaggtttttactgtgagggatgtttgggagatgtaagaaatgttcttgcagttaagggttagtttacaatcagccacattctaggtaggggcccacttcaccgtactaaccagggaagctgtccctcactgttgaattttctctaacttcaaggcccatatctgtgaaatgctggcatttgcacctacctcacagagtgcattgtgagggttaatgaaataatgtacatctggccttgaaaccaccttttattacatggggtctagaacttgacccccttgagggtgcttgttccctctccctgttggtcggtgggttggtagtttctacagttgggcagctggttaggtagagggagttgtcaagtctctgctggcccagccaaaccctgtctgacaacctcttggtgaaccttagtacctaaaaggaaatctcaccccatcccacaccctggaggatttcatctcttgtatatgatgatctggatccaccaagacttgttttatgctcagggtcaatttcttttttcttttttttttttttttttctttttctttgagactgggtctcgctttgttgcccaggctggagtggagtggcgtgatcttggcttactgcagcctttgcctccccggctcgagcagtcctgcctcagcctccggagtagctgggaccacaggttcatgccaccatggccagccaacttttgcatgttttgtagagatggggtctcacagtgttgcccaggctggtctcaaactcctgggctcaggcgatccacctgtctcagcctcccagagtgctgggattacaattgtgagccaccacgtccagctggaagggtcaacatcttttacattctgcaagcacatctgcattttcaccccacccttcccctccttctccctttttatatcccatttttatatcgatctcttattttacaataaaactttgctgccacctgtgtgtctgaggggtg

SEQ ID NO: 196429 - DNA, 1152 bp, Homo sapiens
  Payload ID: 18756
  Gene Name: tumor protein p53
  ENST ID: ENST00000359597
  CDS Start-End: 1-1032
atggaggagccgcagtcagatcctagcgtcgagccccctctgagtcaggaaacattttcagacctatggaaactacttcctgaaaacaacgttctgtcccccttgccgtcccaagcaatggatgatttgatgctgtccccggacgatattgaacaatggttcactgaagacccaggtccagatgaagctcccagaatgccagaggctgctccccccgtggcccctgcaccagcagctcctacaccggcggcccctgcaccagccccctcctggcccctgtcatcttctgtcccttcccagaaaacctaccagggcagctacggtttccgtctgggcttcttgcattctgggacagccaagtctgtgacttgcacgtactcccctgccctcaacaagatgttttgccaactggccaagacctgccctgtgcagctgtgggttgattccacacccccgcccggcacccgcgtccgcgccatggccatctacaagcagtcacagcacatgacggaggttgtgaggcgctgcccccaccatgagcgctgctcagatagcgatggtctggcccctcctcagcatcttatccgagtggaaggaaatttgcgtgtggagtatttggatgacagaaacacttttcgacatagtgtggtggtgccctatgagccgcctgaggttggctctgactgtaccaccatccactacaactacatgtgtaacagttcctgcatgggcggcatgaaccggaggcccatcctcaccatcatcacactggaagactccagtggtaatctactgggacggaacagctttgaggtgcgtgtttgtgcctgtcctgggagagaccggcgcacagaggaagagaatctccgcaagaaaggggagcctcaccacgagctgcccccagggagcactaagcgagcactgcccaacaacaccagctcctctccccagccaaagaagaaaccactggatggagaatatttcacccttcagaaaacatttccggccaggcacggtggatcacacctgtaatcccagctactcgggaggctgaggcaggagaatcgcttgaacccaggaggcagagggttgcagtgagccgagattgcgccattgcactctagcctgggcaacagagcaagactccatctc

SEQ ID NO: 196430 - DNA, 2653 bp, Homo sapiens
  Payload ID: 18756
  Gene Name: tumor protein p53
  Uniprot ID: P04637
  ENST ID: ENST00000420246
  CDS Start-End: 134-1159
ctagagccaccgtccagggagcaggtagctgctgggctccggggacactttgcgttcgggctgggagcgtgctttccacgacggtgacacgcttccctggattggcagccagactgccttccgggtcactgccatggaggagccgcagtcagatcctagcgtcgagccccctctgagtcaggaaacattttcagacctatggaaactacttcctgaaaacaacgttctgtcccccttgccgtcccaagcaatggatgatttgatgctgtccccggacgatattgaacaatggttcactgaagacccaggtccagatgaagctcccagaatgccagaggctgctccccccgtggcccctgcaccagcagctcctacaccggcggcccctgcaccagccccctcctggcccctgtcatcttctgtcccttcccagaaaacctaccagggcagctacggtttccgtctgggcttcttgcattctgggacagccaagtctgtgacttgcacgtactcccctgccctcaacaagatgttttgccaactggccaagacctgccctgtgcagctgtgggttgattccacacccccgcccggcacccgcgtccgcgccatggccatctacaagcagtcacagcacatgacggaggttgtgaggcgctgcccccaccatgagcgctgctcagatagcgatggtctggcccctcctcagcatcttatccgagtggaaggaaatttgcgtgtggagtatttggatgacagaaacacttttcgacatagtgtggtggtgccctatgagccgcctgaggttggctctgactgtaccaccatccactacaactacatgtgtaacagttcctgcatgggcggcatgaaccggaggcccatcctcaccatcatcacactggaagactccagtggtaatctactgggacggaacagctttgaggtgcgtgtttgtgcctgtcctgggagagaccggcgcacagaggaagagaatctccgcaagaaaggggagcctcaccacgagctgcccccagggagcactaagcgagcactgcccaacaacaccagctcctctccccagccaaagaagaaaccactggatggagaatatttcacccttcaggaccagaccagctttcaaaaagaaaattgttaaagagagcatgaaaatggttctatgactttgcctgatacagatgctacttgacttacgatggtgttacttcctgataaactcgtcgtaagttgaaaatattatccgtgggcgtgagcgcttcgagatgttccgagagctgaatgaggccttggaactcaaggatgcccaggctgggaaggagccaggggggagcagggctcactccagccacctgaagtccaaaaagggtcagtctacctcccgccataaaaaactcatgttcaagacagaagggcctgactcagactgacattctccacttcttgttccccactgacagcctcccacccccatctctccctcccctgccattttgggttttgggtctttgaacccttgcttgcaataggtgtgcgtcagaagcacccaggacttccatttgctttgtcccggggctccactgaacaagttggcctgcactggtgttttgttgtggggaggaggatggggagtaggacataccagcttagattttaaggtttttactgtgagggatgtttgggagatgtaagaaatgttcttgcagttaagggttagtttacaatcagccacattctaggtaggggcccacttcaccgtactaaccagggaagctgtccctcactgttgaattttctctaacttcaaggcccatatctgtgaaatgctggcatttgcacctacctcacagagtgcattgtgagggttaatgaaataatgtacatctggccttgaaaccaccttttattacatggggtctagaacttgacccccttgagggtgcttgttccctctccctgttggtcggtgggttggtagtttctacagttgggcagctggttaggtagagggagttgtcaagtctctgctggcccagccaaaccctgtctgacaacctcttggtgaaccttagtacctaaaaggaaatctcaccccatcccacaccctggaggatttcatctcttgtatatgatgatctggatccaccaagacttgttttatgctcagggtcaatttcttttttcttttttttttttttttttctttttctttgagactgggtctcgctttgttgcccaggctggagtggagtggcgtgatcttggcttactgcagcctttgcctccccggctcgagcagtcctgcctcagcctccggagtagctgggaccacaggttcatgccaccatggccagccaacttttgcatgttttgtagagatggggtctcacagtgttgcccaggctggtctcaaactcctgggctcaggcgatccacctgtctcagcctcccagagtgctgggattacaattgtgagccaccacgtccagctggaagggtcaacatcttttacattctgcaagcacatctgcattttcaccccacccttcccctccttctccctttttatatcccatttttatatcgatctcttattttacaataaaactttgctgccacctgtgtgtctgagggg

SEQ ID NO: 196431 - DNA, 2506 bp, Homo sapiens
  Payload ID: 18756
  Gene Name: tumor protein p53
  Uniprot ID: P04637
  ENST ID: ENST00000445888
  CDS Start-End: 137-1318
aaaagtctagagccaccgtccagggagcaggtagctgctgggctccggggacactttgcgttcgggctgggagcgtgctttccacgacggtgacacgcttccctggattggccagactgccttccgggtcactgccatggaggagccgcagtcagatcctagcgtcgagccccctctgagtcaggaaacattttcagacctatggaaactacttcctgaaaacaacgttctgtcccccttgccgtcccaagcaatggatgatttgatgctgtccccggacgatattgaacaatggttcactgaagacccaggtccagatgaagctcccagaatgccagaggctgctccccccgtggcccctgcaccagcagctcctacaccggcggcccctgcaccagccccctcctggcccctgtcatcttctgtcccttcccagaaaacctaccagggcagctacggtttccgtctgggcttcttgcattctgggacagccaagtctgtgacttgcacgtactcccctgccctcaacaagatgttttgccaactggccaagacctgccctgtgcagctgtgggttgattccacacccccgcccggcacccgcgtccgcgccatggccatctacaagcagtcacagcacatgacggaggttgtgaggcgctgcccccaccatgagcgctgctcagatagcgatggtctggcccctcctcagcatcttatccgagtggaaggaaatttgcgtgtggagtatttggatgacagaaacacttttcgacatagtgtggtggtgccctatgagccgcctgaggttggctctgactgtaccaccatccactacaactacatgtgtaacagttcctgcatgggcggcatgaaccggaggcccatcctcaccatcatcacactggaagactccagtggtaatctactgggacggaacagctttgaggtgcgtgtttgtgcctgtcctgggagagaccggcgcacagaggaagagaatctccgcaagaaaggggagcctcaccacgagctgcccccagggagcactaagcgagcactgcccaacaacaccagctcctctccccagccaaagaagaaaccactggatggagaatatttcacccttcagatccgtgggcgtgagcgcttcgagatgttccgagagctgaatgaggccttggaactcaaggatgcccaggctgggaaggagccaggggggagcagggctcactccagccacctgaagtccaaaaagggtcagtctacctcccgccataaaaaactcatgttcaagacagaagggcctgactcagactgacattctccacttcttgttccccactgacagcctcccacccccatctctccctcccctgccattttgggttttgggtctttgaacccttgcttgcaataggtgtgcgtcagaagcacccaggacttccatttgctttgtcccggggctccactgaacaagttggcctgcactggtgttttgttgtggggaggaggatggggagtaggacataccagcttagattttaaggtttttactgtgagggatgtttgggagatgtaagaaatgttcttgcagttaagggttagtttacaatcagccacattctaggtaggggcccacttcaccgtactaaccagggaagctgtccctcactgttgaattttctctaacttcaaggcccatatctgtgaaatgctggcatttgcacctacctcacagagtgcattgtgagggttaatgaaataatgtacatctggccttgaaaccaccttttattacatggggtctagaacttgacccccttgagggtgcttgttccctctccctgttggtcggtgggttggtagtttctacagttgggcagctggttaggtagagggagttgtcaagtctctgctggcccagccaaaccctgtctgacaacctcttggtgaaccttagtacctaaaaggaaatctcaccccatcccacaccctggaggatttcatctcttgtatatgatgatctggatccaccaagacttgttttatgctcagggtcaatttcttttttcttttttttttttttttttctttttctttgagactgggtctcgctttgttgcccaggctggagtggagtggcgtgatcttggcttactgcagcctttgcctccccggctcgagcagtcctgcctcagcctccggagtagctgggaccacaggttcatgccaccatggccagccaacttttgcatgttttgtagagatggggtctcacagtgttgcccaggctggtctcaaactcctgggctcaggcgatccacctgtctcagcctcccagagtgctgggattacaattgtgagccaccacgtccagctggaagggtcaacatcttttacattctgcaagcacatctgcattttcaccccacccttcccctccttctccctttttatatcccatttttatatcgatctcttattttacaataaaactttgctgcca

SEQ ID NO: 196432 - DNA, 2580 bp, Homo sapiens
  Payload ID: 18756
  Gene Name: tumor protein p53
  Uniprot ID: P04637
  ENST ID: ENST00000455263
  CDS Start-End: 134-1174
ctagagccaccgtccagggagcaggtagctgctgggctccggggacactttgcgttcgggctgggagcgtgctttccacgacggtgacacgcttccctggattggcagccagactgccttccgggtcactgccatggaggagccgcagtcagatcctagcgtcgagccccctctgagtcaggaaacattttcagacctatggaaactacttcctgaaaacaacgttctgtcccccttgccgtcccaagcaatggatgatttgatgctgtccccggacgatattgaacaatggttcactgaagacccaggtccagatgaagctcccagaatgccagaggctgctccccccgtggcccctgcaccagcagctcctacaccggcggcccctgcaccagccccctcctggcccctgtcatcttctgtcccttcccagaaaacctaccagggcagctacggtttccgtctgggcttcttgcattctgggacagccaagtctgtgacttgcacgtactcccctgccctcaacaagatgttttgccaactggccaagacctgccctgtgcagctgtgggttgattccacacccccgcccggcacccgcgtccgcgccatggccatctacaagcagtcacagcacatgacggaggttgtgaggcgctgcccccaccatgagcgctgctcagatagcgatggtctggcccctcctcagcatcttatccgagtggaaggaaatttgcgtgtggagtatttggatgacagaaacacttttcgacatagtgtggtggtgccctatgagccgcctgaggttggctctgactgtaccaccatccactacaactacatgtgtaacagttcctgcatgggcggcatgaaccggaggcccatcctcaccatcatcacactggaagactccagtggtaatctactgggacggaacagctttgaggtgcgtgtttgtgcctgtcctgggagagaccggcgcacagaggaagagaatctccgcaagaaaggggagcctcaccacgagctgcccccagggagcactaagcgagcactgcccaacaacaccagctcctctccccagccaaagaagaaaccactggatggagaatatttcacccttcagatgctacttgacttacgatggtgttacttcctgataaactcgtcgtaagttgaaaatattatccgtgggcgtgagcgcttcgagatgttccgagagctgaatgaggccttggaactcaaggatgcccaggctgggaaggagccaggggggagcagggctcactccagccacctgaagtccaaaaagggtcagtctacctcccgccataaaaaactcatgttcaagacagaagggcctgactcagactgacattctccacttcttgttccccactgacagcctcccacccccatctctccctcccctgccattttgggttttgggtctttgaacccttgcttgcaataggtgtgcgtcagaagcacccaggacttccatttgctttgtcccggggctccactgaacaagttggcctgcactggtgttttgttgtggggaggaggatggggagtaggacataccagcttagattttaaggtttttactgtgagggatgtttgggagatgtaagaaatgttcttgcagttaagggttagtttacaatcagccacattctaggtaggggcccacttcaccgtactaaccagggaagctgtccctcactgttgaattttctctaacttcaaggcccatatctgtgaaatgctggcatttgcacctacctcacagagtgcattgtgagggttaatgaaataatgtacatctggccttgaaaccaccttttattacatggggtctagaacttgacccccttgagggtgcttgttccctctccctgttggtcggtgggttggtagtttctacagttgggcagctggttaggtagagggagttgtcaagtctctgctggcccagccaaaccctgtctgacaacctcttggtgaaccttagtacctaaaaggaaatctcaccccatcccacaccctggaggatttcatctcttgtatatgatgatctggatccaccaagacttgttttatgctcagggtcaatttcttttttcttttttttttttttttttctttttctttgagactgggtctcgctttgttgcccaggctggagtggagtggcgtgatcttggcttactgcagcctttgcctccccggctcgagcagtcctgcctcagcctccggagtagctgggaccacaggttcatgccaccatggccagccaacttttgcatgttttgtagagatggggtctcacagtgttgcccaggctggtctcaaactcctgggctcaggcgatccacctgtctcagcctcccagagtgctgggattacaattgtgagccaccacgtccagctggaagggtcaacatcttttacattctgcaagcacatctgcattttcaccccacccttcccctccttctccctttttatatcccatttttatatcgatctcttattttacaataaaactttgctgccacctgtgtgtctgagggg

SEQ ID NO: 196433 - DNA, 1018 bp, Homo sapiens
  Payload ID: 18756
  Gene Name: tumor protein p53
  ENST ID: ENST00000413465
  CDS Start-End: 1-858
atggaggagccgcagtcagatcctagcgtcgagccccctctgagtcaggaaacattttcagacctatggaaactacttcctgaaaacaacgttctgtcccccttgccgtcccaagcaatggatgatttgatgctgtccccggacgatattgaacaatggttcactgaagacccaggtccagatgaagctcccagaatgccagaggctgctccccccgtggcccctgcaccagcagctcctacaccggcggcccctgcaccagccccctcctggcccctgtcatcttctgtcccttcccagaaaacctaccagggcagctacggtttccgtctgggcttcttgcattctgggacagccaagtctgtgacttgcacgtactcccctgccctcaacaagatgttttgccaactggccaagacctgccctgtgcagctgtgggttgattccacacccccgcccggcacccgcgtccgcgccatggccatctacaagcagtcacagcacatgacggaggttgtgaggcgctgcccccaccatgagcgctgctcagatagcgatggtctggcccctcctcagcatcttatccgagtggaaggaaatttgcgtgtggagtatttggatgacagaaacacttttcgacatagtgtggtggtgccctatgagccgcctgaggttggctctgactgtaccaccatccactacaactacatgtgtaacagttcctgcatgggcggcatgaaccggaggcccatcctcaccatcatcacactggaagactccaggccaaggcaggtggatcacctgaggtcaggagttcaagacagcctggccaacatagcgaaatcccatctctactaaaaatacaaaaattagcctggcagtggtggcccacgcctgtaatcccagctactaagggggctgaggcaggaggatctcttaaccagggaggaggaggttgcagtgagcagagattgtgccactgcactccagcctgtgcaacagagtgagactctgtctc

SEQ ID NO: 196434 - DNA, 546 bp, Homo sapiens
  Payload ID: 18756
  Gene Name: tumor protein p53
  ENST ID: ENST00000514944
  CDS Start-End: 80-546
ttcgggctgggagcgtgctttccacgacggtgacacgcttccctggattggcagccagactgccttccgggtcactgccatggaggagccgcagtcagatcctagcgtcgagccccctctgagtcaggaaacattttcagacctatggaaactacttcctgaaaacaacgttctgtactcccctgccctcaacaagatgttttgccaactggccaagacctgccctgtgcagctgtgggttgattccacacccccgcccggcacccgcgtccgcgccatggccatctacaagcagtcacagcacatgacggaggttgtgaggcgctgcccccaccatgagcgctgctcagatagcgatggtctggcccctcctcagcatcttatccgagtggaaggaaatttgcgtgtggagtatttggatgacagaaacacttttcgacatagtgtggtggtgccctatgagccgcctgaggttggctctgactgtaccaccatccactacaactacatgtgtaacagttcctgcatgggcggcatgaaccggag

SEQ ID NO: 196435 - DNA, 634 bp, Homo sapiens
  Payload ID: 18756
  Gene Name: tumor protein p53
  ENST ID: ENST00000508793
  CDS Start-End: 139-634
aatgcagggctgaggagtgtccgaagagaatgggcaggtgagcggtgagacagttgttcttccagaagctttgcagtgaaaggaatcaaagaaatggagccgtgtatcagcagccagactgccttccgggtcactgccatggaggagccgcagtcagatcctagcgtcgagccccctctgagtcaggaaacattttcagacctatggaaactacttcctgaaaacaacgttctgtcccccttgccgtcccaagcaatggatgatttgatgctgtccccggacgatattgaacaatggttcactgaagacccaggtccagatgaagctcccagaatgccagaggctgctccccccgtggcccctgcaccagcagctcctacaccggcggcccctgcaccagccccctcctggcccctgtcatcttctgtcccttcccagaaaacctaccagggcagctacggtttccgtctgggcttcttgcattctgggacagccaagtctgtgacttgcacgtactcccctgccctcaacaagatgttttgccaactggccaagacctgccctgtgcagctgtgggttgattccacacccccgcccggcacccgcgtccgcgccatggccatctacaagcagt

SEQ ID NO: 196436 - DNA, 729 bp, Homo sapiens
  Payload ID: 18756
  Gene Name: tumor protein p53
  ENST ID: ENST00000509690
  CDS Start-End: 133-729
aaaagtctagagccaccgtccagggagcaggtagctgctgggctccggggacactttgcgttcgggctgggagcgtgctttccacgacggtgacacgcttccctggattggtactcccctgccctcaacaagatgttttgccaactggccaagacctgccctgtgcagctgtgggttgattccacacccccgcccggcacccgcgtccgcgccatggccatctacaagcagtcacagcacatgacggaggttgtgaggcgctgcccccaccatgagcgctgctcagatagcgatggtctggcccctcctcagcatcttatccgagtggaaggaaatttgcgtgtggagtatttggatgacagaaacacttttcgacatagtgtggtggtgccctatgagccgcctgaggttggctctgactgtaccaccatccactacaactacatgtgtaacagttcctgcatgggcggcatgaaccggaggcccatcctcaccatcatcacactggaagactccagtggtaatctactgggacggaacagctttgaggtgcgtgtttgtgcctgtcctgggagagaccggcgcacagaggaagagaatctccgcaagaaaggggagcctcaccacgagctgcccccagggagcactaagcgagcactgcccaacaacaccagctcctctccccagccaaagaagaaaccactggatggagaatatttcacccttcag

SEQ ID NO: 196437 - DNA, 565 bp, Homo sapiens
  Payload ID: 18756
  Gene Name: tumor protein p53
  ENST ID: ENST00000503591
  CDS Start-End: 183-565
ttcgggctgggagcgtgctttccacgacggtgacacgcttccctggattggggctgaggagtgtccgaagagaatgggcaggtgagcggtgagacagttgttcttccagaagctttgcagtgaaaggaatcaaagaaatggagccgtgtatcagcagccagactgccttccgggtcactgccatggaggagccgcagtcagatcctagcgtcgagccccctctgagtcaggaaacattttcagacctatggaaactacttcctgaaaacaacgttctgtcccccttgccgtcccaagcaatggatgatttgatgctgtccccggacgatattgaacaatggttcactgaagacccaggtccagatgaagctcccagaatgccagaggctgctccccccgtggcccctgcaccagcagctcctacaccggcggcccctgcaccagccccctcctggcccctgtcatcttctgtcccttcccagaaaacctaccagggcagctacggtttccgtctgggcttcttgcattctgggacagccaagtctgtgacttgcacgtactcccc

SEQ ID NO: 196438 - DNA, 175 bp, Homo sapiens
  Payload ID: 18756
  Gene Name: tumor protein p53
  ENST ID: ENST00000576024
  CDS Start-End: 1-95
cctctccccagccaaagaagaaaccactggatggagaatatttcacccttcagccacctgaagtccaaaaagggtcagtctacctcccgccataaaaaactcatgttcaagacagaagggcctgactcagactgacattctccacttcttgttccccactgacagcctcccaccc

SEQ ID NO: 196439 - DNA, 568 bp, Homo sapiens
  Payload ID: 18756
  Gene Name: tumor protein p53
  ENST ID: ENST00000604348
  CDS Start-End: 140-568
aaaagtctagagccaccgtccagggagcaggtagctgctgggctccggggacactttgcgttcgggctgggagcgtgctttccacgacggtgacacgcttccctggattggcagccagactgccttccgggtcactgccatggaggagccgcagtcagatcctagcgtcgagccccctctgagtcaggaaacattttcagacctatggaaactacttcctgaaaacaacgttctgtcccccttgccgtcccaagcaatggatgatttgatgctgtccccggacgatattgaacaatggttcactgaagacccaggtccagatgaagctcccagaatgccagaggctgctccccccgtggcccctgcaccagcagctcctacaccggcggcccctgcaccagccccctcctggcccctgtcatcttctgtcccttcccagaaaacctaccagggcagctacggtttccgtctgggcttcttgcattctgggacagccaagtctgtgacttgcacgatgttttgccaactggccaagacctgccctgtgcagctgtgggttgattccaca

SEQ ID NO: 196440 - DNA, 2331 bp, Homo sapiens
  Payload ID: 18756
  Gene Name: tumor protein p53
  ENST ID: ENST00000610623
  CDS Start-End: 360-923
tgaggccaggagatggaggctgcagtgagctgtgatcacaccactgtgctccagcctgagtgacagagcaagaccctatctcaaaaaaaaaaaaaaaaaagaaaagctcctgaggtgtagacgccaactctctctagctcgctagtgggttgcaggaggtgcttacgcatgtttgtttctttgctgccgtcttccagttgctttatctgttcacttgtgccctgactttcaactctgtctccttcctcttcctacagtactcccctgccctcaacaagatgttttgccaactggccaagacctgccctgtgcagctgtgggttgattccacacccccgcccggcacccgcgtccgcgccatggccatctacaagcagtcacagcacatgacggaggttgtgaggcgctgcccccaccatgagcgctgctcagatagcgatggtctggcccctcctcagcatcttatccgagtggaaggaaatttgcgtgtggagtatttggatgacagaaacacttttcgacatagtgtggtggtgccctatgagccgcctgaggttggctctgactgtaccaccatccactacaactacatgtgtaacagttcctgcatgggcggcatgaaccggaggcccatcctcaccatcatcacactggaagactccagtggtaatctactgggacggaacagctttgaggtgcgtgtttgtgcctgtcctgggagagaccggcgcacagaggaagagaatctccgcaagaaaggggagcctcaccacgagctgcccccagggagcactaagcgagcactgcccaacaacaccagctcctctccccagccaaagaagaaaccactggatggagaatatttcacccttcagatgctacttgacttacgatggtgttacttcctgataaactcgtcgtaagttgaaaatattatccgtgggcgtgagcgcttcgagatgttccgagagctgaatgaggccttggaactcaaggatgcccaggctgggaaggagccaggggggagcagggctcactccagccacctgaagtccaaaaagggtcagtctacctcccgccataaaaaactcatgttcaagacagaagggcctgactcagactgacattctccacttcttgttccccactgacagcctcccacccccatctctccctcccctgccattttgggttttgggtctttgaacccttgcttgcaataggtgtgcgtcagaagcacccaggacttccatttgctttgtcccggggctccactgaacaagttggcctgcactggtgttttgttgtggggaggaggatggggagtaggacataccagcttagattttaaggtttttactgtgagggatgtttgggagatgtaagaaatgttcttgcagttaagggttagtttacaatcagccacattctaggtaggggcccacttcaccgtactaaccagggaagctgtccctcactgttgaattttctctaacttcaaggcccatatctgtgaaatgctggcatttgcacctacctcacagagtgcattgtgagggttaatgaaataatgtacatctggccttgaaaccaccttttattacatggggtctagaacttgacccccttgagggtgcttgttccctctccctgttggtcggtgggttggtagtttctacagttgggcagctggttaggtagagggagttgtcaagtctctgctggcccagccaaaccctgtctgacaacctcttggtgaaccttagtacctaaaaggaaatctcaccccatcccacaccctggaggatttcatctcttgtatatgatgatctggatccaccaagacttgttttatgctcagggtcaatttcttttttcttttttttttttttttttctttttctttgagactgggtctcgctttgttgcccaggctggagtggagtggcgtgatcttggcttactgcagcctttgcctccccggctcgagcagtcctgcctcagcctccggagtagctgggaccacaggttcatgccaccatggccagccaacttttgcatgttttgtagagatggggtctcacagtgttgcccaggctggtctcaaactcctgggctcaggcgatccacctgtctcagcctcccagagtgctgggattacaattgtgagccaccacgtccagctggaagggtcaacatcttttacattctgcaagcacatctgcattttcaccccacccttcccctccttctccctttttatatcccatttttatatcgatctcttattttacaataaaactttgctgccacctgtgtgtctgaggggtg

SEQ ID NO: 196441 - DNA, 2639 bp, Homo sapiens
  Payload ID: 18756
  Gene Name: tumor protein p53
  Uniprot ID: P04637
  ENST ID: ENST00000610292
  CDS Start-End: 368-1432
ctagagccaccgtccagggagcaggtagctgctgggctccggggacactttgcgttcgggctgggagcgtgctttccacgacggtgacacgcttccctggattggcagccagactgccttccgggtcactgccatggaggagccgcagtcagatcctagcgtcgagccccctctgagtcaggaaacattttcagacctatggaaactgtgagtggatccattggaagggcaggcccaccacccccaccccaaccccagccccctagcagagacctgtgggaagcgaaaattccatgggactgactttctgctcttgtctttcagacttcctgaaaacaacgttctgtcccccttgccgtcccaagcaatggatgatttgatgctgtccccggacgatattgaacaatggttcactgaagacccaggtccagatgaagctcccagaatgccagaggctgctccccccgtggcccctgcaccagcagctcctacaccggcggcccctgcaccagccccctcctggcccctgtcatcttctgtcccttcccagaaaacctaccagggcagctacggtttccgtctgggcttcttgcattctgggacagccaagtctgtgacttgcacgtactcccctgccctcaacaagatgttttgccaactggccaagacctgccctgtgcagctgtgggttgattccacacccccgcccggcacccgcgtccgcgccatggccatctacaagcagtcacagcacatgacggaggttgtgaggcgctgcccccaccatgagcgctgctcagatagcgatggtctggcccctcctcagcatcttatccgagtggaaggaaatttgcgtgtggagtatttggatgacagaaacacttttcgacatagtgtggtggtgccctatgagccgcctgaggttggctctgactgtaccaccatccactacaactacatgtgtaacagttcctgcatgggcggcatgaaccggaggcccatcctcaccatcatcacactggaagactccagtggtaatctactgggacggaacagctttgaggtgcgtgtttgtgcctgtcctgggagagaccggcgcacagaggaagagaatctccgcaagaaaggggagcctcaccacgagctgcccccagggagcactaagcgagcactgcccaacaacaccagctcctctccccagccaaagaagaaaccactggatggagaatatttcacccttcagatccgtgggcgtgagcgcttcgagatgttccgagagctgaatgaggccttggaactcaaggatgcccaggctgggaaggagccaggggggagcagggctcactccagccacctgaagtccaaaaagggtcagtctacctcccgccataaaaaactcatgttcaagacagaagggcctgactcagactgacattctccacttcttgttccccactgacagcctcccacccccatctctccctcccctgccattttgggttttgggtctttgaacccttgcttgcaataggtgtgcgtcagaagcacccaggacttccatttgctttgtcccggggctccactgaacaagttggcctgcactggtgttttgttgtggggaggaggatggggagtaggacataccagcttagattttaaggtttttactgtgagggatgtttgggagatgtaagaaatgttcttgcagttaagggttagtttacaatcagccacattctaggtaggggcccacttcaccgtactaaccagggaagctgtccctcactgttgaattttctctaacttcaaggcccatatctgtgaaatgctggcatttgcacctacctcacagagtgcattgtgagggttaatgaaataatgtacatctggccttgaaaccaccttttattacatggggtctagaacttgacccccttgagggtgcttgttccctctccctgttggtcggtgggttggtagtttctacagttgggcagctggttaggtagagggagttgtcaagtctctgctggcccagccaaaccctgtctgacaacctcttggtgaaccttagtacctaaaaggaaatctcaccccatcccacaccctggaggatttcatctcttgtatatgatgatctggatccaccaagacttgttttatgctcagggtcaatttcttttttcttttttttttttttttttctttttctttgagactgggtctcgctttgttgcccaggctggagtggagtggcgtgatcttggcttactgcagcctttgcctccccggctcgagcagtcctgcctcagcctccggagtagctgggaccacaggttcatgccaccatggccagccaacttttgcatgttttgtagagatggggtctcacagtgttgcccaggctggtctcaaactcctgggctcaggcgatccacctgtctcagcctcccagagtgctgggattacaattgtgagccaccacgtccagctggaagggtcaacatcttttacattctgcaagcacatctgcattttcaccccacccttcccctccttctccctttttatatcccatttttatatcgatctcttattttacaataaaactttgctgccacctgtgtgtctgaggggtg

SEQ ID NO: 196442 - DNA, 2404 bp, Homo sapiens
  Payload ID: 18756
  Gene Name: tumor protein p53
  Uniprot ID: P04637
  ENST ID: ENST00000510385
  CDS Start-End: 279-908
tgaggccaggagatggaggctgcagtgagctgtgatcacaccactgtgctccagcctgagtgacagagcaagaccctatctcaaaaaaaaaaaaaaaaaagaaaagctcctgaggtgtagacgccaactctctctagctcgctagtgggttgcaggaggtgcttacgcatgtttgtttctttgctgccgtcttccagttgctttatctgttcacttgtgccctgactttcaactctgtctccttcctcttcctacagtactcccctgccctcaacaagatgttttgccaactggccaagacctgccctgtgcagctgtgggttgattccacacccccgcccggcacccgcgtccgcgccatggccatctacaagcagtcacagcacatgacggaggttgtgaggcgctgcccccaccatgagcgctgctcagatagcgatggtctggcccctcctcagcatcttatccgagtggaaggaaatttgcgtgtggagtatttggatgacagaaacacttttcgacatagtgtggtggtgccctatgagccgcctgaggttggctctgactgtaccaccatccactacaactacatgtgtaacagttcctgcatgggcggcatgaaccggaggcccatcctcaccatcatcacactggaagactccagtggtaatctactgggacggaacagctttgaggtgcgtgtttgtgcctgtcctgggagagaccggcgcacagaggaagagaatctccgcaagaaaggggagcctcaccacgagctgcccccagggagcactaagcgagcactgcccaacaacaccagctcctctccccagccaaagaagaaaccactggatggagaatatttcacccttcaggaccagaccagctttcaaaaagaaaattgttaaagagagcatgaaaatggttctatgactttgcctgatacagatgctacttgacttacgatggtgttacttcctgataaactcgtcgtaagttgaaaatattatccgtgggcgtgagcgcttcgagatgttccgagagctgaatgaggccttggaactcaaggatgcccaggctgggaaggagccaggggggagcagggctcactccagccacctgaagtccaaaaagggtcagtctacctcccgccataaaaaactcatgttcaagacagaagggcctgactcagactgacattctccacttcttgttccccactgacagcctcccacccccatctctccctcccctgccattttgggttttgggtctttgaacccttgcttgcaataggtgtgcgtcagaagcacccaggacttccatttgctttgtcccggggctccactgaacaagttggcctgcactggtgttttgttgtggggaggaggatggggagtaggacataccagcttagattttaaggtttttactgtgagggatgtttgggagatgtaagaaatgttcttgcagttaagggttagtttacaatcagccacattctaggtaggggcccacttcaccgtactaaccagggaagctgtccctcactgttgaattttctctaacttcaaggcccatatctgtgaaatgctggcatttgcacctacctcacagagtgcattgtgagggttaatgaaataatgtacatctggccttgaaaccaccttttattacatggggtctagaacttgacccccttgagggtgcttgttccctctccctgttggtcggtgggttggtagtttctacagttgggcagctggttaggtagagggagttgtcaagtctctgctggcccagccaaaccctgtctgacaacctcttggtgaaccttagtacctaaaaggaaatctcaccccatcccacaccctggaggatttcatctcttgtatatgatgatctggatccaccaagacttgttttatgctcagggtcaatttcttttttcttttttttttttttttttctttttctttgagactgggtctcgctttgttgcccaggctggagtggagtggcgtgatcttggcttactgcagcctttgcctccccggctcgagcagtcctgcctcagcctccggagtagctgggaccacaggttcatgccaccatggccagccaacttttgcatgttttgtagagatggggtctcacagtgttgcccaggctggtctcaaactcctgggctcaggcgatccacctgtctcagcctcccagagtgctgggattacaattgtgagccaccacgtccagctggaagggtcaacatcttttacattctgcaagcacatctgcattttcaccccacccttcccctccttctccctttttatatcccatttttatatcgatctcttattttacaataaaactttgctgccacctgtgtgtctgaggggtg

SEQ ID NO: 196443 - DNA, 2580 bp, Homo sapiens; identical to SEQ ID NO: 196432
  Payload ID: 18756
  Gene Name: tumor protein p53
  Uniprot ID: P04637
  ENST ID: ENST00000610538
  CDS Start-End: 251-1174

SEQ ID NO: 196444 - DNA, 2271 bp, Homo sapiens
  Payload ID: 18756
  Gene Name: tumor protein p53
  Uniprot ID: P04637
  ENST ID: ENST00000504937
  CDS Start-End: 279-1064
tgaggccaggagatggaggctgcagtgagctgtgatcacaccactgtgctccagcctgagtgacagagcaagaccctatctcaaaaaaaaaaaaaaaaaagaaaagctcctgaggtgtagacgccaactctctctagctcgctagtgggttgcaggaggtgcttacgcatgtttgtttctttgctgccgtcttccagttgctttatctgttcacttgtgccctgactttcaactctgtctccttcctcttcctacagtactcccctgccctcaacaagatgttttgccaactggccaagacctgccctgtgcagctgtgggttgattccacacccccgcccggcacccgcgtccgcgccatggccatctacaagcagtcacagcacatgacggaggttgtgaggcgctgcccccaccatgagcgctgctcagatagcgatggtctggcccctcctcagcatcttatccgagtggaaggaaatttgcgtgtggagtatttggatgacagaaacacttttcgacatagtgtggtggtgccctatgagccgcctgaggttggctctgactgtaccaccatccactacaactacatgtgtaacagttcctgcatgggcggcatgaaccggaggcccatcctcaccatcatcacactggaagactccagtggtaatctactgggacggaacagctttgaggtgcgtgtttgtgcctgtcctgggagagaccggcgcacagaggaagagaatctccgcaagaaaggggagcctcaccacgagctgcccccagggagcactaagcgagcactgcccaacaacaccagctcctctccccagccaaagaagaaaccactggatggagaatatttcacccttcagatccgtgggcgtgagcgcttcgagatgttccgagagctgaatgaggccttggaactcaaggatgcccaggctgggaaggagccaggggggagcagggctcactccagccacctgaagtccaaaaagggtcagtctacctcccgccataaaaaactcatgttcaagacagaagggcctgactcagactgacattctccacttcttgttccccactgacagcctcccacccccatctctccctcccctgccattttgggttttgggtctttgaacccttgcttgcaataggtgtgcgtcagaagcacccaggacttccatttgctttgtcccggggctccactgaacaagttggcctgcactggtgttttgttgtggggaggaggatggggagtaggacataccagcttagattttaaggtttttactgtgagggatgtttgggagatgtaagaaatgttcttgcagttaagggttagtttacaatcagccacattctaggtaggggcccacttcaccgtactaaccagggaagctgtccctcactgttgaattttctctaacttcaaggcccatatctgtgaaatgctggcatttgcacctacctcacagagtgcattgtgagggttaatgaaataatgtacatctggccttgaaaccaccttttattacatggggtctagaacttgacccccttgagggtgcttgttccctctccctgttggtcggtgggttggtagtttctacagttgggcagctggttaggtagagggagttgtcaagtctctgctggcccagccaaaccctgtctgacaacctcttggtgaaccttagtacctaaaaggaaatctcaccccatcccacaccctggaggatttcatctcttgtatatgatgatctggatccaccaagacttgttttatgctcagggtcaatttcttttttcttttttttttttttttttctttttctttgagactgggtctcgctttgttgcccaggctggagtggagtggcgtgatcttggcttactgcagcctttgcctccccggctcgagcagtcctgcctcagcctccggagtagctgggaccacaggttcatgccaccatggccagccaacttttgcatgttttgtagagatggggtctcacagtgttgcccaggctggtctcaaactcctgggctcaggcgatccacctgtctcagcctcccagagtgctgggattacaattgtgagccaccacgtccagctggaagggtcaacatcttttacattctgcaagcacatctgcattttcaccccacccttcccctccttctccctttttatatcccatttttatatcgatctcttattttacaataaaactttgctgccacctgtgtgtctgaggggtg

SEQ ID NO: 196445 - DNA, 2404 bp, Homo sapiens; identical to SEQ ID NO: 196442
  Payload ID: 18756
  Gene Name: tumor protein p53
  ENST ID: ENST00000618944
  CDS Start-End: 360-908

SEQ ID NO: 196446 - DNA, 2579 bp, Homo sapiens; identical to SEQ ID NO: 196428
  Payload ID: 18756
  Gene Name: tumor protein p53
  Uniprot ID: P04637
  ENST ID: ENST00000620739
  CDS Start-End: 308-1372

SEQ ID NO: 196447 - DNA, 2653 bp, Homo sapiens; identical to SEQ ID NO: 196430
  Payload ID: 18756
  Gene Name: tumor protein p53
  Uniprot ID: P04637
  ENST ID: ENST00000622645
  CDS Start-End: 251-1159

SEQ ID NO: 196448 - DNA, 2724 bp, Homo sapiens
  Payload ID: 18756
  Gene Name: tumor protein p53
  Uniprot ID: P04637
  ENST ID: ENST00000617185
  CDS Start-End: 203-1228
gatgggattggggttttcccctcccatgtgctcaagactggcgctaaaagttttgagcttctcaaaagtctagagccaccgtccagggagcaggtagctgctgggctccggggacactttgcgttcgggctgggagcgtgctttccacgacggtgacacgcttccctggattggcagccagactgccttccgggtcactgccatggaggagccgcagtcagatcctagcgtcgagccccctctgagtcaggaaacattttcagacctatggaaactacttcctgaaaacaacgttctgtcccccttgccgtcccaagcaatggatgatttgatgctgtccccggacgatattgaacaatggttcactgaagacccaggtccagatgaagctcccagaatgccagaggctgctccccccgtggcccctgcaccagcagctcctacaccggcggcccctgcaccagccccctcctggcccctgtcatcttctgtcccttcccagaaaacctaccagggcagctacggtttccgtctgggcttcttgcattctgggacagccaagtctgtgacttgcacgtactcccctgccctcaacaagatgttttgccaactggccaagacctgccctgtgcagctgtgggttgattccacacccccgcccggcacccgcgtccgcgccatggccatctacaagcagtcacagcacatgacggaggttgtgaggcgctgcccccaccatgagcgctgctcagatagcgatggtctggcccctcctcagcatcttatccgagtggaaggaaatttgcgtgtggagtatttggatgacagaaacacttttcgacatagtgtggtggtgccctatgagccgcctgaggttggctctgactgtaccaccatccactacaactacatgtgtaacagttcctgcatgggcggcatgaaccggaggcccatcctcaccatcatcacactggaagactccagtggtaatctactgggacggaacagctttgaggtgcgtgtttgtgcctgtcctgggagagaccggcgcacagaggaagagaatctccgcaagaaaggggagcctcaccacgagctgcccccagggagcactaagcgagcactgcccaacaacaccagctcctctccccagccaaagaagaaaccactggatggagaatatttcacccttcaggaccagaccagctttcaaaaagaaaattgttaaagagagcatgaaaatggttctatgactttgcctgatacagatgctacttgacttacgatggtgttacttcctgataaactcgtcgtaagttgaaaatattatccgtgggcgtgagcgcttcgagatgttccgagagctgaatgaggccttggaactcaaggatgcccaggctgggaaggagccaggggggagcagggctcactccagccacctgaagtccaaaaagggtcagtctacctcccgccataaaaaactcatgttcaagacagaagggcctgactcagactgacattctccacttcttgttccccactgacagcctcccacccccatctctccctcccctgccattttgggttttgggtctttgaacccttgcttgcaataggtgtgcgtcagaagcacccaggacttccatttgctttgtcccggggctccactgaacaagttggcctgcactggtgttttgttgtggggaggaggatggggagtaggacataccagcttagattttaaggtttttactgtgagggatgtttgggagatgtaagaaatgttcttgcagttaagggttagtttacaatcagccacattctaggtaggggcccacttcaccgtactaaccagggaagctgtccctcactgttgaattttctctaacttcaaggcccatatctgtgaaatgctggcatttgcacctacctcacagagtgcattgtgagggttaatgaaataatgtacatctggccttgaaaccaccttttattacatggggtctagaacttgacccccttgagggtgcttgttccctctccctgttggtcggtgggttggtagtttctacagttgggcagctggttaggtagagggagttgtcaagtctctgctggcccagccaaaccctgtctgacaacctcttggtgaaccttagtacctaaaaggaaatctcaccccatcccacaccctggaggatttcatctcttgtatatgatgatctggatccaccaagacttgttttatgctcagggtcaatttcttttttcttttttttttttttttttctttttctttgagactgggtctcgctttgttgcccaggctggagtggagtggcgtgatcttggcttactgcagcctttgcctccccggctcgagcagtcctgcctcagcctccggagtagctgggaccacaggttcatgccaccatggccagccaacttttgcatgttttgtagagatggggtctcacagtgttgcccaggctggtctcaaactcctgggctcaggcgatccacctgtctcagcctcccagagtgctgggattacaattgtgagccaccacgtccagctggaagggtcaacatcttttacattctgcaagcacatctgcattttcaccccacccttcccctccttctccctttttatatcccatttttatatcgatctcttattttacaataaaactttgctgccacctgtgtgtctgaggggtg

SEQ ID NO: 196449 - DNA, 2506 bp, Homo sapiens; identical to SEQ ID NO: 196431
  Payload ID: 18756
  Gene Name: tumor protein p53
  Uniprot ID: P04637
  ENST ID: ENST00000619485
  CDS Start-End: 254-1318

SEQ ID NO: 196450 - DNA, 1149 bp, Homo sapiens
  Payload ID: 18756
  Gene Name: tumor protein p53
  ENST ID: ENST00000615910
  CDS Start-End: 1-1149
atggaggagccgcagtcagatcctagcgtcgagccccctctgagtcaggaaacattttcagacctatggaaactacttcctgaaaacaacgttctgtcccccttgccgtcccaagcaatggatgatttgatgctgtccccggacgatattgaacaatggttcactgaagacccaggtccagatgaagctcccagaatgccagaggctgctccccccgtggcccctgcaccagcagctcctacaccggcggcccctgcaccagccccctcctggcccctgtcatcttctgtcccttcccagaaaacctaccagggcagctacggtttccgtctgtcttgcaagtactcccctgccctcaacaagatgttttgccaactggccaagacctgccctgtgcagctgtgggttgattccacacccccgcccggcacccgcgtccgcgccatggccatctacaagcagtcacagcacatgacggaggttgtgaggcgctgcccccaccatgagcgctgctcagatagcgatggtctggcccctcctcagcatcttatccgagtggaaggaaatttgcgtgtggagtatttggatgacagaaacacttttcgacatagtgtggtggtgccctatgagccgcctgaggttggctctgactgtaccaccatccactacaactacatgtgtaacagttcctgcatgggcggcatgaaccggaggcccatcctcaccatcatcacactggaagactccagtggtaatctactgggacggaacagctttgaggtgcgtgtttgtgcctgtcctgggagagaccggcgcacagaggaagagaatctccgcaagaaaggggagcctcaccacgagctgcccccagggagcactaagcgagcactgcccaacaacaccagctcctctccccagccaaagaagaaaccactggatggagaatatttcacccttcagatccgtgggcgtgagcgcttcgagatgttccgagagctgaatgaggccttggaactcaaggatgcccaggctgggaaggagccaggggggagcagggctcactccagccacctgaagtccaaaaagggtcagtctacctcccgccataaaaaactcatgttcaagacagaagggcctgactcagactga

SEQ ID NO: 196451 - DNA, 2271 bp, Homo sapiens; identical to SEQ ID NO: 196444
  Payload ID: 18756
  Gene Name: tumor protein p53
  ENST ID: ENST00000619186
  CDS Start-End: 360-1064

SEQ ID NO: 196452 - DNA, 2331 bp, Homo sapiens; identical to SEQ ID NO: 196440
  Payload ID: 18756
  Gene Name: tumor protein p53
  Uniprot ID: P04637
  ENST ID: ENST00000504290
  CDS Start-End: 279-923

SEQ ID NO: 196453 - DNA, 1883 bp, Homo sapiens
  Payload ID: 18756
  Gene Name: tumor protein p53
  ENST ID: ENST00000635293
  CDS Start-End: 261-1493
tctcaaaagtctagagccaccgtccagggagcaggtagctgctgggctccggggacactttgcgttcgggctgggagcgtgctttccacgacggtgacacgcttccctggattggcagccagactgccttccgggtcactgccatggaggagccgcagtcagatcctagcgtcgagccccctctgagtcaggaaacattttcagacctatggaaactacttcctgaaaacaacgttctgtcccccttgccgtcccaagcaatggatgatttgatgctgtccccggacgatattgaacaatggttcactgaagacccaggtccagatgaagctcccagaatgccagaggctgctccccccgtggcccctgcaccagcagctcctacaccggcggcccctgcaccagccccctcctggcccctgtcatcttctgtcccttcccagaaaacctaccagggcagctacggtttccgtctgggcttcttgcattctgggacagccaagtctgtgacttgcacgtactcccctgccctcaacaagatgttttgccaactggccaagacctgccctgtgcagctgtgggttgattccacacccccgcccggcacccgcgtccgcgccatggccatctacaagcagtcacagcacatgacggaggttgtgaggcgctgcccccaccatgagcgctgctcagatagcgatggtctggcccctcctcagcatcttatccgagtggaaggaaatttgcgtgtggagtatttggatgacagaaacacttttcgacatagtgtggtggtgccctatgagccgcctgaggttggctctgactgtaccaccatccactacaactacatgtgtaacagttcctgcatgggcggcatgaaccggaggcccatcctcaccatcatcacactggaagactccagtggtaatctactgggacggaacagctttgaggtgcgtgtttgtgcctgtcctgggagagaccggcgcacagaggaagagaatctccgcaagaaaggggagcctcaccacgagctgcccccagggagcactaagcgagcactgcccaacaacaccagctcctctccccagccaaagaagaaaccactggatggagaatatttcacccttcagatccgtgggcgtgagcgcttcgagatgttccgagagctgaatgaggccttggaactcaaggatgcccaggctgggaaggagccaggggggagcagggctcactccagggaatgccaaacactctccccaggagatccagacccgcctctttcagagacttttaacttaaacatctgtccctacccagcaggcaaactagagctcctgaagctcagtccctgtccttgcctctgtagacaggtcaccttgatgagcttcctttttttttttttaatttttttttattttaggctttattggggcataattgatcccccaaaattgcatacattcaaggtatgcagtgtgatgatttgatatgggggtatattgtgaaaccattaccacaatcaaattaatcagcacgtccatcatcacacacagttaccatttgtgtgtgtgcacgtgtgttcacctacgacgaggacacttggacctactctgcagatctcaagtaaacagaaaatctccctttttgacaaccatcctccaccctttcaatcccaaccttttcctagattatgtccctagctctgtttttatttctgctgtgctgcttcagatccattctgactctgccaaacccttctttgcgtgagccactgcgcctggccacaacaccccatttctattttaataaaataaaatactgtgaaaaacatttacaatttttaaattttaattttaaaattaaacttatatttattc

SEQ ID NO: 196454 - DNA, 6346 bp, Homo sapiens
  Payload ID: 18757
  Gene Name: tumor protein p53 binding protein 1
  Uniprot ID: Q12888
  ENST ID: ENST00000263801
  CDS Start-End: 254-6172
gaggggagccatcttgtccctctctgcctccgagtttgtatcgttgcctccatctgtgtctgtgtgtctgtattatcgttgtttggcgtgtttttttttttttttgttttttgtcactgcctgcctgggtcctgcccgaggtctccatcctcggtttccctgtccttgccccgggccctgggagtgctctggaaggctgcgcagtattggaggggacagaatgaccttccggccttgagtccctggggagcagatggaccctactggaagtcagttggattcagatttctctcagcaagatactccttgcctgataattgaagattctcagcctgaaagccaggttctagaggatgattctggttctcacttcagtatgctatctcgacaccttcctaatctccagacgcacaaagaaaatcctgtgttggatgttgtgtccaatcctgaacaaacagctggagaagaacgaggagacggtaatagtgggttcaatgaacatttgaaagaaaacaaggttgcagaccctgtggattcttctaacttggacacatgtggttccatcagtcaggtcattgagcagttacctcagccaaacaggacaagcagtgttctgggaatgtcagtggaatctgctcctgctgtggaggaagagaagggagaagagttggaacagaaggagaaagagaaggaagaagatacttcaggcaatactacacattcccttggtgctgaagatactgcctcatcacagttgggttttggggttctggaactctcccagagccaggatgttgaggaaaatactgtgccatatgaagtggacaaagagcagctacaatcagtaaccaccaactctggttataccaggctgtctgatgtggatgctaatactgcaattaagcatgaagaacagtccaacgaagatatccccatagcagaacagtccagcaaggacatccctgtgacagcacagcccagtaaggatgtacatgttgtaaaagagcaaaatccaccacctgcaaggtcagaggacatgccttttagccccaaagcatctgttgctgctatggaagcaaaagaacagttgtctgcacaagaacttatggaaagtggactgcagattcagaagtcaccagagcctgaggttttgtcaactcaggaagacttgtttgaccagagcaataaaacagtatcttctgatggttgctctactccttcaagggaggaaggtgggtgttctttggcttccactcctgccaccactctgcatctcctgcagctctctggtcagaggtcccttgttcaggacagtctttccacgaattcttcagatcttgttgctccttctcctgatgctttccgatctactccttttatcgttcctagcagtcccacagagcaagaagggagacaagataagccaatggacacgtcagtgttatctgaagaaggaggagagccttttcagaagaaacttcaaagtggtgaaccagtggagttagaaaacccccctctcctgcctgagtccactgtatcaccacaagcctcaacaccaatatctcagagcacaccagtcttccctcctgggtcacttcctatcccatcccagcctcagttttctcatgacatttttattccttccccaagtctggaagaacaatcaaatgatgggaagaaagatggagatatgcatagttcatctttgacagttgagtgttctaaaacttcagagattgaaccaaagaattcccctgaggatcttgggctatctttgacaggggattcttgcaagttgatgctttctacaagtgaatatagtcagtccccaaagatggagagcttgagttctcacagaattgatgaagatggagaaaacacacagattgaggatacggaacccatgtctccagttctcaattctaaatttgttcctgctgaaaatgatagtatcctgatgaatccagcacaggatggtgaagtacaactgagtcagaatgatgacaaaacaaagggagatgatacagacaccagggatgacattagtattttagccactggttgcaagggcagagaagaaacggtagcagaagatgtttgtattgatctcacttgtgattcggggagtcaggcagttccgtcaccagctactcgatctgaggcactttctagtgtgttagatcaggaggaagctatggaaattaaagaacaccatccagaggaggggtcttcagggtctgaggtggaagaaatccctgagacaccttgtgaaagtcaaggagaggaactcaaagaagaaaatatggagagtgttccgttgcacctttctctgactgaaactcagtcccaagggttgtgtcttcaaaaggaaatgccaaaaaaagaatgctcagaagctatggaagttgaaaccagtgtgattagtattgattcccctcaaaagttggcaatacttgaccaagaattggaacataaggaacaggaagcttgggaagaagctacttcagaggactccagtgttgtcattgtagatgtgaaagagccatctcccagagttgatgtttcttgtgaacctttggagggagtggagaagtgctcagattcccagtcatgggaggatattgctccagaaatagaaccatgtgctgagaatagattagacaccaaggaagaaaagagtgtagaatatgaaggagatctgaaatcagggactgcagaaacagaacctgtagagcaagattcttcacagccttccttacctttagtgagagcagatgatcctttaagacttgaccaggagttgcagcagccccaaactcaggagaaaacaagtaattcattaacagaagactcaaaaatggctaatgcaaagcagctaagctcagatgcagaggcccagaagctggggaagccctctgcccatgcctcacaaagcttctgtgaaagttctagtgaaaccccatttcatttcactttgcctaaagaaggtgatatcatcccaccattgactggtgcaaccccacctcttattgggcacctaaaattggagcccaagagacacagtactcctattggtattagcaactatccagaaagcaccatagcaaccagtgatgtcatgtctgaaagcatggtggagacccatgatcccatacttgggagtggaaaaggggattctggggctgccccagacgtggatgataaattatgtctaagaatgaaactggttagtcctgagactgaggcgagtgaagagtctttgcagttcaacctggaaaagcctgcaactggtgaaagaaaaaatggatctactgctgttgctgagtctgttgccagtccccagaagaccatgtctgtgttgagctgtatctgtgaagccaggcaagagaatgaggctcgaagtgaggatccccccaccacacccatcagggggaacttgctccactttccaagttctcaaggagaagaggagaaagaaaaattggagggtgaccatacaatcaggcagagtcaacagcctatgaagcccattagtcctgtcaaggaccctgtttctcctgcttcccagaagatggtcatacaagggccatccagtcctcaaggagaggcaatggtgacagatgtgctagaagaccagaaagaaggacggagtactaataaggaaaatcctagtaaggccttgattgaaaggcccagccaaaataacataggaatccaaaccatggagtgttccttgagggtcccagaaactgtttcagcagcaacccagactataaagaatgtgtgtgagcaggggaccagtacagtggaccagaactttggaaagcaagatgccacagttcagactgagagggggagtggtgagaaaccagtcagtgctcctggggatgatacagagtcgctccatagccagggagaagaagagtttgatatgcctcagcctccacatggccatgtcttacatcgtcacatgagaacaatccgggaagtacgcacacttgtcactcgtgtcattacagatgtgtattatgtggatggaacagaagtagaaagaaaagtaactgaggagactgaagagccaattgtagagtgtcaggagtgtgaaactgaagtttccccttcacagactgggggctcctcaggtgacctgggggatatcagctccttctcctccaaggcatccagcttacaccgcacatcaagtgggacaagtctctcagctatgcacagcagtggaagctcagggaaaggagccggaccactcagagggaaaaccagcgggacagaacccgcagattttgccttacccagctcccgaggaggcccaggaaaactgagtcctagaaaaggggtcagtcagacagggacgccagtgtgtgaggaggatggtgatgcaggccttggcatcagacagggagggaaggctccagtcacgcctcgtgggcgtgggcgaaggggccgcccaccttctcggaccactggaaccagagaaacagctgtgcctggccccttgggcatagaggacatttcacctaacttgtcaccagatgataaatccttcagccgtgtcgtgccccgagtgccagactccaccagacgaacagatgtgggtgctggtgctttgcgtcgtagtgactctccagaaattcctttccaggctgctgctggcccttctgatggcttagatgcctcctctccaggaaatagctttgtagggctccgtgttgtagccaagtggtcatccaatggctacttttactctgggaaaatcacacgagatgtcggagctgggaagtataaattgctctttgatgatgggtacgaatgtgatgtgttgggcaaagacattctgttatgtgaccccatcccgctggacactgaagtgacggccctctcggaggatgagtatttcagtgcaggagtggtgaaaggacataggaaggagtctggggaactgtactacagcattgaaaaagaaggccaaagaaagtggtataagcgaatggctgtcatcctgtccttggagcaaggaaacagactgagagagcagtatgggcttggcccctatgaagcagtaacacctcttacaaaggcagcagatatcagcttagacaatttggtggaagggaagcggaaacggcgcagtaacgtcagctccccagccacccctactgcctccagtagcagcagcacaacccctacccgaaagatcacagaaagtcctcgtgcctccatgggagttctctcaggcaaaagaaaacttatcacttctgaagaggaacggtcccctgccaagcgaggtcgcaagtctgccacagtaaaacctggtgcagtaggggcaggagagtttgtgagcccctgtgagagtggagacaacaccggtgaaccctctgccctggaagagcagagagggcctttgcctctcaacaagaccttgtttctgggctacgcatttctccttaccatggccacaaccagtgacaagttggccagccgctccaaactgccagatggtcctacaggaagcagtgaagaagaggaggaatttttggaaattcctcctttcaacaagcagtatacagaatcccagcttcgagcaggagctggctatatccttgaagatttcaatgaagcccagtgtaacacagcttaccagtgtcttctaattgcggatcagcattgtcgaacccggaagtacttcctgtgccttgccagtgggattccttgtgtgtctcatgtctgggtccatgatagttgccatgccaaccagctccagaactaccgtaattatctgttgccagctgggtacagccttgaggagcaaagaattctggactggcaaccccgtgaaaatcctttccagaatctgaaggtactcttggtatcagaccaacagcagaacttcctggagctctggtctgagatcctcatgactggtggtgcagcctctgtgaagcagcaccattcaagtgcccataacaaagatattgctttaggggtatttgatgtggtggtgacggacccctcatgcccagcctcggtgctgaagtgtgctgaagcattgcagctgcctgtggtgtcacaagagtgggtgatccagtgcctcattgttggggagagaattggattcaagcagcatccaaaatataaacacgattatgtttctcactaaagatacttggtcttactggttttattccctgctatcgtggagattgtgttttaaccaggttttaaatgtgtcttgtgtgtaactggattccttgcatggatcttgtatatagttttatttgctgaacttttatgataaaataaatgttgaatctctttggttgtagtaactggg

SEQ ID NO: 196455 - DNA, 6015 bp, Homo sapiens
  Payload ID: 18757
  Gene Name: tumor protein p53 binding protein 1
  ENST ID: ENST00000382039
  CDS Start-End: 63-5846
ctggagggacttggggagcgtgcagagacctctagctcgagcgcgagggacctcccgccgggatgcctggggagcagatggaccctactggaagtcagttggattcagatttctctcagcaagatactccttgcctgataattgaagattctcagcctgaaagccaggttctagaggatgattctggttctcacttcagtatgctatctcgacaccttcctaatctccagacgcacaaagaaaatcctgtgttggatgttgtgtccaatcctgaacaaacagctggagaagaacgaggagacggtaatagtgggttcaatgaacatttgaaagaaaacaaggttgcagaccctgtggattcttctaacttggacacatgtggttccatcagtcaggtcattgagcagttacctcagccaaacaggacaagcagtgttctgggaatgtcagtggaatctgctcctgctgtggaggaagagaagggagaagagttggaacagaaggagaaagagaaggaagaagatacttcaggcaatactacacattcccttggtgctgaagatactgcctcatcacagttgggttttggggttctggaactctcccagagccaggatgttgaggaaaatactgtgccatatgaagtggacaaagagcagctacaatcagtaaccaccaactctggttataccaggctgtctgatgtggatgctaatactgcaattaagcatgaagaacagtccaacgaagatatccccatagcagaacagtccagcaaggacatccctgtgacagcacagcccagtaaggatgtacatgttgtaaaagagcaaaatccaccacctgcaaggtcagaggacatgccttttagccccaaagcatctgttgctgctatggaagcaaaagaacagttgtctgcacaagaacttatggaaagtggactgcagattcagaagtcaccagagcctgaggttttgtcaactcaggaagacttgtttgaccagagcaataaaacagtatcttctgatggttgctctactccttcaagggaggaaggtgggtgttctttggcttccactcctgccaccactctgcatctcctgcagctctctggtcagaggtcccttgttcaggacagtctttccacgaattcttcagatcttgttgctccttctcctgatgctttccgatctactccttttatcgttcctagcagtcccacagagcaagaagggagacaagataagccaatggacacgtcagtgttatctgaagaaggaggagagccttttcagaagaaacttcaaagtggtgaaccagtggagttagaaaacccccctctcctgcctgagtccactgtatcaccacaagcctcaacaccaatatctcagagcacaccagtcttccctcctgggtcacttcctatcccatcccagcctcagttttctcatgacatttttattccttccccaagtctggaagaacaatcaaatgatgggaagaaagatggagatatgcatagttcatctttgacagttgagtgttctaaaacttcagagattgaaccaaagaattcccctgaggatcttgggctatctttgacaggggattcttgcaagttgatgctttctacaagtgaatatagtcagtccccaaagatggagagcttgagttctcacagaattgatgaagatggagaaaacacacagattgaggatacggaacccatgtctccagttctcaattctaaatttgttcctgctgaaaatgatagtatcctgatgaatccagcacaggatggtgaagtacaactgagtcagaatgatgacaaaacaaagggagatgatacagacaccagggatgacattagtattttagccactggttgcaagggcagagaagaaacggtagcagaagatgtttgtattgatctcacttgtgattcggggagtcaggcagttccgtcaccagctactcgatctgaggcactttctagtgtgttagatcaggaggaagctatggaaattaaagaacaccatccagaggaggggtcttcagggtctgaggtggaagaaatccctgagacaccttgtgaaagtcaaggagaggaactcaaagaagaaaatatggagagtgttccgttgcacctttctctgactgaaactcagtcccaagggttgtgtcttcaaaaggaaatgccaaaaaaagaatgctcagaagctatggaagttgaaaccagtgtgattagtattgattcccctcaaaagttggcaatacttgaccaagaattggaacataaggaacaggaagcttgggaagaagctacttcagaggactccagtgttgtcattgtagatgtgaaagagccatctcccagagttgatgtttcttgtgaacctttggagggagtggagaagtgctcagattcccagtcatgggaggatattgctccagaaatagaaccatgtgctgagaatagattagacaccaaggaagaaaagagtgtagaatatgaaggagatctgaaatcagggactgcagaaacagaacctgtagagcaagattcttcacagccttccttacctttagtgagagcagatgatcctttaagacttgaccaggagttgcagcagccccaaactcaggagaaaacaagtaattcattaacagaagactcaaaaatggctaatgcaaagcagctaagctcagatgcagaggcccagaagctggggaagccctctgcccatgcctcacaaagcttctgtgaaagttctagtgaaaccccatttcatttcactttgcctaaagaaggtgatatcatcccaccattgactggtgcaaccccacctcttattgggcacctaaaattggagcccaagagacacagtactcctattggtattagcaactatccagaaagcaccatagcaaccagtgatgtcatgtctgaaagcatggtggagacccatgatcccatacttgggagtggaaaaggggattctggggctgccccagacgtggatgataaattatgtctaagaatgaaactggttagtcctgagactgaggcgagtgaagagtctttgcagttcaacctggaaaagcctgcaactggtgaaagaaaaaatggatctactgctgttgctgagtctgttgccagtccccagaagaccatgtctgtgttgagctgtatctgtgaagccaggcaagagaatgaggctcgaagtgaggatccccccaccacacccatcagggggaacttgctccactttccaagttctcaaggagaagaggagaaagaaaaattggagggtgaccatacaatcaggcagagtcaacagcctatgaagcccattagtcctgtcaaggaccctgtttctcctgcttcccagaagatggtcatacaagggccatccagtcctcaaggagaggcaatggtgacagatgtgctagaagaccagaaagaaggacggagtactaataaggaaaatcctagtaaggccttgattgaaaggcccagccaaaataacataggaatccaaaccatggagtgttccttgagggtcccagaaactgtttcagcagcaacccagactataaagaatgtgtgtgagcaggggaccagtacagtggaccagaactttggaaagcaagatgccacagttcagactgagagggggagtggtgagaaaccagtcagtgctcctggggatgatacagagtcgctccatagccagggagaagaagagtttgatatgcctcagcctccacatggccatgtcttacatcgtcacatgagaacaatccgggaagtacgcacacttgtcactcgtgtcattacagatgtgtattatgtggatggaacagaagtagaaagaaaagtaactgaggagactgaagagccaattgtagagtgtcaggagtgtgaaactgaagtttccccttcacagactgggggctcctcaggtgacctgggggatatcagctccttctcctccaaggcatccagcttacaccgcacatcaagtgggacaagtctctcagctatgcacagcagtggaagctcagggaaaggagccggaccactcagagggaaaaccagcgggacagaacccgcagattttgccttacccagctcccgaggaggcccaggaaaactgagagaaacagctgtgcctggccccttgggcatagaggacatttcacctaacttgtcaccagatgataaatccttcagccgtgtcgtgccccgagtgccagactccaccagacgaacagatgtgggtgctggtgctttgcgtcgtagtgactctccagaaattcctttccaggctgctgctggcccttctgatggcttagatgcctcctctccaggaaatagctttgtagggctccgtgttgtagccaagtggtcatccaatggctacttttactctgggaaaatcacacgagatgtcggagctgggaagtataaattgctctttgatgatgggtacgaatgtgatgtgttgggcaaagacattctgttatgtgaccccatcccgctggacactgaagtgacggccctctcggaggatgagtatttcagtgcaggagtggtgaaaggacataggaaggagtctggggaactgtactacagcattgaaaaagaaggccaaagaaagtggtataagcgaatggctgtcatcctgtccttggagcaaggaaacagactgagagagcagtatgggcttggcccctatgaagcagtaacacctcttacaaaggcagcagatatcagcttagacaatttggtggaagggaagcggaaacggcgcagtaacgtcagctccccagccacccctactgcctccagtagcagcagcacaacccctacccgaaagatcacagaaagtcctcgtgcctccatgggagttctctcaggcaaaagaaaacttatcacttctgaagaggaacggtcccctgccaagcgaggtcgcaagtctgccacagtaaaacctggtgcagtaggggcaggagagtttgtgagcccctgtgagagtggagacaacaccggtgaaccctctgccctggaagagcagagagggcctttgcctctcaacaagaccttgtttctgggctacgcatttctccttaccatggccacaaccagtgacaagttggccagccgctccaaactgccagatggtcctacaggaagcagtgaagaagaggaggaatttttggaaattcctcctttcaacaagcagtatacagaatcccagcttcgagcaggagctggctatatccttgaagatttcaatgaagcccagtgtaacacagcttaccagtgtcttctaattgcggatcagcattgtcgaacccggaagtacttcctgtgccttgccagtgggattccttgtgtgtctcatgtctgggtccatgatagttgccatgccaaccagctccagaactaccgtaattatctgttgccagctgggtacagccttgaggagcaaagaattctggactggcaaccccgtgaaaatcctttccagaatctgaaggtactcttggtatcagaccaacagcagaacttcctggagctctggtctgagatcctcatgactggtggtgcagcctctgtgaagcagcaccattcaagtgcccataacaaagatattgctttaggggtatttgatgtggtggtgacggacccctcatgcccagcctcggtgctgaagtgtgctgaagcattgcagctgcctgtggtgtcacaagagtgggtgatccagtgcctcattgttggggagagaattggattcaagcagcatccaaaatataaacacgattatgtttctcactaaagatacttggtcttactggttttattccctgctatcgtggagattgtgttttaaccaggttttaaatgtgtcttgtgtgtaactggattccttgcatggatcttgtatatagttttatttgctgaacttttatgataaaataaatgttgaatctctttggttgtagtaa

SEQ ID NO: 196456 - DNA, 10384 bp, Homo sapiens
  Payload ID: 18757
  Gene Name: tumor protein p53 binding protein 1
  Uniprot ID: Q12888
  ENST ID: ENST00000382044
  CDS Start-End: 129-6062
gtgacgggaaagggggagttcgcggccggtggcggcggtggcgacagcggcgacctagggatcgatctggagggacttggggagcgtgcagagacctctagctcgagcgcgagggacctcccgccgggatgcctggggagcagatggaccctactggaagtcagttggattcagatttctctcagcaagatactccttgcctgataattgaagattctcagcctgaaagccaggttctagaggatgattctggttctcacttcagtatgctatctcgacaccttcctaatctccagacgcacaaagaaaatcctgtgttggatgttgtgtccaatcctgaacaaacagctggagaagaacgaggagacggtaatagtgggttcaatgaacatttgaaagaaaacaaggttgcagaccctgtggattcttctaacttggacacatgtggttccatcagtcaggtcattgagcagttacctcagccaaacaggacaagcagtgttctgggaatgtcagtggaatctgctcctgctgtggaggaagagaagggagaagagttggaacagaaggagaaagagaaggaagaagatacttcaggcaatactacacattcccttggtgctgaagatactgcctcatcacagttgggttttggggttctggaactctcccagagccaggatgttgaggaaaatactgtgccatatgaagtggacaaagagcagctacaatcagtaaccaccaactctggttataccaggctgtctgatgtggatgctaatactgcaattaagcatgaagaacagtccaacgaagatatccccatagcagaacagtccagcaaggacatccctgtgacagcacagcccagtaaggatgtacatgttgtaaaagagcaaaatccaccacctgcaaggtcagaggacatgccttttagccccaaagcatctgttgctgctatggaagcaaaagaacagttgtctgcacaagaacttatggaaagtggactgcagattcagaagtcaccagagcctgaggttttgtcaactcaggaagacttgtttgaccagagcaataaaacagtatcttctgatggttgctctactccttcaagggaggaaggtgggtgttctttggcttccactcctgccaccactctgcatctcctgcagctctctggtcagaggtcccttgttcaggacagtctttccacgaattcttcagatcttgttgctccttctcctgatgctttccgatctactccttttatcgttcctagcagtcccacagagcaagaagggagacaagataagccaatggacacgtcagtgttatctgaagaaggaggagagccttttcagaagaaacttcaaagtggtgaaccagtggagttagaaaacccccctctcctgcctgagtccactgtatcaccacaagcctcaacaccaatatctcagagcacaccagtcttccctcctgggtcacttcctatcccatcccagcctcagttttctcatgacatttttattccttccccaagtctggaagaacaatcaaatgatgggaagaaagatggagatatgcatagttcatctttgacagttgagtgttctaaaacttcagagattgaaccaaagaattcccctgaggatcttgggctatctttgacaggggattcttgcaagttgatgctttctacaagtgaatatagtcagtccccaaagatggagagcttgagttctcacagaattgatgaagatggagaaaacacacagattgaggatacggaacccatgtctccagttctcaattctaaatttgttcctgctgaaaatgatagtatcctgatgaatccagcacaggatggtgaagtacaactgagtcagaatgatgacaaaacaaagggagatgatacagacaccagggatgacattagtattttagccactggttgcaagggcagagaagaaacggtagcagaagatgtttgtattgatctcacttgtgattcggggagtcaggcagttccgtcaccagctactcgatctgaggcactttctagtgtgttagatcaggaggaagctatggaaattaaagaacaccatccagaggaggggtcttcagggtctgaggtggaagaaatccctgagacaccttgtgaaagtcaaggagaggaactcaaagaagaaaatatggagagtgttccgttgcacctttctctgactgaaactcagtcccaagggttgtgtcttcaaaaggaaatgccaaaaaaagaatgctcagaagctatggaagttgaaaccagtgtgattagtattgattcccctcaaaagttggcaatacttgaccaagaattggaacataaggaacaggaagcttgggaagaagctacttcagaggactccagtgttgtcattgtagatgtgaaagagccatctcccagagttgatgtttcttgtgaacctttggagggagtggagaagtgctcagattcccagtcatgggaggatattgctccagaaatagaaccatgtgctgagaatagattagacaccaaggaagaaaagagtgtagaatatgaaggagatctgaaatcagggactgcagaaacagaacctgtagagcaagattcttcacagccttccttacctttagtgagagcagatgatcctttaagacttgaccaggagttgcagcagccccaaactcaggagaaaacaagtaattcattaacagaagactcaaaaatggctaatgcaaagcagctaagctcagatgcagaggcccagaagctggggaagccctctgcccatgcctcacaaagcttctgtgaaagttctagtgaaaccccatttcatttcactttgcctaaagaaggtgatatcatcccaccattgactggtgcaaccccacctcttattgggcacctaaaattggagcccaagagacacagtactcctattggtattagcaactatccagaaagcaccatagcaaccagtgatgtcatgtctgaaagcatggtggagacccatgatcccatacttgggagtggaaaaggggattctggggctgccccagacgtggatgataaattatgtctaagaatgaaactggttagtcctgagactgaggcgagtgaagagtctttgcagttcaacctggaaaagcctgcaactggtgaaagaaaaaatggatctactgctgttgctgagtctgttgccagtccccagaagaccatgtctgtgttgagctgtatctgtgaagccaggcaagagaatgaggctcgaagtgaggatccccccaccacacccatcagggggaacttgctccactttccaagttctcaaggagaagaggagaaagaaaaattggagggtgaccatacaatcaggcagagtcaacagcctatgaagcccattagtcctgtcaaggaccctgtttctcctgcttcccagaagatggtcatacaagggccatccagtcctcaaggagaggcaatggtgacagatgtgctagaagaccagaaagaaggacggagtactaataaggaaaatcctagtaaggccttgattgaaaggcccagccaaaataacataggaatccaaaccatggagtgttccttgagggtcccagaaactgtttcagcagcaacccagactataaagaatgtgtgtgagcaggggaccagtacagtggaccagaactttggaaagcaagatgccacagttcagactgagagggggagtggtgagaaaccagtcagtgctcctggggatgatacagagtcgctccatagccagggagaagaagagtttgatatgcctcagcctccacatggccatgtcttacatcgtcacatgagaacaatccgggaagtacgcacacttgtcactcgtgtcattacagatgtgtattatgtggatggaacagaagtagaaagaaaagtaactgaggagactgaagagccaattgtagagtgtcaggagtgtgaaactgaagtttccccttcacagactgggggctcctcaggtgacctgggggatatcagctccttctcctccaaggcatccagcttacaccgcacatcaagtgggacaagtctctcagctatgcacagcagtggaagctcagggaaaggagccggaccactcagagggaaaaccagcgggacagaacccgcagattttgccttacccagctcccgaggaggcccaggaaaactgagtcctagaaaaggggtcagtcagacagggacgccagtgtgtgaggaggatggtgatgcaggccttggcatcagacagggagggaaggctccagtcacgcctcgtgggcgtgggcgaaggggccgcccaccttctcggaccactggaaccagagaaacagctgtgcctggccccttgggcatagaggacatttcacctaacttgtcaccagatgataaatccttcagccgtgtcgtgccccgagtgccagactccaccagacgaacagatgtgggtgctggtgctttgcgtcgtagtgactctccagaaattcctttccaggctgctgctggcccttctgatggcttagatgcctcctctccaggaaatagctttgtagggctccgtgttgtagccaagtggtcatccaatggctacttttactctgggaaaatcacacgagatgtcggagctgggaagtataaattgctctttgatgatgggtacgaatgtgatgtgttgggcaaagacattctgttatgtgaccccatcccgctggacactgaagtgacggccctctcggaggatgagtatttcagtgcaggagtggtgaaaggacataggaaggagtctggggaactgtactacagcattgaaaaagaaggccaaagaaagtggtataagcgaatggctgtcatcctgtccttggagcaaggaaacagactgagagagcagtatgggcttggcccctatgaagcagtaacacctcttacaaaggcagcagatatcagcttagacaatttggtggaagggaagcggaaacggcgcagtaacgtcagctccccagccacccctactgcctccagtagcagcagcacaacccctacccgaaagatcacagaaagtcctcgtgcctccatgggagttctctcaggcaaaagaaaacttatcacttctgaagaggaacggtcccctgccaagcgaggtcgcaagtctgccacagtaaaacctggtgcagtaggggcaggagagtttgtgagcccctgtgagagtggagacaacaccggtgaaccctctgccctggaagagcagagagggcctttgcctctcaacaagaccttgtttctgggctacgcatttctccttaccatggccacaaccagtgacaagttggccagccgctccaaactgccagatggtcctacaggaagcagtgaagaagaggaggaatttttggaaattcctcctttcaacaagcagtatacagaatcccagcttcgagcaggagctggctatatccttgaagatttcaatgaagcccagtgtaacacagcttaccagtgtcttctaattgcggatcagcattgtcgaacccggaagtacttcctgtgccttgccagtgggattccttgtgtgtctcatgtctgggtccatgatagttgccatgccaaccagctccagaactaccgtaattatctgttgccagctgggtacagccttgaggagcaaagaattctggactggcaaccccgtgaaaatcctttccagaatctgaaggtactcttggtatcagaccaacagcagaacttcctggagctctggtctgagatcctcatgactggtggtgcagcctctgtgaagcagcaccattcaagtgcccataacaaagatattgctttaggggtatttgatgtggtggtgacggacccctcatgcccagcctcggtgctgaagtgtgctgaagcattgcagctgcctgtggtgtcacaagagtgggtgatccagtgcctcattgttggggagagaattggattcaagcagcatccaaaatataaacacgattatgtttctcactaaagatacttggtcttactggttttattccctgctatcgtggagattgtgttttaaccaggttttaaatgtgtcttgtgtgtaactggattccttgcatggatcttgtatatagttttatttgctgaacttttatgataaaataaatgttgaatctctttggttgtagtaactgggatttcttcatctgtttttttgagcttaatctcagaacaaatgacaagacatagtactttctctgagtctttcaacaggcttattcacttacggaggacagctggccaaggaaattgaaaagttaagagtgaactttattctgtggcatcattcccaaaaggttattccagggtgtctaaaatgctatgcttgcagaaactcagtttaaggtaggtgaaggcccagattaacagttgtgccaaaagttgagtggaattgggcacagctctgtttcctgacagttaaaaaagacctcatgctctctctctgagctgagatcacagctcacctgtgggtactccccaactcttagagctaaagggagaacgaaaggaccaactgccatgaagggacagtgaccataagcttgatggaatgaccttccgtaagataaacatgggaagcacaagtgagaacacctggaaatgttacacgttctagtcaaagacccaatattattattattattattgtcacaatagctggaagcagttccttcccttcctctggcatcactgatccctgcatggcttctcattctctaaagcaggggtcaacaaggtttttttctgtaaagggtcaaagagtaaatatttcaggctttgtgggccatttgatccatcacaactactcgcctttgctgtgagggcatgaaagcaaccatagacaatgagtaaacaaatgggcatggctgtgtttcagtaaaactgtacaaaaacagacagcaggccatagtttgccagctcctgctccagagacagcagtagaaagggtgatctttagttgataatagcagggaataagttgtcagagcttcccagtgtgtgtagaatatgtagtgatgaaaaccagatgcagtgactataacctgatgccagaacactgcattctttttcagtttggagggcgttgttcagtgaatatttctttttacttacactgatatgaatattgattaccagtgatggctgggccatattaagataacttcaacccctatggtttgtgtaagatgggtaattgggcctgcaatcttcagtatttaaaaatctaacaacttgatctcaattttttcttaaggacctttttcttggagaataatactttttttttttttttttttttttttgagacggaatttcgctcttgttgcccgggctggaatgcaatggcacaatctcagctcactgcagcgtctgcttcccaggttcaagcaattctcctgtctcagcctcctgagtagctgggattacaggcacatgccaccacacctggctaatttttgtatttttagtagaatcgaggtttcatcatgttggtcaggctggtctcaaactcctgacttcaggtgatccgcccgcctcggcctcccaaagtgctgggattacaggtgtgagccaccatgcccggcctaagaaatacttttaagtatattttcattagctagaattgcccaatctgtgtaggtataaattacttggtatagggagagagaaagcctatcttacctgttgctttcttacttggtggtaacatccagcagttagtctatttataaacataattactttttcacatatgaaccataaaatatttaactttctgctctatattgtttgtttaccgctgtatctcccacagcttgaacagtaccaaggtacgtagtaggtgctcaataaatgactattgaataaatgaacatatccaacaaatgttctcaatgtaaaggatcagagatgccacatgttctccttgatgggagagacccttccacatgggaatgatgggaaggagttgtactcctggatgttcagtaactgcttctaggagaaaaggtagagtcctatcactaagccgcagatatttatttgtgtgtggctagaatgggatgttttgaatcttctgttacaaccttgggaacgtggctgttatttcaatttatgagccagaaattttcacatcccgaaactacaaaagagaaaaagagccttattaagtgtcatgctttcccaagactaccttcaaagaaatatgaatcaggataacctgtgatctaaataatgtcatcttaaaactgaagagtttcttttgactcttctgctacaatagcttagaaaaaaatctgcttgcagacattttagagagaaaggacaatgaagtgattttctgaatgggaatgacagacctctgggaagccagctaccactgaatctcggtatcagttttttttaaagtttagagttagaaggggtggtcgcctcctttcacagatgcggaagctagggaccagcaaggcggggtgcccacggctgcacagctagttcatatcagaattgggagtggaaggcccactgcctcccagcatagcaatacataacctagcaaaggacttaacacctatctcactgtcaggttttttagtattttatgatgatgatgacttctactagaaaataacctccattaaaattattaaagatggtcacacctctatctctaagccttacttataaaatgagggtatttggactaaagtcttcttccagttctagaattctacaactcattaaaaagccaccttaaaaagtctactgagttacccaagggttgctcctacctgcccagagttccaccagcctgggtatagtatttgttataatctagtcgtaacagtagttgagccaaatctgagttgatctgatgattccgaacactggagagaatcttgaacaggagtgaagactggcggctaaagccctgcagagagaaggactcagctgtcattccacttcagctcaccaactctccatatggaggatgggggcggagggaggagtttcttggaaaagccttgttcaaaattctacagaaccacctggccttcccacattcctatttctattagttcctaaaatgacttgtaccaaatccatacatgcatgacttcctatgaaagtactctttcatcagtaggaatttagtagctggtttccagttaatgtattttgtcaagtactggggttggggagaacccgttttgattacaagcagataattatctcagtgagatgggggttagttcaaggaagtaaggaggggggaggatgtgaggaagttagaacaacccaatgcttatttgatgggctgaataaactattcaggactgaactatttttgagcactgtgaggtggcacagtattacctgcttcaaaatcaactgataccaacatttttatctttgtatcttatctctgtacgtgtgtgtattgaggaaatgctttactgactcagaggaaagatcatgaattctccattggcaaaaccacctctgtcctttcggcaaggctgcatacttccaggcagacgcaccttcacgagaatgctcagctgggcggctccacgctcatccagtgggcctaggttctgactgaccagcgaacaaaaactgtgacagagatctaggatttcattcaggcagtgaaacacctacccgggaaacagagttggcattaggaaaggaaggaaggtacatccatgaagttaaagtgttaggagaacagtctgattaatagctgatctaattaatagctgacctcccaaatctgacaggatagacactgccacgtgcaaggcctgccagcccctcagacgcacaaaatgcgtaaaacaaatgcatcctttcctggctaagcgagtattactctcttagccctgcaccaaacctccaatctagccacatttaactcttcatttcttagacccgcagagtgtcttcctgcctctgagctgtgagtgttgttccctttgcccgggatgctcttgtttttaataccagttcaagtcccactctctcagtgaagcactcccttccccactatagcctttagtgaaccctcgtttcttgcttctttattatctgtactgttgtccacttggcaattgttcaggcctctgtgttgttactgatttttgtatgtatatatatatatatgtcttgtttttccaactagattgtgagctccttaagggcagagccatgaattatacctctttgtatccccagtgccttgcatacagtaagcactcaataaatatttaatgatgatga

SEQ ID NO: 196457 - DNA, 3143 bp, Homo sapiens
  Payload ID: 18757
  Gene Name: tumor protein p53 binding protein 1
  ENST ID: ENST00000413546
  CDS Start-End: 44-3143
gtgcagagacctctagctcgagcgcgagggacctcccgccgggatgcctggggagcagatggaccctactggaagtcagttggattcagatttctctcagcaagatactccttgcctgataattgaagattctcagcctgaaagccaggttctagaggatgattctggttctcacttcagtatgctatctcgacaccttcctaatctccagacgcacaaagaaaatcctgtgttggatgttgtgtccaatcctgaacaaacagctggagaagaacgaggagacggtaatagtgggttcaatgaacatttgaaagaaaacaaggttgcagaccctgtggattcttctaacttggacacatgtggttccatcagtcaggtcattgagcagttacctcagccaaacaggacaagcagtgttctgggaatgtcagtggaatctgctcctgctgtggaggaagagaagggagaagagttggaacagaaggagaaagagaaggaagaagatacttcaggcaatactacacattcccttggtgctgaagatactgcctcatcacagttgggttttggggttctggaactctcccagagccaggatgttgaggaaaatactgtgccatatgaagtggacaaagagcagctacaatcagtaaccaccaactctggttataccaggctgtctgatgtggatgctaatactgcaattaagcatgaagaacagtccaacgaagatatccccatagcagaacagtccagcaaggacatccctgtgacagcacagcccagtaaggatgtacatgttgtaaaagagcaaaatccaccacctgcaaggtcagaggacatgccttttagccccaaagcatctgttgctgctatggaagcaaaagaacagttgtctgcacaagaacttatggaaagtggactgcagattcagaagtcaccagagcctgaggttttgtcaactcaggaagacttgtttgaccagagcaataaaacagtatcttctgatggttgctctactccttcaagggaggaaggtgggtgttctttggcttccactcctgccaccactctgcatctcctgcagctctctggtcagaggtcccttgttcaggacagtctttccacgaattcttcagatcttgttgctccttctcctgatgctttccgatctactccttttatcgttcctagcagtcccacagagcaagaagggagacaagataagccaatggacacgtcagtgttatctgaagaaggaggagagccttttcagaagaaacttcaaagtggtgaaccagtggagttagaaaacccccctctcctgcctgagtccactgtatcaccacaagcctcaacaccaatatctcagagcacaccagtcttccctcctgggtcacttcctatcccatcccagcctcagttttctcatgacatttttattccttccccaagtctggaagaacaatcaaatgatgggaagaaagatggagatatgcatagttcatctttgacagttgagtgttctaaaacttcagagattgaaccaaagaattcccctgaggatcttgggctatctttgacaggggattcttgcaagttgatgctttctacaagtgaatatagtcagtccccaaagatggagagcttgagttctcacagaattgatgaagatggagaaaacacacagattgaggatacggaacccatgtctccagttctcaattctaaatttgttcctgctgaaaatgatagtatcctgatgaatccagcacaggatggtgaagtacaactgagtcagaatgatgacaaaacaaagggagatgatacagacaccagggatgacattagtattttagccactggttgcaagggcagagaagaaacggtagcagaagatgtttgtattgatctcacttgtgattcggggagtcaggcagttccgtcaccagctactcgatctgaggcactttctagtgtgttagatcaggaggaagctatggaaattaaagaacaccatccagaggaggggtcttcagggtctgaggtggaagaaatccctgagacaccttgtgaaagtcaaggagaggaactcaaagaagaaaatatggagagtgttccgttgcacctttctctgactgaaactcagtcccaagggttgtgtcttcaaaaggaaatgccaaaaaaagaatgctcagaagctatggaagttgaaaccagtgtgattagtattgattcccctcaaaagttggcaatacttgaccaagaattggaacataaggaacaggaagcttgggaagaagctacttcagaggactccagtgttgtcattgtagatgtgaaagagccatctcccagagttgatgtttcttgtgaacctttggagggagtggagaagtgctcagattcccagtcatgggaggatattgctccagaaatagaaccatgtgctgagaatagattagacaccaaggaagaaaagagtgtagaatatgaaggagatctgaaatcagggactgcagaaacagaacctgtagagcaagattcttcacagccttccttacctttagtgagagcagatgatcctttaagacttgaccaggagttgcagcagccccaaactcaggagaaaacaagtaattcattaacagaagactcaaaaatggctaatgcaaagcagctaagctcagatgcagaggcccagaagctggggaagccctctgcccatgcctcacaaagcttctgtgaaagttctagtggtattagcaactatccagaaagcaccatagcaaccagtgatgtcatgtctgaaagcatggtggagacccatgatcccatacttgggagtggaaaaggggattctggggctgccccagacgtggatgataaattatgtctaagaatgaaactggttagtcctgagactgaggcgagtgaagagtctttgcagttcaacctggaaaagcctgcaactggtgaaagaaaaaatggatctactgctgttgctgagtctgttgccagtccccagaagaccatgtctgtgttgagctgtatctgtgaagccaggcaagagaatgaggctcgaagtgaggatccccccaccacacccatcagggggaacttgctccactttccaagttctc

SEQ ID NO: 196458 - DNA, 613 bp, Homo sapiens
  Payload ID: 18757
  Gene Name: tumor protein p53 binding protein 1
  ENST ID: ENST00000434561
  CDS Start-End: 1-492
ctgttatgtgaccccatcccgctggacactgaagtgacggccctctcggaggatgagtatttcagtgcaggagtggtgaaaggacataggaaggagtctggggaactgtactacagcattgaaaaagaaggccaaagaaagtggtataagcgaatggctgtcatcctgtccttggagcaaggaaacagactgagagagcagtatgggcttggcccctatgaagcagtaacacctcttacaaaggcagcagatatcagcttagacaatttggtggaagggaagcggaaacggcgcagtaacgtcagctccccagccacccctactgcctccagtagcagcagcacaacccctacccgaaagatcacagaaagtcctcgtgcctccatgggagttctctcaggcaaaagaaaacttatcacttctgaagaggaacggtcccctgccaagcgaggtcgcaagtctgccacagtaaaacctgggaggcatgcatgacctgtctgtcatcttagcctcctaatgaacctacgattcagcttctccaggtcaggtgcagtaggggcaggagagtttgtgagcccctgtgagagtggagacaacaccggtgaaccctctg

SEQ ID NO: 196459 - DNA, 6179 bp, Homo sapiens
  Payload ID: 18757
  Gene Name: tumor protein p53 binding protein 1
  Uniprot ID: Q12888
  ENST ID: ENST00000450115
  CDS Start-End: 85-6012
cagcggcgacctagggatcgatctggagggacttggggagcgtgcagagacctctagctcgagcgcgagggacctcccgccgggatgcctggggagcagatggaccctactggaagtcagttggattcagatttctctcagcaagatactccttgcctgataattgaagattctcagcctgaaagccaggttctagaggatgattctggttctcacttcagtatgctatctcgacaccttcctaatctccagacgcacaaagaaaatcctgtgttggatgttgtgtccaatcctgaacaaacagctggagaagaacgaggagacggtaatagtgggttcaatgaacatttgaaagaaaacaaggttgcagaccctgtggattcttctaacttggacacatgtggttccatcagtcaggtcattgagcagttacctcagccaaacaggacaagcagtgttctgggaatgtcagtggaatctgctcctgctgtggaggaagagaagggagaagagttggaacagaaggagaaagagaaggaagaagatacttcaggcaatactacacattcccttggtgctgaagatactgcctcatcacagttgggttttggggttctggaactctcccagagccaggatgttgaggaaaatactgtgccatatgaagtggacaaagagcagctacaatcagtaaccaccaactctggttataccaggctgtctgatgtggatgctaatactgcaattaagcatgaagaacagtccaacgaagatatccccatagcagaacagtccagcaaggacatccctgtgacagcacagcccagtaaggatgtacatgttgtaaaagagcaaaatccaccacctgcaaggtcagaggacatgccttttagccccaaagcatctgttgctgctatggaagcaaaagaacagttgtctgcacaagaacttatggaaagtggactgcagattcagaagtcaccagagcctgaggttttgtcaactcaggaagacttgtttgaccagagcaataaaacagtatcttctgatggttgctctactccttcaagggaggaaggtgggtgttctttggcttccactcctgccaccactctgcatctcctgcagctctctggtcagaggtcccttgttcaggacagtctttccacgaattcttcagatcttgttgctccttctcctgatgctttccgatctactccttttatcgttcctagcagtcccacagagcaagaagggagacaagataagccaatggacacgtcagtgttatctgaagaaggaggagagccttttcagaagaaacttcaaagtggtgaaccagtggagttagaaaacccccctctcctgcctgagtccactgtatcaccacaagcctcaacaccaatatctcagagcacaccagtcttccctcctgggtcacttcctatcccatcccagcctcagttttctcatgacatttttattccttccccaagtctggaagaacaatcaaatgatgggaagaaagatggagatatgcatagttcatctttgacagttgagtgttctaaaacttcagagattgaaccaaagaattcccctgaggatcttgggctatctttgacaggggattcttgcaagttgatgctttctacaagtgaatatagtcagtccccaaagatggagagcttgagttctcacagaattgatgaagatggagaaaacacacagattgaggatacggaacccatgtctccagttctcaattctaaatttgttcctgctgaaaatgatagtatcctgatgaatccagcacaggatggtgaagtacaactgagtcagaatgatgacaaaacaaagggagatgatacagacaccagggatgacattagtattttagccactggttgcaagggcagagaagaaacggtagcagaagatgtttgtattgatctcacttgtgattcggggagtcaggcagttccgtcaccagctactcgatctgaggcactttctagtgtgttagatcaggaggaagctatggaaattaaagaacaccatccagaggaggggtcttcagggtctgaggtggaagaaatccctgagacaccttgtgaaagtcaaggagaggaactcaaagaagaaaatatggagagtgttccgttgcacctttctctgactgaaactcagtcccaagggttgtgtcttcaaaaggaaatgccaaaaaaagaatgctcagaagctatggaagttgaaaccagtgtgattagtattgattcccctcaaaagttggcaatacttgaccaagaattggaacataaggaacaggaagcttgggaagaagctacttcagaggactccagtgttgtcattgtagatgtgaaagagccatctcccagagttgatgtttcttgtgaacctttggagggagtggagaagtgctcagattcccagtcatgggaggatattgctccagaaatagaaccatgtgctgagaatagattagacaccaaggaagaaaagagtgtagaatatgaaggagatctgaaatcagggactgcagaaacagaacctgtagagcaagattcttcacagccttccttacctttagtgagagcagatgatcctttaagacttgaccaggagttgcagcagccccaaactcaggagaaaacaagtaattcattaacagaagactcaaaaatggctaatgcaaagcagctaagctcagatgcagaggcccagaagctggggaagccctctgcccatgcctcacaaagcttctgtgaaagttctagtgaaaccccatttcatttcactttgcctaaagaaggtgatatcatcccaccattgactggtgcaaccccacctcttattgggcacctaaaattggagcccaagagacacagtactcctattggtattagcaactatccagaaagcaccatagcaaccagtgatgtcatgtctgaaagcatggtggagacccatgatcccatacttgggagtggaaaaggggattctggggctgccccagacgtggatgataaattatgtctaagaatgaaactggttagtcctgagactgaggcgagtgaagagtctttgcagttcaacctggaaaagcctgcaactggtgaaagaaaaaatggatctactgctgttgctgagtctgttgccagtccccagaagaccatgtctgtgttgagctgtatctgtgaagccaggcaagagaatgaggctcgaagtgaggatccccccaccacacccatcagggggaacttgctccactttccaagttctcaaggagaagaggagaaagaaaaattggagggtgaccatacaatcaggcagagtcaacagcctatgaagcccattagtcctgtcaaggaccctgtttctcctgcttcccagaagatggtcatacaagggccatccagtcctcaaggagaggcaatggtgacagatgtgctagaagaccagaaagaaggacggagtactaataaggaaaatcctagtaaggccttgattgaaaggcccagccaaaataacataggaatccaaaccatggagtgttccttgagggtcccagaaactgtttcagcagcaacccagactataaagaatgtgtgtgagcaggggaccagtacagtggaccagaactttggaaagcaagatgccacagttcagactgagagggggagtggtgagaaaccagtcagtgctcctggggatgatacagagtcgctccatagccagggagaagaagagtttgatatgcctcagcctccacatggccatgtcttacatcgtcacatgagaacaatccgggaagtacgcacacttgtcactcgtgtcattacagatgtgtattatgtggatggaacagaagtagaaagaaaagtaactgaggagactgaagagccaattgtagagtgtcaggagtgtgaaactgaagtttccccttcacagactgggggctcctcaggtgacctgggggatatcagctccttctcctccaaggcatccagcttacaccgcacatcaagtgggacaagtctctcagctatgcacagcagtggaagctcagggaaaggagccggaccactcagagggaaaaccagcgggacagaacccgcagattttgccttacccagctcccgaggaggcccaggaaaactgagtcctagaaaaggggtcagtcagacagggacgccagtgtgtgaggaggatggtgatgcaggccttggcatcagacagggagggaaggctccagtcacgcctcgtgggcgtgggcgaaggggccgcccaccttctcggaccactggaaccagagaaacagctgtgcctggccccttgggcatagaggacatttcacctaacttgtcaccagatgataaatccttcagccgtgtcgtgccccgagtgccagactccaccagacgaacagatgtgggtgctggtgctttgcgtcgtagtgactctccagaaattcctttccaggctgctgctggcccttctgatggcttagatgcctcctctccaggaaatagctttgtagggctccgtgttgtagccaagtggtcatccaatggctacttttactctgggaaaatcacacgagatgtcggagctgggaagtataaattgctctttgatgatgggtacgaatgtgatgtgttgggcaaagacattctgttatgtgaccccatcccgctggacactgaagtgacggccctctcggaggatgagtatttcagtgcaggagtggtgaaaggacataggaaggagtctggggaactgtactacagcattgaaaaagaaggccaaagaaagtggtataagcgaatggctgtcatcctgtccttggagcaaggaaacagactgagagagcagtatgggcttggcccctatgaagcagtaacacctcttacaaaggcagcagatatcagcttagacaatttggtggaagggaagcggaaacggcgcagtaacgtcagctccccagccacccctactgcctccagtagcagcagcacaacccctacccgaaagatcacagaaagtcctcgtgcctccatgggagttctctcaggcaaaagaaaacttatcacttctgaagaggaacggtcccctgccaagcgaggtcgcaagtctgccacagtaaaacctgtaggggcaggagagtttgtgagcccctgtgagagtggagacaacaccggtgaaccctctgccctggaagagcagagagggcctttgcctctcaacaagaccttgtttctgggctacgcatttctccttaccatggccacaaccagtgacaagttggccagccgctccaaactgccagatggtcctacaggaagcagtgaagaagaggaggaatttttggaaattcctcctttcaacaagcagtatacagaatcccagcttcgagcaggagctggctatatccttgaagatttcaatgaagcccagtgtaacacagcttaccagtgtcttctaattgcggatcagcattgtcgaacccggaagtacttcctgtgccttgccagtgggattccttgtgtgtctcatgtctgggtccatgatagttgccatgccaaccagctccagaactaccgtaattatctgttgccagctgggtacagccttgaggagcaaagaattctggactggcaaccccgtgaaaatcctttccagaatctgaaggtactcttggtatcagaccaacagcagaacttcctggagctctggtctgagatcctcatgactggtggtgcagcctctgtgaagcagcaccattcaagtgcccataacaaagatattgctttaggggtatttgatgtggtggtgacggacccctcatgcccagcctcggtgctgaagtgtgctgaagcattgcagctgcctgtggtgtcacaagagtgggtgatccagtgcctcattgttggggagagaattggattcaagcagcatccaaaatataaacacgattatgtttctcactaaagatacttggtcttactggttttattccctgctatcgtggagattgtgttttaaccaggttttaaatgtgtcttgtgtgtaactggattccttgcatggatcttgtatatagttttatttgctgaacttttatgataaaataaatgttgaatctctttggttgtagt

SEQ ID NO: 196460 - DNA, 594 bp, Homo sapiens
  Payload ID: 18757
  Gene Name: tumor protein p53 binding protein 1
  ENST ID: ENST00000417342
  CDS Start-End: 1-145
gaccatgtctgtgttgagctgtatctgtgaagccaggcaagagaatgaggctcgaagtgaggatccccccaccacacccatcagggagaagaagagtttgatatgcctcagcctccacatggccatgtcttacatcgtcacatgagaacaatccgggaagtacgcacacttgtcactcgtgtcattacagatgtgtattatgtggatggaacagaagtagaaagaaaagtaactgaggagactgaagagccaattgtagagtgtcaggagtgtgaaactgaagtttccccttcacagactgggggctcctcaggtgacctgggggatatcagctccttctcctccaaggcatccagcttacaccgcacatcaagtgggacaagtctctcagctatgcacagcagtggaagctcagggaaaggagccggaccactcagagggaaaaccagcgggacagaacccgcagattttgccttacccagctcccgaggaggcccaggaaaactgagtcctagaaaaggggtcagtcagacagggacgccagtgtgtgaggaggatggtgatgcaggccttggcatcagacagggagggaag

SEQ ID NO: 196461 - DNA, 3976 bp, Homo sapiens
  Payload ID: 18757
  Gene Name: tumor protein p53 binding protein 1
  ENST ID: ENST00000411772
  CDS Start-End: 1-577
cagtgttgtcattgtagatgtgaaagagccatctcccagagttgatgtttcttgtgaacctttggagggagtggagaagtgctcagattcccagtcatgggaggatattgctccagaaatagaaccatgtgctgagaatagattagacaccaaggaagaaaagagtgtagaatatgaaggagatctgaaatcagggactgcagaaacagaacctgtagagcaagattcttcacagccttccttacctttagtgagagcagatgatcctttaagacttgaccaggagttgcagcagccccaaactcaggagaaaacaagtaattcattaacagaagactcaaaaatggctaatgcaaagcagctaagctcagatgcagaggcccagaagctggggaagccctctgcccatgcctcacaaagcttctgtgaaagttctagtgaaaccccatttcatttcactttgcctaaagaaggtgatatcatcccaccattgactggtgcaaccccacctcttattgggcacctaaaattggagcccaagagacacagtactcctattgtcagtgctgggaggtaacaatcatgccgtctggagtctcctgctacctatgcctgatgctggcagatgtgggttggctgagggctcatgcagcatcctttgtccagatgcagaagtggaactgaatcctgttgctcctcttaagaccaggtattagcaactatccagaaagcaccatagcaaccagtgatgtcatgtctgaaagcatggtggagacccatgatcccatacttgggagtggaaaaggggattctggggctgccccagacgtggatgataaattatgtctaagaatgaaactggttagtcctgagactgaggcgagtgaagagtctttgcagttcaacctggaaaagcctgcaactggtgaaagaaaaaatggatctactgctgttgctgagtctgttgccagtccccagaagaccatgtctgtgttgagctgtatctgtgaagccaggcaagagaatgaggctcgaagtgaggatccccccaccacacccatcagggggaacttgctccactttccaagttctcaaggagaagaggagaaagaaaaattggagggtgaccatacaatcaggcagagtcaacagcctatgaagcccattagtcctgtcaaggaccctgtttctcctgcttcccagaagatggtcatacaagggccatccagtcctcaaggagaggcaatggtgacagatgtgctagaagaccagaaagaaggacggagtactaataaggaaaatcctagtaaggccttgattgaaaggcccagccaaaataacataggaatccaaaccatggagtgttccttgagggtcccagaaactgtttcagcagcaacccagactataaagaatgtgtgtgagcaggggaccagtacagtggaccagaactttggaaagcaagatgccacagttcagactgagagggggagtggtgagaaaccagtcagtgctcctggggatgatacagagtcgctccatagccagggagaagaagagtttgatatgcctcagcctccacatggccatgtcttacatcgtcacatgagaacaatccgggaagtacgcacacttgtcactcgtgtcattacagatgtgtattatgtggatggaacagaagtagaaagaaaagtaactgaggagactgaagagccaattgtagagtgtcaggagtgtgaaactgaagtttccccttcacagactgggggctcctcaggtgacctgggggatatcagctccttctcctccaaggcatccagcttacaccgcacatcaagtgggacaagtctctcagctatgcacagcagtggaagctcagggaaaggagccggaccactcagagggaaaaccagcgggacagaacccgcagattttgccttacccagctcccgaggaggcccaggaaaactgagtcctagaaaaggggtcagtcagacagggacgccagtgtgtgaggaggatggtgatgcaggccttggcatcagacagggagggaaggctccagtcacgcctcgtgggcgtgggcgaaggggccgcccaccttctcggaccactggaaccagagaaacagctgtgcctggccccttgggcatagaggacatttcacctaacttgtcaccagatgataaatccttcagccgtgtcgtgccccgagtgccagactccaccagacgaacagatgtgggtgctggtgctttgcgtcgtagtgactctccagaaattcctttccaggctgctgctggcccttctgatggcttagatgcctcctctccaggaaatagctttgtagggctccgtgttgtagccaagtggtcatccaatggctacttttactctgggaaaatcacacgagatgtcggagctgggaagtataaattgctctttgatgatgggtacgaatgtgatgtgttgggcaaagacattctgttatgtgaccccatcccgctggacactgaagtgacggccctctcggaggatgagtatttcagtgcaggagtggtgaaaggacataggaaggagtctggggaactgtactacagcattgaaaaagaaggccaaagaaagtggtataagcgaatggctgtcatcctgtccttggagcaaggaaacagactgagagagcagtatgggcttggcccctatgaagcagtaacacctcttacaaaggcagcagatatcagcttagacaatttggtggaagggaagcggaaacggcgcagtaacgtcagctccccagccacccctactgcctccagtagcagcagcacaacccctacccgaaagatcacagaaagtcctcgtgcctccatgggagttctctcaggcaaaagaaaacttatcacttctgaagaggaacggtcccctgccaagcgaggtcgcaagtctgccacagtaaaacctggtgcagtaggggcaggagagtttgtgagcccctgtgagagtggagacaacaccggtgaaccctctgccctggaagagcagagagggcctttgcctctcaacaagaccttgtttctgggctacgcatttctccttaccatggccacaaccagtgacaagttggccagccgctccaaactgccagatggtcctacaggaagcagtgaagaagaggaggaatttttggaaattcctcctttcaacaagcagtatacagaatcccagcttcgagcaggagctggctatatccttgaagatttcaatgaagcccagtgtaacacagcttaccagtgtcttctaattgcggatcagcattgtcgaacccggaagtacttcctgtgccttgccagtgggattccttgtgtgtctcatgtctgggtccatgatagttgccatgccaaccagctccagaactaccgtaattatctgttgccagctgggtacagccttgaggagcaaagaattctggactggcaaccccgtgaaaatcctttccagaatctgaaggtactcttggtatcagaccaacagcagaacttcctggagctctggtctgagatcctcatgactggtggtgcagcctctgtgaagcagcaccattcaagtgcccataacaaagatattgctttaggggtatttgatgtggtggtgacggacccctcatgcccagcctcggtgctgaagtgtgctgaagcattgcagctgcctgtggtgtcacaagagtgggtgatccagtgcctcattgttggggagagaattggattcaagcagcatccaaaatataaacacgattatgtttctcactaaagatacttggtcttactggttttattccctgctatcgtggagattgtgttttaaccaggttttaaatgtgtcttgtgtgtaactggattccttgcatggatcttgtatatagttttatttgctgaacttttatgataaaataaatgttgaatctctttggttgtagtaa

SEQ ID NO: 196462 - DNA, 446 bp, Homo sapiens
  Payload ID: 18757
  Gene Name: tumor protein p53 binding protein 1
  ENST ID: ENST00000434595
  CDS Start-End: 1-446
acaccggtgaaccctctgccctggaagagcagagagggcctttgcctctcaacaagaccttgtttctgggctacgcatttctccttaccatggccacaaccagtgacaagttggccagccgctccaaactgccagatggtcctacaggaagcagtgaagaagaggaggcctactgcaaccatccaagtcaatcaggtctgaatgccctgccatcttccccatttgcgttctatgggcatctgctagagcaaacccatgtggaggaatttttggaaattcctcctttcaacaagcagtatacagaatcccagcttcgagcaggagctggctatatccttgaagatttcaatgaagcccagtgtaacacagcttaccagtgtcttctaattgcggatcagcattgtcgaacccggaagtacttcctgtgccttgccagtgggattcct

SEQ ID NO: 196463 - DNA, 556 bp, Homo sapiens
  Payload ID: 18757
  Gene Name: tumor protein p53 binding protein 1
  ENST ID: ENST00000467474
  CDS Start-End: 1-434
gtcacatgagaacaatccgggaagtacgcacacttgtcactcgtgtcattacagatgtgtattatgtggatggaacagaagtagaaagaaaagtaactgaggagactgaagagccaattgtagagtgtcaggagtgtgaaactgaagtttccccttcacagactgggggctcctcaggtgacctgggggatatcagctccttctcctccaaggcatccagcttacaccgcacatcaagtgggacaagtctctcagctatgcacagcagtggaagctcagggaaaggagccggaccactcagagggaaaaccagcgggacagaacccgcagattttgccttacccagctcccgaggaggcccaggaaaactgaggtgcagacagggtctccagagagagagagccacagcaggggcagggttgctgacattttaatatcacaggaaaaggggagtaatgggaaatcccccatcctccattaaagataaatcaactacccctcttcactatttgctctcttcctgttttgggtttgtgtgggaagtagggtggagccc

SEQ ID NO: 196464 - DNA, 4651 bp, Homo sapiens
  Payload ID: 18758
  Gene Name: tumor protein p53 binding protein 2
  Uniprot ID: Q13625
  ENST ID: ENST00000343537
  CDS Start-End: 293-3697
gctggggcccgacccgggattagttggtttcggagcggaggagggagccccgaccgtcacgagcgtcgaagagacaaagccgcgtcagggggcccggccggggcgggggagcccggggcttgttggtgccccagcccgcgcggagggcccttcggacccgcgcgccgccgctgccgccgccgccgcctcgcaacaggtccgggcggcctcgctctccgctcccctcccccgcatccgcgaccctccggggcacctcagctcggccggggccgcagtctggccacccgcttccatgcggttcgggtccaagatgatgccgatgtttcttaccgtgtatctcagtaacaatgagcagcacttcacagaagttccagttactccagaaacaatatgcagagacgtggtggatctgtgcaaagaacccggcgagagtgattgccatttggctgaagtgtggtgtggctctgaacgtccagttgcggataatgagcgaatgtttgatgttcttcaacgatttggaagtcagaggaacgaagttcgcttcttccttcgtcatgaacgcccccctggcagggacattgtgagtggaccaagatctcaggatccaagtttaaaaagaaatggtgtaaaagttcctggtgaatatcgaagaaaggagaacggtgttaatagtcctaggatggatctgactcttgctgaacttcaggaaatggcatctcgccagcagcaacagattgaagcccagcaacaattgctggcaactaaggaacagcgcttaaagtttttgaaacaacaagatcagcgacaacagcaacaagttgctgagcaggagaaacttaaaaggctaaaagaaatagctgagaatcaggaagctaagctaaaaaaagtgagagcacttaaaggccacgtggaacagaagagactaagcaatgggaaacttgtggaggaaattgaacagatgaataatttgttccagcaaaaacagagggagctcgtcctggctgtgtcaaaagtagaagaactgaccaggcagctagagatgctcaagaacggcaggatcgacagccaccatgacaatcagtctgcagtggctgagcttgatcgcctctataaggagctgcagctaagaaacaaattgaatcaagagcagaatgccaagctacaacaacagagggagtgtttgaataagcgtaattcagaagtggcagtcatggataagcgtgttaatgagctgagggaccggctgtggaagaagaaggcagctctacagcaaaaagaaaatctaccagtttcatctgatggaaatcttccccagcaagccgcgtcagccccaagccgtgtggctgcagtaggtccctatatccagtcgtctactatgcctcggatgccctcaaggcctgaattgctggtgaagccagccctgccggatggttccttggtcattcaggcttcagaggggccgatgaaaatacagacactgcccaacatgagatctggggctgcttcacaaactaaaggctctaaaatccatccagttggccctgattggagtccttcaaatgcagatcttttcccaagccaaggctctgcttctgtacctcaaagcactgggaatgctctggatcaagttgatgatggagaggttccgctgagggagaaagagaagaaagtgcgtccgttctcaatgtttgatgcagtagaccagtccaatgccccaccttcctttggtactctgaggaagaaccagagcagtgaagatatcttgcgggatgctcaggttgcaaataaaaatgtggctaaagtaccacctcctgttcctacaaaaccaaaacagattaatttgccttattttggacaaactaatcagccaccttcagacattaagccagacggaagttctcagcagttgtcaacagttgttccgtccatgggaactaaaccaaaaccagcagggcagcagccgagagtgctgctatctcccagcataccttcggttggccaagaccagaccctttctccaggttctaagcaagaaagtccacctgctgctgccgtccggccctttactccccagccttccaaagacaccttacttccacccttcagaaaaccccagaccgtggcagcaagttcaatatattccatgtatacgcaacagcaggcgccaggaaaaaacttccagcaggctgtgcagagcgcgttgaccaagactcataccagagggccacacttttcaagtgtatatggtaagcctgtaattgctgctgcccagaatcaacagcagcacccagagaacatttattccaatagccagggcaagcctggcagtccagaacctgaaacagagcctgtttcttcagttcaggagaaccatgaaaacgaaagaattcctcggccactcagcccaactaaattactgcctttcttatctaatccttaccgaaaccagagtgatgctgacctagaagccttacgaaagaaactgtctaacgcaccaaggcctctaaagaaacgtagttctattacagagccagagggtcctaatgggccaaatattcagaagcttttatatcagaggaccaccatagcggccatggagaccatctctgtcccatcatacccatccaagtcagcttctgtgactgccagctcagaaagcccagtagaaatccagaatccatatttacatgtggagcccgaaaaggaggtggtctctctggttcctgaatcattgtccccagaggatgtggggaatgccagtacagagaacagtgacatgccagctccttctccaggccttgattatgagcctgagggagtcccagacaacagcccaaatctccagaataacccagaagaaccaaatccagaggctccacatgtgcttgatgtgtacctggaggagtaccctccatacccacccccaccatacccatctggggagcctgaagggcccggagaagactcggtgagcatgcgcccgcctgaaatcaccgggcaggtctctctgcctcctggtaaaaggacaaacttgcgtaaaactggctcagagcgtatcgctcatggaatgagggtgaaattcaacccccttgctttactgctagattcgtctttggagggagaatttgaccttgtacagagaattatttatgaggttgatgacccaagcctccccaatgatgaaggcatcacggctcttcacaatgctgtgtgtgcaggccacacagaaatcgttaagttcctggtacagtttggtgtaaatgtaaatgctgctgatagtgatggatggactccattacattgtgctgcctcatgtaacaacgtccaagtgtgtaagtttttggtggagtcaggagccgctgtgtttgccatgacctacagtgacatgcagactgctgcagataagtgcgaggaaatggaggaaggctacactcagtgctcccaatttctttatggagttcaggagaagatgggcataatgaataaaggagtcatttatgcgctttgggattatgaacctcagaatgatgatgagctgcccatgaaagaaggagactgcatgacaatcatccacagggaagacgaagatgaaatcgaatggtggtgggcgcgccttaatgataaggagggatatgttccacgtaacttgctgggactgtacccaagaattaaaccaagacaaaggagcttggcctgaaacttccacacagaattttagtcaatgaagaattaatctctgttaagaagaagtaatacgattatttttggcaaaaatttcacaagacttattttaatgacaatgtagcttgaaagcgatgaagaatgtctctagaagagaatgaaggattgaagaattcaccattagaggacatttagcgtgatgaaataaagcatctacgtcagcaggccatactgtgttggggcaaaggtgtcccgtgtagcactcagataagtatacagcgacaatcctgttttctacaagaatcctgtctagtaaataggatcatttattgggcagttgggaaatcagctctctgtcctgttgagtgttttcagcagctgctcctaaaccagtcctcctgccagaaaggaccagtgccgtcacatcgctgtctctgattgtccccggcaccagcaggcccttggggggctcacctgaaggctcgaaggcactgcacacttgtatattgtcagtgaagaactgttagttggttgtcagtgaacaataactttattatatgagtttttgtagcatcttaagaattatacatatgtttgaaatattgaaactaagctacggtaccagtaattagatgtagaatcttgtttgtaggctgaattttaatctgtatttattgtcttttgtatctcagaaattagaaacttgctacagacttacccgtaatatttgtcaagatcatagctgactttaaaaacagttgtaataaactttttgatgctagctgtttactggtttttgtttttgatgtcataaatagaccttgtttaatagtcacaagccgttgggatatcatacccagctgaaaaagaacaaactgcttaacataagtatatgtatcgtaataagagttttttaccagctaagtgattcaatgtaagtggtttttaaaataaaatactgtagagatca

SEQ ID NO: 196465 - DNA, 4741 bp, Homo sapiens
  Payload ID: 18758
  Gene Name: tumor protein p53 binding protein 2
  Uniprot ID: Q13625
  ENST ID: ENST00000391878
  CDS Start-End: 770-3787
gggagccccgaccgtcacgagcgtcgaagagacaaagccgcgtcagggggcccggccggggcgggggagcccggggcttgttggtgccccagcccgcgcggagggcccttcggacccgcgcgccgccgctgccgccgccgccgcctcgcaacaggtccgggcggcctcgctctccgctcccctcccccgcatccgcgaccctccggggcacctcagctcggccggggccgcagtctggccacccgcttccatgcggttcgggtccaagatgatgccgatgtttcttaccgtgtatctcagtaacaatgagcagcacttcacagaagttccagttactccagaaacaatatgcagagacgtggtggatctgtgcaaagaacccggcgagagtgattgccatttggctgaagtgtggtgtggctctgtagagatagagtttcatcatgttggccaggatggtctcgatctcctgaccttgtgatccgcctgcctcggcctcccaaagtgctggattacaggtgtgagccaccacgatcagcctctagtgtttaaaaaagaacgtccagttgcggataatgagcgaatgtttgatgttcttcaacgatttggaagtcagaggaacgaagttcgcttcttccttcgtcatgaacgcccccctggcagggacattgtgagtggaccaagatctcaggatccaagtttaaaaagaaatggtgtaaaagttcctggtgaatatcgaagaaaggagaacggtgttaatagtcctaggatggatctgactcttgctgaacttcaggaaatggcatctcgccagcagcaacagattgaagcccagcaacaattgctggcaactaaggaacagcgcttaaagtttttgaaacaacaagatcagcgacaacagcaacaagttgctgagcaggagaaacttaaaaggctaaaagaaatagctgagaatcaggaagctaagctaaaaaaagtgagagcacttaaaggccacgtggaacagaagagactaagcaatgggaaacttgtggaggaaattgaacagatgaataatttgttccagcaaaaacagagggagctcgtcctggctgtgtcaaaagtagaagaactgaccaggcagctagagatgctcaagaacggcaggatcgacagccaccatgacaatcagtctgcagtggctgagcttgatcgcctctataaggagctgcagctaagaaacaaattgaatcaagagcagaatgccaagctacaacaacagagggagtgtttgaataagcgtaattcagaagtggcagtcatggataagcgtgttaatgagctgagggaccggctgtggaagaagaaggcagctctacagcaaaaagaaaatctaccagtttcatctgatggaaatcttccccagcaagccgcgtcagccccaagccgtgtggctgcagtaggtccctatatccagtcgtctactatgcctcggatgccctcaaggcctgaattgctggtgaagccagccctgccggatggttccttggtcattcaggcttcagaggggccgatgaaaatacagacactgcccaacatgagatctggggctgcttcacaaactaaaggctctaaaatccatccagttggccctgattggagtccttcaaatgcagatcttttcccaagccaaggctctgcttctgtacctcaaagcactgggaatgctctggatcaagttgatgatggagaggttccgctgagggagaaagagaagaaagtgcgtccgttctcaatgtttgatgcagtagaccagtccaatgccccaccttcctttggtactctgaggaagaaccagagcagtgaagatatcttgcgggatgctcaggttgcaaataaaaatgtggctaaagtaccacctcctgttcctacaaaaccaaaacagattaatttgccttattttggacaaactaatcagccaccttcagacattaagccagacggaagttctcagcagttgtcaacagttgttccgtccatgggaactaaaccaaaaccagcagggcagcagccgagagtgctgctatctcccagcataccttcggttggccaagaccagaccctttctccaggttctaagcaagaaagtccacctgctgctgccgtccggccctttactccccagccttccaaagacaccttacttccacccttcagaaaaccccagaccgtggcagcaagttcaatatattccatgtatacgcaacagcaggcgccaggaaaaaacttccagcaggctgtgcagagcgcgttgaccaagactcataccagagggccacacttttcaagtgtatatggtaagcctgtaattgctgctgcccagaatcaacagcagcacccagagaacatttattccaatagccagggcaagcctggcagtccagaacctgaaacagagcctgtttcttcagttcaggagaaccatgaaaacgaaagaattcctcggccactcagcccaactaaattactgcctttcttatctaatccttaccgaaaccagagtgatgctgacctagaagccttacgaaagaaactgtctaacgcaccaaggcctctaaagaaacgtagttctattacagagccagagggtcctaatgggccaaatattcagaagcttttatatcagaggaccaccatagcggccatggagaccatctctgtcccatcatacccatccaagtcagcttctgtgactgccagctcagaaagcccagtagaaatccagaatccatatttacatgtggagcccgaaaaggaggtggtctctctggttcctgaatcattgtccccagaggatgtggggaatgccagtacagagaacagtgacatgccagctccttctccaggccttgattatgagcctgagggagtcccagacaacagcccaaatctccagaataacccagaagaaccaaatccagaggctccacatgtgcttgatgtgtacctggaggagtaccctccatacccacccccaccatacccatctggggagcctgaagggcccggagaagactcggtgagcatgcgcccgcctgaaatcaccgggcaggtctctctgcctcctggtaaaaggacaaacttgcgtaaaactggctcagagcgtatcgctcatggaatgagggtgaaattcaacccccttgctttactgctagattcgtctttggagggagaatttgaccttgtacagagaattatttatgaggttgatgacccaagcctccccaatgatgaaggcatcacggctcttcacaatgctgtgtgtgcaggccacacagaaatcgttaagttcctggtacagtttggtgtaaatgtaaatgctgctgatagtgatggatggactccattacattgtgctgcctcatgtaacaacgtccaagtgtgtaagtttttggtggagtcaggagccgctgtgtttgccatgacctacagtgacatgcagactgctgcagataagtgcgaggaaatggaggaaggctacactcagtgctcccaatttctttatggagttcaggagaagatgggcataatgaataaaggagtcatttatgcgctttgggattatgaacctcagaatgatgatgagctgcccatgaaagaaggagactgcatgacaatcatccacagggaagacgaagatgaaatcgaatggtggtgggcgcgccttaatgataaggagggatatgttccacgtaacttgctgggactgtacccaagaattaaaccaagacaaaggagcttggcctgaaacttccacacagaattttagtcaatgaagaattaatctctgttaagaagaagtaatacgattatttttggcaaaaatttcacaagacttattttaatgacaatgtagcttgaaagcgatgaagaatgtctctagaagagaatgaaggattgaagaattcaccattagaggacatttagcgtgatgaaataaagcatctacgtcagcaggccatactgtgttggggcaaaggtgtcccgtgtagcactcagataagtatacagcgacaatcctgttttctacaagaatcctgtctagtaaataggatcatttattgggcagttgggaaatcagctctctgtcctgttgagtgttttcagcagctgctcctaaaccagtcctcctgccagaaaggaccagtgccgtcacatcgctgtctctgattgtccccggcaccagcaggcccttggggggctcacctgaaggctcgaaggcactgcacacttgtatattgtcagtgaagaactgttagttggttgtcagtgaacaataactttattatatgagtttttgtagcatcttaagaattatacatatgtttgaaatattgaaactaagctacggtaccagtaattagatgtagaatcttgtttgtaggctgaattttaatctgtatttattgtcttttgtatctcagaaattagaaacttgctacagacttacccgtaatatttgtcaagatcatagctgactttaaaaacagttgtaataaactttttgatgctagctgtttactggtttttgtttttgatgtcataaatagaccttgtttaatagtcacaagccgttgggatatcatacccagctgaaaaagaacaaactgcttaacataagtatatgtatcgtaataagagttttttaccagctaagtgattcaatgtaagtggtttttaaaataaaatactgtagagatca

SEQ ID NO: 196466 - DNA, 1841 bp, Homo sapiens
  Payload ID: 18758
  Gene Name: tumor protein p53 binding protein 2
  ENST ID: ENST00000483398
  CDS Start-End: 1-194
aaagcactgggaatgctctggatcaagttgatgatggagaggttccgctgagggagaaagagaagaaagtgcgtccgttctcaatgtttgatgcagtagaccagtccaatgccccaccttcctttggtactctgaggaagaaccagagcagtgaagatatcttgcgggatgctcagtatatggtaagcctgtaattgctgctgcccagaatcaacagcagcacccagagaacatttattccaatagccagggcaagcctggcagtccagaacctgaaacagagcctgtttcttcagttcaggagaaccatgaaaacgaaagaattcctcggccactcagcccaactaaattactgcctttcttatctaatccttaccgaaaccagagtgatgctgacctagaagccttacgaaagaaactgtctaacgcaccaaggcctctaaagaaacgtagttctattacagagccagagggtcctaatgggccaaatattcagaagcttttatatcagaggaccaccatagcggccatggagaccatctctgtcccatcatacccatccaagtcagcttctgtgactgccagctcagaaagcccagtagaaatccagaatccatatttacatgtggagcccgaaaaggaggtggtctctctggttcctgaatcattgtccccagaggatgtggggaatgccagtacagagaacagtgacatgccagctccttctccaggccttgattatgagcctgagggagtcccagacaacagcccaaatctccagaataacccagaagaaccaaatccagaggctccacatgtgcttgatgtgtacctggaggagtaccctccatacccacccccaccatacccatctggggagcctgaagggcccggagaagactcggtgagcatgcgcccgcctgaaatcaccgggcaggtctctctgcctcctggtaaaaggacaaacttgcgtaaaactggctcagagcgtatcgctcatggaatgagggtgaaattcaacccccttgctttactgctagattcgtctttggagggagaatttgaccttgtacagagaattatttatgaggttgatgacccaagcctccccaatgatgaaggcatcacggctcttcacaatgctgtgtgtgcaggccacacagaaatcgttaagttcctggtacagtttggtgtaaatgtaaatgctgctgatagtgatggatggactccattacattgtgctgcctcatgtaacaacgtccaagtgtgtaagtttttggtggagtcaggagccgctgtgtttgccatgacctacagtgacatgcagactgctgcagataagtgcgaggaaatggaggaaggctacactcagtgctcccaatttctttatggagttcaggagaagatgggcataatgaataaaggagtcatttatgcgctttgggattatgaacctcagaatgatgatgagctgcccatgaaagaaggagactgcatgacaatcatccacagggaagacgaagatgaaatcgaatggtggtgggcgcgccttaatgataaggagggatatgttccacgtaacttgctgggactgtacccaagaattaaaccaagacaaaggagcttggcctgaaacttccacacagaattttagtcaatgaagaattaatctctgttaagaagaagtaatacgattatttttggcaaaaatttcacaagacttattttaatgacaatgtagcttgaaagcgatgaagaatgtctctagaagagaatgaaggattgaagaattcaccattagaggacatttagcgtgatgaaataaagcatctacgtcagca

SEQ ID NO: 196467 - DNA, 593 bp, Homo sapiens
  Payload ID: 18758
  Gene Name: tumor protein p53 binding protein 2
  ENST ID: ENST00000464656
  CDS Start-End: 1-194
aaagcactgggaatgctctggatcaagttgatgatggagaggttccgctgagggagaaagagaagaaagtgcgtccgttctcaatgtttgatgcagtagaccagtccaatgccccaccttcctttggtactctgaggaagaaccagagcagtgaagatatcttgcgggatgctcagtatatggtaagcctgtaattgctgctgcccagaatcaacagcagcacccagagaacatttattccaatagccagggcaagcctggcagtccagaacctgaaacagagcctgtttcttcagttcaggagaaccatgaaaacgaaagaattcctcggccactcagcccaactaaattactgcctttcttatctaatccttaccgaaaccagagtgatgctgacctagaagccttacgaaagaaactgtctaacgcaccaaggcctctaaagaaacgtagttctattacagagccagagggtcctaatgggccaaatattcagaagcttttatatcagaggaccaccatagcggccatggagaccatctctgtcccatcatacccatccaagtcagcttctgtgactgccagctcagaaa

SEQ ID NO: 196468 - DNA, 465 bp, Homo sapiens
  Payload ID: 18758
  Gene Name: tumor protein p53 binding protein 2
  ENST ID: ENST00000465119
  CDS Start-End: 275-418
attagttggtttcggagcggaggagggagccccgaccgtcacgagcgtcgaagagacaaagccgcgtcagggggcccggccggggcgggggagcccggggcttgttggtgccccagcccgcgcggagggcccttcggacccgcgcgccgccgctgccgccgccgccgcctcgcaacaggtccgggcggcctcgctctccgctcccctcccccgcatccgcgaccctccggggcacctcagctcggccggggccgcagtctggccacccgcttccatgcggttcgggtccaagatgatgccgaacgtccagttgcggataatgagcgaatgtttgatgttcttcaacgatttggaagtcagaggaacgaagttcgcttcttccttcgtcatgaacgcccccctggcagggacattgtgagtggaccaagatctcaggatccaagtttaaaaagaaatggtgtaaaa

SEQ ID NO: 196469 - DNA, 701 bp, Homo sapiens
  Payload ID: 18758
  Gene Name: tumor protein p53 binding protein 2
  ENST ID: ENST00000494100
  CDS Start-End: 1-701
aatgtttgatgttcttcaacgatttggaagtcagaggaacgaagttcgcttcttccttcgtcatgaacgcccccctggcagggacattgtgagtggaccaagatctcaggatccaagtttaaaaagaaatggtgtaaaagttcctggtgaatatcgaagaaaggagaacggtgttaatagtcctaggatggatctgactcttgctgaacttcaggaaatggcatctcgccagcagcaacagattgaagcccagcaacaattgctggcaactaaggaacagcgcttaaagtttttgaaacaacaagatcagcgacaacagcaacaagttgctgagcaggagaaacttaaaaggctaaaagaaatagctgagaatcaggaagctaagctaaaaaaagtgagagcacttaaaggccacgtggtctctctggttcctgaatcattgtccccagaggatgtggggaatgccagtacagagaacagtgacatgccagctccttctccaggccttgattatgagcctgagggagtcccagacaacagcccaaatctccagaataacccagaagaaccaaatccagaggctccacatgtgcttgatgtgtacctggaggagtaccctccatacccacccccaccatacccatctggggagcctgaagggcccggagaagactcggtgagcatgcgcccgcctgaaatca

SEQ ID NO: 196470 - DNA, 5638 bp, Homo sapiens
  Payload ID: 18759
  Gene Name: tumor protein p53 inducible nuclear protein 1
  Uniprot ID: Q96A56
  ENST ID: ENST00000342697
  CDS Start-End: 409-1131
gggcccgacggcgagcggagcggccgatcagctgttgcgagcgctgcacaacaacaaaaggacttggactggccggcctgggcgcagcgacccgagggctggagccggccccgcgcctgccgtctgggtacctgaacgaggtgcagcgcagcccggccccaccgcagctacctcagcagtcccgccccgcccgcgtccttccccgccgagccggcggccgctcccttccccgcgcagccccgcacggcccgggcccacgtacaatgactcttcttgcttttcacctaagttgaataagcaccctgtgcactttaatctcctgtcggtaccattgggccaactaaagacaaggttttgaaatctcagctataaaagacatccagccaaactctcagtcttgccttaacaatgttccagaggctgaataaaatgtttgtgggtgaagtcagttcttcctccaaccaagaaccagaattcaatgagaaagaagatgatgaatggattcttgttgacttcatagatacttgcactggtttctcagcagaagaagaagaagaagaggaggacatcagtgaagagtcacctactgagcacccttcagtcttttcctgtttaccggcatctcttgagtgcttggctgatacaagtgattcctgctttctccagtttgagtcatgtccaatggaggagagctggtttatcaccccacccccatgttttactgcaggtggattaaccactatcaaggtggaaacaagtcctatggaaaaccttctcattgaacatcccagcatgtctgtctatgctgtgcataactcctgccctggtctcagtgaggccacccgtgggactgatgaattacatagcccaagtagtcccagagtggaagctcaaaatgaaatggggcagcatattcattgttatgttgcagctcttgctgctcatacaacttttctggaacaacccaagagctttcgcccttcccagtggataaaagaacacagtgaaagacagcctcttaacagaaatagccttcgtcgccaaaatcttaccagggattgccaccctcggcaagtcaagcacaatggctgggttgttcatcagccctgcccgcgtcagtacaattactaatagtttcaagttttgttggttggtttctcttggtttgtgcttacatgtatggatgtgtgtatatgtacagtgaaaatgttgtctctttacaaccaattgataaccaatcacatagttttatcagtgtatttagacactatcttgaaaatcagatttatatgctgtgtatcacataatgccttgcctttaacatttactttttttgtacactttttcagattatttctggaaacatatcaatataattacagtgtttgggggtgtctttaaatatattaggttatacattagtcagcattttaaagacatttcttcccaagtacgagaataggcatctttcattttcattttattttgtattacttaatcttttaagcaagcaaaaatttattctcagggtcagctgtacactttattgaccagtacttgataatctctctgtatatgatgaatacatttttacacactaacattagcattaacaggtgatagttgccatggatataatggaattatggctggactttcttttgaaagaaaacttgatgtattctgtgtgtatggtttttccccagattagtcatacagttcatttggaattcaggtacattaagctttagtgaagagtgcatgcagtaattccaatgtgactgcatgacgtggtacagacattacaggtgttgtagacagaggcacttgtctcgtgcagagggattaaattagacctgtgagattatatttggaaaaattcatgtctgtaactaacccattagtgcagtatttaatttgttactattccttcccgccaattctgtccactcctcacctcgcatcagctataaatttggaagtacttgtccaggcactcaagtgacttcatatttctctctgcccatgggaaaagagataggctttatatttccacagagtgaaaaatcctctgtcatggagcctgtcctgccaagtggcaagagtgtggggactgtctggtgatgatgtctttcatggcatctgagtgaagagtgacaggttggctcaacttttttctttttttttttttaattgccttgtattgtaagtattcttccctgcagtccaagtgacttttcattttttgttttaacttcaggcaaaatctttaaccactctggcctctgtttcccccaccaacggggagcagtgacatttacctccctcacagagtcactgtgaggattctatactgatttgaagtggagctgttcagaactgaaccttgtaggaaattccaagggcctttctactgaatctggtgatggggtggggccgtggcactttctctgccacagctgttcttcacagtgttggtgctaatgaggccagggtgcagggttcgattcacacgtaggccagttaacttagagaaaatctatttccttacctctagccagtcacttcctttttccgcagttgtgatgggttttgctgagccatccactctgactgatttcctctgaagtaaacatatttacaatccaaagcaattctactgacagaagtgttgccttcataatcaaacagcttgtttttccatctcctctgcaaccctaattaaatgagtacaggtctacaaaatgttttcaaggagaaaagcagcatatccttaagtgaagtattatatttttcaataaccctgtagtggcttgatgcagggaaccctgggggactttcagcgaagagctgtgctcttttctgactagattagagcgtttggagtggaagacgtcaaatgtgtagtgagatggaggttttacattgttcttctactggctgtgatgaagtgccagaatgtctctttagaacaagagttagattccccctttctccttattgccccttccgttttgacttcccctttatttatttgttgtctaattaggggccaagtctgtaaagttttgtcaaagtgagttagaagttgttttctcttactatttgtgtttaccagagttgggagataagatagtttccatgaaggtgtgtatgttttatacgatgtttgttatagggccatgcattggtaacttgaaaatagaccagcttaatgtcttcaggatgtaaaactctgaatacacggcgtctctttttcatacattgcatgtaagttgttagtacctcacaagctacagaagttcagccatgagattttgtttggcaacatgaacagatttgtgtataactgcaatggcctttttttccagatttccttattgactttttgtttgccttacctggggctagttttttatgctttgtacctagaaaacaaaaaattacattcgttgggctttttttcaaggttgggattaccacaccacctggaatatcatactgtggtttctgcctaaaattggcacatgtaagtattgaagaaaatggttatataattcagttgaaactcttggttattagatgttaggcatctcctgtatgtaagacacaaggccaaccacaacacagaacgatgttgacctgttaagtattctctgaaacatggccaaaatgcattttatgagcttttttttttgctattgtaaatattagtggtttacaatgcgctttagacatatttctttaaaatgcaagcagtgagaaataagacctctctgaattagtagctctaaactgttaacatagaatgttacttggaaaaagtctggaatatgtggtgtacacaagcagtgcttcgtgaatgagtttcttagcttttatagtgcgccatgtttctcaaagtttgtttttgttgacaaaacattttataatatatatcttatgtttattttttttctcaactaattgtgtactgcactgtaaggtgaaaattagccatccattatttatcttctgtggcaatgcatttatatggttgattgggtggggaattttttgcagaaagatgcaaagtgattgggttttcgacttcctatcgcagggagcttttaagaaatattaatttcctatacatttttccaatccccatgcaaactgttcctgtttacataccttctctgttgtatcagtactttgagtgagaagacagtttatttaaaacttgagcaggctgttcagcattgtttctgcttctgaaatctgtatagtacactggtttgtaatcattatgtcttcattgaaatccttgctacttctcttcctcctcaatgaaatacattatatattatctttatgtactcttaagaaaaacgagcaaggaagagtatcttcattattctcattttctctgagttggaaacaaaaacatgaaggactccaactagaagacagatatttacatttaaatagattagtgggaaaactttaagagtttccacatattagttttcattttttgagtcaagagactgctccttgtactgggagacactagtagtatatgtttgtaatgttactttaaaattatctttttattttataaggcccataaatactggttaaactctgttaaaagtgggccttctatcttggatggtttcactgccatcagccatgctgatatattagaaatggcatccctatctacttactttaatgcttaaaattatacataaaatgctttatttagaaaacctacatgatacagtggtgtcagccttgccatgtatcagtttcacttgaaatttgagaccaattaaatttcaactgtttagggtggagaaagaggtactggaaaacatgcagatgaggatatcttttatgtgcaacagtatcctttgcatgggaggagagttactcttgaaaggcaggcagcttaagtggacaatgttttgtatatagttgagaattttacgacacttttaaaaattgtgtaattgttaaatgtccagttttgctctgttttgcctgaagttttagtatttgttttctaggtggacctctgaaaaccaaaccagtacctggggaggttagatgtgtgtttcaggcttggagtgtatgagtggttttgcttgtattttcctccagagattttgaactttaataattgcgtgtgttttttttttttttaagtggctttgtttttttttctcaagtaaaattgtgaacatatttcctttataggggcagggcatgagttagggagactgaagagtattgtagactgtacatgtgccttcttaatgtgtttctcgacacattttttttcagtaacttgaaaattcaaaagggacatttggttaggttactgtacatcaatctatgcataaatggcagcttgttttcttgagccacggtctaaattttgtttttatagaaattttttatactgattggttcatagatggtcagttttgtacacagactgaacaatacagcactttgccaaaaatgagtgtagcattgtttaaacattgtgtgttaacacctgttctttgtaattgggttgtggtgcattttgcactacctggagttacagttttcaatctgtcagtaaataaagtgtcctttaacttca

SEQ ID NO: 196471 - DNA, 5631 bp, Homo sapiens
  Payload ID: 18759
  Gene Name: tumor protein p53 inducible nuclear protein 1
  Uniprot ID: Q96A56
  ENST ID: ENST00000448464
  CDS Start-End: 364-858
gcacaacaacaaaaggacttggactggccggcctgggcgcagcgacccgagggctggagccggccccgcgcctgccgtctgggtacctgaacgaggtgcagcgcagcccggccccaccgcagctacctcagcagtcccgccccgcccgcgtccttccccgccgagccggcggccgctcccttccccgcgcagccccgcacggcccgggcccacgtacaatgactcttcttgcttttcacctaagttgaataagcaccctgtgcactttaatctcctgtcggtaccattgggccaactaaagacaaggttttgaaatctcagctataaaagacatccagccaaactctcagtcttgccttaacaatgttccagaggctgaataaaatgtttgtgggtgaagtcagttcttcctccaaccaagaaccagaattcaatgagaaagaagatgatgaatggattcttgttgacttcatagatacttgcactggtttctcagcagaagaagaagaagaagaggaggacatcagtgaagagtcacctactgagcacccttcagtcttttcctgtttaccggcatctcttgagtgcttggctgatacaagtgattcctgctttctccagtttgagtcatgtccaatggaggagagctggtttatcaccccacccccatgttttactgcaggtggattaaccactatcaaggtggaaacaagtcctatggaaaaccttctcattgaacatcccagcatgtctgtctatgctgtgcataactcctgccctggtctcagtgaggccacccgtgggactgatgaattacatagcccaagtagtcccagggccaggaaaagctgcttataagactcacgggcacagaagtggaagctcaaaatgaaatggggcagcatattcattgttatgttgcagctcttgctgctcatacaacttttctggaacaacccaagagctttcgcccttcccagtggataaaagaacacagtgaaagacagcctcttaacagaaatagccttcgtcgccaaaatcttaccagggattgccaccctcggcaagtcaagcacaatggctgggttgttcatcagccctgcccgcgtcagtacaattactaatagtttcaagttttgttggttggtttctcttggtttgtgcttacatgtatggatgtgtgtatatgtacagtgaaaatgttgtctctttacaaccaattgataaccaatcacatagttttatcagtgtatttagacactatcttgaaaatcagatttatatgctgtgtatcacataatgccttgcctttaacatttactttttttgtacactttttcagattatttctggaaacatatcaatataattacagtgtttgggggtgtctttaaatatattaggttatacattagtcagcattttaaagacatttcttcccaagtacgagaataggcatctttcattttcattttattttgtattacttaatcttttaagcaagcaaaaatttattctcagggtcagctgtacactttattgaccagtacttgataatctctctgtatatgatgaatacatttttacacactaacattagcattaacaggtgatagttgccatggatataatggaattatggctggactttcttttgaaagaaaacttgatgtattctgtgtgtatggtttttccccagattagtcatacagttcatttggaattcaggtacattaagctttagtgaagagtgcatgcagtaattccaatgtgactgcatgacgtggtacagacattacaggtgttgtagacagaggcacttgtctcgtgcagagggattaaattagacctgtgagattatatttggaaaaattcatgtctgtaactaacccattagtgcagtatttaatttgttactattccttcccgccaattctgtccactcctcacctcgcatcagctataaatttggaagtacttgtccaggcactcaagtgacttcatatttctctctgcccatgggaaaagagataggctttatatttccacagagtgaaaaatcctctgtcatggagcctgtcctgccaagtggcaagagtgtggggactgtctggtgatgatgtctttcatggcatctgagtgaagagtgacaggttggctcaacttttttctttttttttttttaattgccttgtattgtaagtattcttccctgcagtccaagtgacttttcattttttgttttaacttcaggcaaaatctttaaccactctggcctctgtttcccccaccaacggggagcagtgacatttacctccctcacagagtcactgtgaggattctatactgatttgaagtggagctgttcagaactgaaccttgtaggaaattccaagggcctttctactgaatctggtgatggggtggggccgtggcactttctctgccacagctgttcttcacagtgttggtgctaatgaggccagggtgcagggttcgattcacacgtaggccagttaacttagagaaaatctatttccttacctctagccagtcacttcctttttccgcagttgtgatgggttttgctgagccatccactctgactgatttcctctgaagtaaacatatttacaatccaaagcaattctactgacagaagtgttgccttcataatcaaacagcttgtttttccatctcctctgcaaccctaattaaatgagtacaggtctacaaaatgttttcaaggagaaaagcagcatatccttaagtgaagtattatatttttcaataaccctgtagtggcttgatgcagggaaccctgggggactttcagcgaagagctgtgctcttttctgactagattagagcgtttggagtggaagacgtcaaatgtgtagtgagatggaggttttacattgttcttctactggctgtgatgaagtgccagaatgtctctttagaacaagagttagattccccctttctccttattgccccttccgttttgacttcccctttatttatttgttgtctaattaggggccaagtctgtaaagttttgtcaaagtgagttagaagttgttttctcttactatttgtgtttaccagagttgggagataagatagtttccatgaaggtgtgtatgttttatacgatgtttgttatagggccatgcattggtaacttgaaaatagaccagcttaatgtcttcaggatgtaaaactctgaatacacggcgtctctttttcatacattgcatgtaagttgttagtacctcacaagctacagaagttcagccatgagattttgtttggcaacatgaacagatttgtgtataactgcaatggcctttttttccagatttccttattgactttttgtttgccttacctggggctagttttttatgctttgtacctagaaaacaaaaaattacattcgttgggctttttttcaaggttgggattaccacaccacctggaatatcatactgtggtttctgcctaaaattggcacatgtaagtattgaagaaaatggttatataattcagttgaaactcttggttattagatgttaggcatctcctgtatgtaagacacaaggccaaccacaacacagaacgatgttgacctgttaagtattctctgaaacatggccaaaatgcattttatgagcttttttttttgctattgtaaatattagtggtttacaatgcgctttagacatatttctttaaaatgcaagcagtgagaaataagacctctctgaattagtagctctaaactgttaacatagaatgttacttggaaaaagtctggaatatgtggtgtacacaagcagtgcttcgtgaatgagtttcttagcttttatagtgcgccatgtttctcaaagtttgtttttgttgacaaaacattttataatatatatcttatgtttattttttttctcaactaattgtgtactgcactgtaaggtgaaaattagccatccattatttatcttctgtggcaatgcatttatatggttgattgggtggggaattttttgcagaaagatgcaaagtgattgggttttcgacttcctatcgcagggagcttttaagaaatattaatttcctatacatttttccaatccccatgcaaactgttcctgtttacataccttctctgttgtatcagtactttgagtgagaagacagtttatttaaaacttgagcaggctgttcagcattgtttctgcttctgaaatctgtatagtacactggtttgtaatcattatgtcttcattgaaatccttgctacttctcttcctcctcaatgaaatacattatatattatctttatgtactcttaagaaaaacgagcaaggaagagtatcttcattattctcattttctctgagttggaaacaaaaacatgaaggactccaactagaagacagatatttacatttaaatagattagtgggaaaactttaagagtttccacatattagttttcattttttgagtcaagagactgctccttgtactgggagacactagtagtatatgtttgtaatgttactttaaaattatctttttattttataaggcccataaatactggttaaactctgttaaaagtgggccttctatcttggatggtttcactgccatcagccatgctgatatattagaaatggcatccctatctacttactttaatgcttaaaattatacataaaatgctttatttagaaaacctacatgatacagtggtgtcagccttgccatgtatcagtttcacttgaaatttgagaccaattaaatttcaactgtttagggtggagaaagaggtactggaaaacatgcagatgaggatatcttttatgtgcaacagtatcctttgcatgggaggagagttactcttgaaaggcaggcagcttaagtggacaatgttttgtatatagttgagaattttacgacacttttaaaaattgtgtaattgttaaatgtccagttttgctctgttttgcctgaagttttagtatttgttttctaggtggacctctgaaaaccaaaccagtacctggggaggttagatgtgtgtttcaggcttggagtgtatgagtggttttgcttgtattttcctccagagattttgaactttaataattgcgtgtgttttttttttttttaagtggctttgtttttttttctcaagtaaaattgtgaacatatttcctttataggggcagggcatgagttagggagactgaagagtattgtagactgtacatgtgccttcttaatgtgtttctcgacacattttttttcagtaacttgaaaattcaaaagggacatttggttaggttactgtacatcaatctatgcataaatggcagcttgttttcttgagccacggtctaaattttgtttttatagaaattttttatactgattggttcatagatggtcagttttgtacacagactgaacaatacagcactttgccaaaaatgagtgtagcattgtttaaacattgtgtgttaacacctgttctttgtaattgggttgtggtgcattttgcactacctggagttacagttttcaatctgtcagtaaataaagtgtcctttaacttca

SEQ ID NO: 196472 - DNA, 4018 bp, Homo sapiens
  Payload ID: 18760
  Gene Name: tumor protein p53 inducible nuclear protein 2
  Uniprot ID: Q8IXH6
  ENST ID: ENST00000374809
  CDS Start-End: 224-886
cggccgcacagactcaaagccccgcgggcgagctcagcagcccggagcgaccgcggccccgccgcctcccccgcgagtcccggcgatgcggcccggcctgtgagcggccggcgaccctgggacgccccgccgcacaactacctcaacgccgtgccgcccccctcccgcccccaggtttttgcactgccatagggcgcccccgtgaggcgcttcgccccccaccatgttccagcgcctctccagcctcttcttcagcaccccctcgccccccgaagaccccgactgcccccgcgccttcgtgtcggaggaggatgaagtggacggctggctcatcattgacctgccggacagctacgcggctccacccagccccggggccgcccctgcccccgcgggccgccctccgcccgcgccctccttgatggacgagagctggtttgttacccctcccgcctgttttacggcagaggggcctggactcggtcccgcccgcctccagagcagtcccctggaggacctcctcatcgagcaccccagcatgtccgtttacgtcaccggcagcaccatagtgctagagcccgggtccccttccccgctcccggacgcggccctgcctgacggcgacctcagcgaaggggaattgacgcccgcccgccgcgagccgcgggccgcgcgccacgccgctcctctcccagcgcgggcggcgctgctggagaaggcgggccaggtgcggcggctgcagcgggcccggcagcgggcagagcgccacgcgctgagcgccaaggcggtgcagcggcagaaccgagcccgcgagagccgtccgcgccggtccaagaaccagagcagcttcatctaccagccgtgccagcgccagttcaactactgagcgtccaccggccgcgccacgaaccccttgccgatcccgatccctgtcgggctcctccgactcctcgggctggacaccgaaacctcccttcttaaagcgtgtgaggttgggtgatagccgttccttccccgacaccctcaatttccccatctctgatcctctaatctgcctctgaacccattcacccttcaccctcactcctggtccccatacccagcatctaatcatccatgccccctactcctggcccctccatcctttcttctctggtccccatccctgtctctccctttcacccttgccctccagtcctctacctctggcctgcccctatttctgaaagcttcttccagtccctgatctggctcattccccaccttcaactcccaccttacatgtctcacactatcccatggttggcattacactcactcctgttcccttattcttcattcccagtaattccctaccaaatggtggggaccctgagcccagctctgaccaggtagagcctgtgcagcctgggctgctgtcattgccctccagtaagggctcagggttttgcttttagtctccccttccttctgccttgggggcggtactctgtggagctgcttaggcctggaaaggtacagtatgtagaagaggactgtgagacgtgagttagagggagaagatggagggaatctagggaacgaggcagcctattggagatgcggacaggacagacacgttgagaagctgcagggagcagggcaccaagggagtgtgcactgtgcttgctcagagaggccaaaccctgctcccaggctgaagcctggagtctgcccccacttcccttttctataatccacccttctgcaggccctgaaatctgaagggcttagttagtaccttgccactctacccccaacacgtcacccgagtagaagctgggcaaggccctaccatcctggccgtctgttcacaagcccaaggtgctagaactagcttaggagacatgcaggccacagggcttctaggcagggaaagggcacacaccctaggtcagcgtgcagagcagtgatgctggaggacacaccatggggtgaagccatcccaaggctgacagctcagtcttcaccttgcctctggccttgtatttcacaccctgctcagtatggctagccagcagtcctgagtaggagtccaggactcccactgtctcaatctgcaaattgttcctatccaggttcagggccttcagggggcctcttttcattttctcccacaggcctctctttctttctaggttgctggggagaaatgggtaccctatgatccccctccccttctcctccagtaaatacctggaagagggaacctgaatccctgggggagacagaaggggcaggggccaccagcctccccttcttgtggtgagactgaattttgggctcagacaccagcaacagcctcttgggatgccctgagttgcttcccatttcctctttctagccgtccttttctagtgtgtgctcactcttcctaggaacttttaagacttcttggtacctatgaacataggtcctcccctcaccccaactctaggtttccaggcctcacagccaagctgaagcttggagaaaactctgcattcccatgagggcaaaggcagctgccctccctgaccctatagccccaggcctcatggggggtatgtggggaagggatggggtatccccatggatgctgggatgaggacagaggaagacctgatggggtctcctattccagggaataagccaaattaacactaaaaacggatcaaagctcccacgccagtccactagggccccagtagttgacagccttgctcctctcccaagttctccttcagaacctagttgcttttattcttccagctaccacttgggcacttcacagccagcctagggtcttcggcacctccaagagctgaatctccctccaacccttcttgcctactcctcactgccagctgggacctaggctcagtcctgtgtggtgcccatgatccttctggtgggggaagagtttaagttatagggcatttggctcaaattttaaaaggccttttgtttacctatatttctggaggctcctgtattctagaacccaatctctcacctgcttggttgcaaggctcatatttttttgtacctttcctatagattctgtagcatttgagtgtggcaatattttaattgtgtatagatttctaagaaccaacactactcagtctcctgctagtctgactcctgaagcatcagcccttgtcatactgtattgactgtgtacgtgcctttcaccttgagcatgcttcaggatttttttttaaaccacagaacttgaatacatgagggaaccagagttcaaagtcctatgcaaccttaggagggggttagagagtctgttttgattgatgttttctgaggccctagaggagtttgtatcaatttgtgagtattaatgtcagtactaccagcactttgccaaaactgtcagagggacccgtttctagagtgagtcccagttacatcaaacagtgacttccagttattccccagtaagtctgagtggttccttcaagctgggtgtctttccagcctttgccagtctagccccagcagggcaccgtgtatgaatgcagtttggtgctgttttagagtatgcctgctccccagccccctgcctggaaccctctgagcaacttgctctgacctataatgtcttaggtgcaacacggaccccaccagagctcttggatacccccctagatccatgtggctttatgtgaggggactgaatgcagacacaccatagcccccttctactactttccctctcgccctgccacctagttccacatggaaccaacaagttgagtgcatccctgttgggtgttttgtgttgagactggctgaaatgaggagactttgaccatgtgacgtgtcaacagactcaaggagacaaccacctcaactgggtcatgtggcatgcctgtgtatgtgtgtaacagaattctgattgttagactgtaatgctattcctctatgggagaaaaaaattaatataaagaaaaacaaataaaaatatatttaaagcacatga

SEQ ID NO: 196473 - DNA, 4184 bp, Homo sapiens
  Payload ID: 18760
  Gene Name: tumor protein p53 inducible nuclear protein 2
  Uniprot ID: Q8IXH6
  ENST ID: ENST00000374810
  CDS Start-End: 390-1052
acaatcagctgtttgaacgttccaatttgtgccgtgagccccgccgcagcggccgcacagactcaaagccccgcgggcgagctcagcagcccggagcgaccgcggccccgccgcctcccccgcgagtcccggcgatgcggcccggcctgtgagcggccggcgaccctgggacgccccgccgcacaactacctcaacgccgtgccgcccccctcccgcccccagggaatctctggagattggttcaccttttgtggtcctgaccccttctgtcctcactgtaccttgaagtcctagagtccaataaaatcgctgcctcccagctgtttggatcacagagaggtttttgcactgccatagggcgcccccgtgaggcgcttcgccccccaccatgttccagcgcctctccagcctcttcttcagcaccccctcgccccccgaagaccccgactgcccccgcgccttcgtgtcggaggaggatgaagtggacggctggctcatcattgacctgccggacagctacgcggctccacccagccccggggccgcccctgcccccgcgggccgccctccgcccgcgccctccttgatggacgagagctggtttgttacccctcccgcctgttttacggcagaggggcctggactcggtcccgcccgcctccagagcagtcccctggaggacctcctcatcgagcaccccagcatgtccgtttacgtcaccggcagcaccatagtgctagagcccgggtccccttccccgctcccggacgcggccctgcctgacggcgacctcagcgaaggggaattgacgcccgcccgccgcgagccgcgggccgcgcgccacgccgctcctctcccagcgcgggcggcgctgctggagaaggcgggccaggtgcggcggctgcagcgggcccggcagcgggcagagcgccacgcgctgagcgccaaggcggtgcagcggcagaaccgagcccgcgagagccgtccgcgccggtccaagaaccagagcagcttcatctaccagccgtgccagcgccagttcaactactgagcgtccaccggccgcgccacgaaccccttgccgatcccgatccctgtcgggctcctccgactcctcgggctggacaccgaaacctcccttcttaaagcgtgtgaggttgggtgatagccgttccttccccgacaccctcaatttccccatctctgatcctctaatctgcctctgaacccattcacccttcaccctcactcctggtccccatacccagcatctaatcatccatgccccctactcctggcccctccatcctttcttctctggtccccatccctgtctctccctttcacccttgccctccagtcctctacctctggcctgcccctatttctgaaagcttcttccagtccctgatctggctcattccccaccttcaactcccaccttacatgtctcacactatcccatggttggcattacactcactcctgttcccttattcttcattcccagtaattccctaccaaatggtggggaccctgagcccagctctgaccaggtagagcctgtgcagcctgggctgctgtcattgccctccagtaagggctcagggttttgcttttagtctccccttccttctgccttgggggcggtactctgtggagctgcttaggcctggaaaggtacagtatgtagaagaggactgtgagacgtgagttagagggagaagatggagggaatctagggaacgaggcagcctattggagatgcggacaggacagacacgttgagaagctgcagggagcagggcaccaagggagtgtgcactgtgcttgctcagagaggccaaaccctgctcccaggctgaagcctggagtctgcccccacttcccttttctataatccacccttctgcaggccctgaaatctgaagggcttagttagtaccttgccactctacccccaacacgtcacccgagtagaagctgggcaaggccctaccatcctggccgtctgttcacaagcccaaggtgctagaactagcttaggagacatgcaggccacagggcttctaggcagggaaagggcacacaccctaggtcagcgtgcagagcagtgatgctggaggacacaccatggggtgaagccatcccaaggctgacagctcagtcttcaccttgcctctggccttgtatttcacaccctgctcagtatggctagccagcagtcctgagtaggagtccaggactcccactgtctcaatctgcaaattgttcctatccaggttcagggccttcagggggcctcttttcattttctcccacaggcctctctttctttctaggttgctggggagaaatgggtaccctatgatccccctccccttctcctccagtaaatacctggaagagggaacctgaatccctgggggagacagaaggggcaggggccaccagcctccccttcttgtggtgagactgaattttgggctcagacaccagcaacagcctcttgggatgccctgagttgcttcccatttcctctttctagccgtccttttctagtgtgtgctcactcttcctaggaacttttaagacttcttggtacctatgaacataggtcctcccctcaccccaactctaggtttccaggcctcacagccaagctgaagcttggagaaaactctgcattcccatgagggcaaaggcagctgccctccctgaccctatagccccaggcctcatggggggtatgtggggaagggatggggtatccccatggatgctgggatgaggacagaggaagacctgatggggtctcctattccagggaataagccaaattaacactaaaaacggatcaaagctcccacgccagtccactagggccccagtagttgacagccttgctcctctcccaagttctccttcagaacctagttgcttttattcttccagctaccacttgggcacttcacagccagcctagggtcttcggcacctccaagagctgaatctccctccaacccttcttgcctactcctcactgccagctgggacctaggctcagtcctgtgtggtgcccatgatccttctggtgggggaagagtttaagttatagggcatttggctcaaattttaaaaggccttttgtttacctatatttctggaggctcctgtattctagaacccaatctctcacctgcttggttgcaaggctcatatttttttgtacctttcctatagattctgtagcatttgagtgtggcaatattttaattgtgtatagatttctaagaaccaacactactcagtctcctgctagtctgactcctgaagcatcagcccttgtcatactgtattgactgtgtacgtgcctttcaccttgagcatgcttcaggatttttttttaaaccacagaacttgaatacatgagggaaccagagttcaaagtcctatgcaaccttaggagggggttagagagtctgttttgattgatgttttctgaggccctagaggagtttgtatcaatttgtgagtattaatgtcagtactaccagcactttgccaaaactgtcagagggacccgtttctagagtgagtcccagttacatcaaacagtgacttccagttattccccagtaagtctgagtggttccttcaagctgggtgtctttccagcctttgccagtctagccccagcagggcaccgtgtatgaatgcagtttggtgctgttttagagtatgcctgctccccagccccctgcctggaaccctctgagcaacttgctctgacctataatgtcttaggtgcaacacggaccccaccagagctcttggatacccccctagatccatgtggctttatgtgaggggactgaatgcagacacaccatagcccccttctactactttccctctcgccctgccacctagttccacatggaaccaacaagttgagtgcatccctgttgggtgttttgtgttgagactggctgaaatgaggagactttgaccatgtgacgtgtcaacagactcaaggagacaaccacctcaactgggtcatgtggcatgcctgtgtatgtgtgtaacagaattctgattgttagactgtaatgctattcctctatgggagaaaaaaattaatataaagaaaaacaaataaaaatatatttaaagcacatga

SEQ ID NO: 196474 - DNA, 477 bp, Homo sapiens
  Payload ID: 18760
  Gene Name: tumor protein p53 inducible nuclear protein 2
  ENST ID: ENST00000451665
  CDS Start-End: 213-477
actcaaagccccgcgggcgagctcagcagcccggagcgaccgcggccccgccgcctcccccgcgagtcccggcgatgcggcccggcctgtgagcggccggcgaccctgggacgccccgccgcacaactacctcaacgccgtgccgcccccctcccgcccccaggtttttgcactgccatagggcgcccccgtgaggcgcttcgccccccaccatgttccagcgcctctccagcctcttcttcagcaccccctcgccccccgaagaccccgactgcccccgcgccttcgtgtcggaggaggatgaagtggacggctggctcatcattgacctgccggaggggcctggactcggtcccgcccgcctccagagcagtcccctggaggacctcctcatcgagcaccccagcatgtccgtttacgtcaccggcagcaccatagtgctagagcccgggtccccttccccgctcccggacgcgg

SEQ ID NO: 196475 - DNA, 442 bp, Homo sapiens
  Payload ID: 18760
  Gene Name: tumor protein p53 inducible nuclear protein 2
  ENST ID: ENST00000414082
  CDS Start-End: 211-442
tcctcccgtgacccggtagccgctgtgtcggggctgggccctggggaatctctggagattggttcaccttttgtggtcctgaccccttctgtcctcactgtaccttgaagtcctagagtccaataaaatcgctgcctcccagctgtttggatcacagagaggtttttgcactgccatagggcgcccccgtgaggcgcttcgccccccaccatgttccagcgcctctccagcctcttcttcagcaccccctcgccccccgaagaccccgactgcccccgcgccttcgtgtcggaggaggatgaagtggacggctggctcatcattgacctgccggacagctacgcggctccacccagccccggggccgcccctgcccccgcgggccgccctccgcccgcgccctccttgatggacgagagctggtttgttacccctcccgcct

SEQ ID NO: 196476 - DNA, 3683 bp, Homo sapiens
  Payload ID: 18761
  Gene Name: tumor protein p53 inducible protein 11
  Uniprot ID: O14683
  ENST ID: ENST00000308212
  CDS Start-End: 578-1147
attacacacttgggtatcaccgccagccaaagcagtcccttccatttcaggcaccggcctgggcccgggagacaccgcaaggctatttaagatggtgtggtttgcccatctacgttgatcgtcccaagaaaggggcaccgtctgcagaacttgccaggaaagtcatcctgggcggcgcgggccacgccagggtctccccgcgcggcttcctcccccggcgccttctctcgggcgcgcgtgcgccccctgcaggcggcccccgggagagcctcgcgggggagccgggagcctggtttccccgccaacccccatcccgcccgccccggcggccaccctgggggcgaggcagcccggcgcgtgggaggggacggcgcgccattggcttgtgcgcggaaccgagaggagggaccagcgcgggccgccagactcgggcagctgtgattagagaagccagggccaccccggagccagcctctgaggcttcacctcaccccgtttacactgctgtctcctctgcatagatttggctgactgaggacgcgacagcccttctgcagaggccgggctggaggagaagatggcggccaagcagcccccgcctctgatgaagaagcacagccagacggacctcgtgagccgcctgaagacccgcaagatcctcggcgtgggcggggaggatgacgacggggaggtgcatcgctccaagatcagccaggtcttaggcaatgaaatcaagtttaccattcgggagcctttggggctcagggtctggcagttcgtctctgctgtgctcttctccggcattgccatcatggcgcttgccttccctgaccagctctatgatgcggtctttgatggagcccaggtgaccagcaagacccccatccgcctctacggcggtgccctcctcagcatctccctgatcatgtggaacgctctctacacggctgagaaggtcatcattcgatggaccctgctcaccgaagcttgctatttcggggtccagttcttggtggtcactgccacgctagctgagacgggcctcatgtccctggggatcctgctgctcctggtcagccgcctcctttttgtcgtcatcagcatttactactattaccaagtcggccgaagacccaagaaggcctagttgcccgctgggcctggggccctgcccatgcctgggccagagtggcgctggggcctcggcttccctttggctcctggaaggcaggagggtcccctgccctgccccagtcctgccccagggaggcagggggtggggggccttcctttcctcctgggcaccccgtgtgctgtgatctcctgggctttcaggcttgacatgctggtctggggagagacagggcctctgctgccctgttcttcaccctcacagtgatacctcctttccttgggtctcttggcctccagaccccctcaatagacactgactaaagtcaggctggagtcatgagggtagtgggctaagtcgagggtccagcctcttctgccaggaagcccttcttgcttttgagagaggctgtgaccaccccccatccttctccctacactcccagccaacctagtgcccaagcagctaaacttggcttccttctaatcctggaaaaccctgtacccctcctcctcaatctggccctctccacatgcacaccctgaaaacacacacagacacacaacacacacacatacacacccctgaacacacacacagacacacatacacccatgatgtgagcaaacacacacacgtgcgccttcatagcccagccaagggcatgcaggcagggtgtgctgcctgagatggcacctccctttcagccattcttcaagaatgggccacacacagctagaagtcctctcccagctagaagtcctgtccccactctcctggcctgacaagatgagctctcctgggaccttgctctagggcactctgcctctaccctaggacactggaatgccctgggagccccctccctgcaaccagcctgagttcagccccacggacaaagggacacacagcccccaatggagaccattgtaagtggtggggctgggagaggaggaacagaaggaaagccatagcgctctcttgccccttggcatgtaccccaaggcctgatggccactgggctcagcctgtcccccactcctgcctgcttcccggtgagctgccccccacacgtgcagcccgggctgcctccagggtctggctgagtgggatcaggtggccctccaactcagcacaggaaataagtagaaacatttcagcaggccacctcccctcatcttccccgccctgtccagcgccctggcaaaggctgacaactggctgtcttggggccgaacagcccctgccctgcctctgagggcccaccagcctgtgctgcatacccaccgcccagcttctccctgagggcccaccagcctgtgctgcatacccaccgcccagcttctccctgagggcccaccagcctgtgctgtacaccccgttagtccctgatcccaaccttctccctcctgccagcacaccgatgcacacaccggaagtggcgagcccaagccctggggacaggtgtagggagaaaagcagccccaggcctcagactcgcttcccatcctggcatagagtgggggatggctggagggtgtctataggtacagcccgctctggctgctgccaggtgggcccctgccaggggtcctcacccctgtccaccctgtgcctggctgtccctgcacccagatacagcaacatggcctgtacccagcagagtggtggcaccaccatggttacagcggatgccccgagactctgcttggtaaacgtggcagagcagaatgggaggctggaccctgaggaagggcccctctcctggcatctgtctcttgctacctaagcctgtgcctctccctaaagagctgcctccctgctgccgagccctggtctggccacgagccaccactgcctcccgctgctgcccacaggtggtgccgccaatgggcagtgccctcaggccgaagcctcaatcccccatctgagccaggcctaatcctctaatagtgatggttggtttgtcctcccataactgcaggtggattccacctggggaatgaggctgcgtgtcgggcgtctgctggccctgagacatccagtcttccacactcaactgtgggatgggagggtggcgtggccttaccccatgaggctgtccaggctctggcacacagctgtgctcacaaaatactgggtggcttggttagagctaattgtagtggagcctgcaggtgagggtgagggagggggctgcaggtcaggtaagatctggaagacagacgtacagcttggagggcagggggactctaaggcaaggagatttacagttgggaaggaggcagtggcagaggggtgagggacaggggcccttaagtccagcgaggaaagctcggtgtgggcccgctctacgctccgtttggggtgacctggaacgcctcttctcccagctccctccagccatcagcagcctcttgtcaagcttctgcctcgccccagtctatccccaaccccaaatcaagaccacctttcttcacggtcactatttattctttgttcctttttctttttgtaagaaacattcacaaaaaccagtgcaaaaccatca

SEQ ID NO: 196477 - DNA, 1954 bp, Homo sapiens
  Payload ID: 18761
  Gene Name: tumor protein p53 inducible protein 11
  ENST ID: ENST00000354556
  CDS Start-End: 445-1155
caccgccagccaaagcagtcccttccatttcaggcaccggcctgggcccgggagacaccgcaaggctatttaagatggtgtggtttgcccatctacgttgatcgtcccaagaaaggggcaccgtctgcagaacttgccaggaaagtcatcctgggcggcgcgggccacgccagggtctccccgcgcggcttcctcccccggcgccttctctcgggcgcgcgtgcgccccctgcaggcggcccccgggagagcctcgcgggggagccgggagcctggtttccccgccaacccccatcccgcccgccccggcggccaccctgggggcgaggcagcccggcgcgtgggaggggacggcgcgccattggcttgtgcgcggaaccgagaggagggaccagcgcgggccgccagactcgcccttctgcagaggccgggctggaggagaagatggcggccaagcagcccccgcctctgatgaagaagcacagccagacggacctcgtgagccgcctgaagacccgcaagatcctcggcgtgggcggggaggatgacgacggggaggtgcatcgctccaagatcagccaggtcttaggcaatgaaatcaagtttaccattcgggagcctttggggctcagggtctggcagttcgtctctgctgtgctcttctccggcattgccatcatggcgcttgccttccctgaccagctctatgatgcggtctttgatggagcccaggtgaccagcaagacccccatccgcctctacggcggtgccctcctcaaggtggaaactgagtcagacagaggcgaggtgacttgtctgaggtcacagctagtgagtggtgaagccaagattggaacccaggcaatccagcttggaaggacaaaggatggggtctctgaaacatctccagcctcagccctgctcctggccttctctctcatccagacatggctgcagcctctgggctgggactggcctccctacctccccttcaatccagtgcttccctgctgccagaaggagctttccagaaagcacatgtcaccacagccctctcttgctggaacccaacctctacaggagaccaagctgcctcctacagaccacaggacctccaagactcaccatcgccacctcttgttattcctgccctgactttcctatcaccaccatcaaaggagagtcccccagagattacatctcatggcccgggcttgcggagtgctgggctcccagacaaatgcaatcaaaggagacatgtctcctgggaagagcctcccacaacctcaaagccccgaaagccctccgtgtttatgttcttgcttgatccccacaaccgtccagcaaagccagcacagcagagatgattctatttccccaggagtggtgcccagagaagttaagcagtttgcctgagatgacacagccgtgttggagccgtgcttgcttgggatgaactaagtggcgcgcatttgattttactgctgatttcacagctccttcagctaccccaagctgccatcaatgtcccatcaatttcactttgtctgctcctctctgcaatgagctttctcagctctcagcctgtgttcagtaaagagacgttgctggtcttgtgtcacgtctcctcctgcctgaataatgctcgtgtgcagcatgaaggagaggtctctcagaactcaagggcctgaagctcccagaagcttccagatccagaggcaacaggtgtcttccggtcccagggagggcaagtttcctgaacctcgaaggcaggcagacagtggaggcctcccttccttctcacagcatcctccagctccaaggcaggcttcccccaacccccagggcccaggaactgtcatcagagcagaaatcaagcccagtcccaggcctcaccccacagggcatctgccccattgatatttgcttggtaataaatactggagacagaggg

SEQ ID NO: 196478 - DNA, 3381 bp, Homo sapiens
  Payload ID: 18761
  Gene Name: tumor protein p53 inducible protein 11
  Uniprot ID: O14683
  ENST ID: ENST00000395648
  CDS Start-End: 276-845
agtccagccggcccggccctgccctgccctgccctgtcctgccctgccctgccctgccctgccctgcactgcccggcccggcacgggcggcgcgatgtgaggcgtccgagcccggagcctccgcctggcatcagctccacgtagcccagcgccggcacgcgcgaggcccgaagtgggaatgatggctccatttcacagatgaggaaaccgagactcagagcacaaggccacacagcaggaagagcccttctgcagaggccgggctggaggagaagatggcggccaagcagcccccgcctctgatgaagaagcacagccagacggacctcgtgagccgcctgaagacccgcaagatcctcggcgtgggcggggaggatgacgacggggaggtgcatcgctccaagatcagccaggtcttaggcaatgaaatcaagtttaccattcgggagcctttggggctcagggtctggcagttcgtctctgctgtgctcttctccggcattgccatcatggcgcttgccttccctgaccagctctatgatgcggtctttgatggagcccaggtgaccagcaagacccccatccgcctctacggcggtgccctcctcagcatctccctgatcatgtggaacgctctctacacggctgagaaggtcatcattcgatggaccctgctcaccgaagcttgctatttcggggtccagttcttggtggtcactgccacgctagctgagacgggcctcatgtccctggggatcctgctgctcctggtcagccgcctcctttttgtcgtcatcagcatttactactattaccaagtcggccgaagacccaagaaggcctagttgcccgctgggcctggggccctgcccatgcctgggccagagtggcgctggggcctcggcttccctttggctcctggaaggcaggagggtcccctgccctgccccagtcctgccccagggaggcagggggtggggggccttcctttcctcctgggcaccccgtgtgctgtgatctcctgggctttcaggcttgacatgctggtctggggagagacagggcctctgctgccctgttcttcaccctcacagtgatacctcctttccttgggtctcttggcctccagaccccctcaatagacactgactaaagtcaggctggagtcatgagggtagtgggctaagtcgagggtccagcctcttctgccaggaagcccttcttgcttttgagagaggctgtgaccaccccccatccttctccctacactcccagccaacctagtgcccaagcagctaaacttggcttccttctaatcctggaaaaccctgtacccctcctcctcaatctggccctctccacatgcacaccctgaaaacacacacagacacacaacacacacacatacacacccctgaacacacacacagacacacatacacccatgatgtgagcaaacacacacacgtgcgccttcatagcccagccaagggcatgcaggcagggtgtgctgcctgagatggcacctccctttcagccattcttcaagaatgggccacacacagctagaagtcctctcccagctagaagtcctgtccccactctcctggcctgacaagatgagctctcctgggaccttgctctagggcactctgcctctaccctaggacactggaatgccctgggagccccctccctgcaaccagcctgagttcagccccacggacaaagggacacacagcccccaatggagaccattgtaagtggtggggctgggagaggaggaacagaaggaaagccatagcgctctcttgccccttggcatgtaccccaaggcctgatggccactgggctcagcctgtcccccactcctgcctgcttcccggtgagctgccccccacacgtgcagcccgggctgcctccagggtctggctgagtgggatcaggtggccctccaactcagcacaggaaataagtagaaacatttcagcaggccacctcccctcatcttccccgccctgtccagcgccctggcaaaggctgacaactggctgtcttggggccgaacagcccctgccctgcctctgagggcccaccagcctgtgctgcatacccaccgcccagcttctccctgagggcccaccagcctgtgctgcatacccaccgcccagcttctccctgagggcccaccagcctgtgctgtacaccccgttagtccctgatcccaaccttctccctcctgccagcacaccgatgcacacaccggaagtggcgagcccaagccctggggacaggtgtagggagaaaagcagccccaggcctcagactcgcttcccatcctggcatagagtgggggatggctggagggtgtctataggtacagcccgctctggctgctgccaggtgggcccctgccaggggtcctcacccctgtccaccctgtgcctggctgtccctgcacccagatacagcaacatggcctgtacccagcagagtggtggcaccaccatggttacagcggatgccccgagactctgcttggtaaacgtggcagagcagaatgggaggctggaccctgaggaagggcccctctcctggcatctgtctcttgctacctaagcctgtgcctctccctaaagagctgcctccctgctgccgagccctggtctggccacgagccaccactgcctcccgctgctgcccacaggtggtgccgccaatgggcagtgccctcaggccgaagcctcaatcccccatctgagccaggcctaatcctctaatagtgatggttggtttgtcctcccataactgcaggtggattccacctggggaatgaggctgcgtgtcgggcgtctgctggccctgagacatccagtcttccacactcaactgtgggatgggagggtggcgtggccttaccccatgaggctgtccaggctctggcacacagctgtgctcacaaaatactgggtggcttggttagagctaattgtagtggagcctgcaggtgagggtgagggagggggctgcaggtcaggtaagatctggaagacagacgtacagcttggagggcagggggactctaaggcaaggagatttacagttgggaaggaggcagtggcagaggggtgagggacaggggcccttaagtccagcgaggaaagctcggtgtgggcccgctctacgctccgtttggggtgacctggaacgcctcttctcccagctccctccagccatcagcagcctcttgtcaagcttctgcctcgccccagtctatccccaaccccaaatcaagaccacctttcttcacggtcactatttattctttgttcctttttctttttgtaagaaacattcacaaaaaccagtgcaaaaccatca

SEQ ID NO: 196479 - DNA, 533 bp, Homo sapiens
  Payload ID: 18761
  Gene Name: tumor protein p53 inducible protein 11
  ENST ID: ENST00000527685
  CDS Start-End: 314-533
agagcctcgcgggggagccgggagcctggtttccccgccaacccccatcccgcccgccccggcggccaccctgggggcgaggcagcccggcgcgtgggaggggacggcgcgccattggcttgtgcgcggaaccgagaggagggaccagcgcgggccgccagactcgggcagctgtgattagagaagccagggccaccccggagccagcctctgaggcttcacctcaccccgtttacactgctgtctcctctgcatagatttggctgactgaggacgcgacagcccttctgcagaggccgggctggaggagaagatggcggccaagcagcccccgcctctgatgaagaagcacagccagacggacctcgtgagccgcctgaagacccgcaagatcctcggcgtgggcggggaggatgacgacggggaggtgcatcgctccaagatcagccaggtcttaggcaatgaaatcaagtttaccattcgggagcctttggggctcagggtctggcagttcgtctctgctgtgctcttct

SEQ ID NO: 196480 - DNA, 602 bp, Homo sapiens
  Payload ID: 18761
  Gene Name: tumor protein p53 inducible protein 11
  ENST ID: ENST00000530035
  CDS Start-End: 366-602
cgcgggccgccagactcggtaagccccggccgcgcagggcgccgcgcgcagtccagccggcccggccctgccctgccctgccctgtcctgccctgccctgccctgccctgccctgcactgcccggcccggcacgggcggcgcgatgtgaggcgtccgagcccggagcctccgcctggcatcagctccacgtagcccagcgccggcacgcgcgaggcccggcagctgtgattagagaagccagggccaccccggagccagcctctgaggcttcacctcaccccgtttacactgctgtctcctctgcatagatttggctgactgaggacgcgacagcccttctgcagaggccgggctggaggagaagatggcggccaagcagcccccgcctctgatgaagaagcacagccagacggacctcgtgagccgcctgaagacccgcaagatcctcggcgtgggcggggaggatgacgacggggaggtgcatcgctccaagatcagccaggtcttaggcaatgaaatcaagtttaccattcgggagcctttggggctcagggtctggcagttcgtctctgctgtgctcttctccggcattgccatcatg

SEQ ID NO: 196481 - DNA, 571 bp, Homo sapiens
  Payload ID: 18761
  Gene Name: tumor protein p53 inducible protein 11
  ENST ID: ENST00000533937
  CDS Start-End: 384-571
attgttcccggcaggaggagtgcgcggcgcaaacttgcgagttcccccagtctttgcccccgcagggccgcggacggaggtggtggcggagttcccgctgcccacaagtctggcccgaccttctggggtgggggcctgggggcaggggccctgggccggagaacccggggccgcctaacggctcggagctcaccgccgggggacaccggcgctgaggcctgggtctcagaaagtggggcagctgtgattagagaagccagggccaccccggagccagcctctgaggcttcacctcaccccgtttacactgctgtctcctctgcatagatttggctgactgaggacgcgacagcccttctgcagaggccgggctggaggagaagatggcggccaagcagcccccgcctctgatgaagaagcacagccagacggacctcgtgagccgcctgaagacccgcaagatcctcggcgtgggcggggaggatgacgacggggaggtgcatcgctccaagatcagccaggtcttaggcaatgaaatcaagtttaccattcgggagcctttggggctcag

SEQ ID NO: 196482 - DNA, 658 bp, Homo sapiens
  Payload ID: 18761
  Gene Name: tumor protein p53 inducible protein 11
  ENST ID: ENST00000528473
  CDS Start-End: 185-658
gatgtgaggcgtccgagcccggagcctccgcctggcatcagctccacgtagcccagcgccggcacgcgcgaggcccatttggctgactgaggacgcgacaggtactcagcttctttctgcatctcagttgcccagcacaggggctggcacgcacccttctgcagaggccgggctggaggagaagatggcggccaagcagcccccgcctctgatgaagaagcacagccagacggacctcgtgagccgcctgaagacccgcaagatcctcggcgtgggcggggaggatgacgacggggaggtgcatcgctccaagatcagccaggtcttaggcaatgaaatcaagtttaccattcgggagcctttggggctcagggtctggcagttcgtctctgctgtgctcttctccggcattgccatcatggcgcttgccttccctgaccagctctatgatgcggtctttgatggagcccaggtgaccagcaagacccccatccgcctctacggcggtgccctcctcagcatctccctgatcatgtggaacgctctctacacggctgagaaggtcatcattcgatggaccctgctcaccgaagcttgctatttcggggtccagttcttggtggtcactgccacgctagctgagacgggcctcatgtcc

SEQ ID NO: 196483 - DNA, 2647 bp, Homo sapiens
  Payload ID: 18761
  Gene Name: tumor protein p53 inducible protein 11
  Uniprot ID: O14683
  ENST ID: ENST00000525680
  CDS Start-End: 230-799
aagccccggccgcgcagggcgccgcgcgcagtccagccggcccggccctgccctgccctgccctgtcctgccctgccctgccctgccctgccctgcactgcccggcccggcacgggcggcgcgatgtgaggcgtccgagcccggagcctccgcctggcatcagctccacgtagcccagcgccggcacgcgcgaggccccccttctgcagaggccgggctggaggagaagatggcggccaagcagcccccgcctctgatgaagaagcacagccagacggacctcgtgagccgcctgaagacccgcaagatcctcggcgtgggcggggaggatgacgacggggaggtgcatcgctccaagatcagccaggtcttaggcaatgaaatcaagtttaccattcgggagcctttggggctcagggtctggcagttcgtctctgctgtgctcttctccggcattgccatcatggcgcttgccttccctgaccagctctatgatgcggtctttgatggagcccaggtgaccagcaagacccccatccgcctctacggcggtgccctcctcagcatctccctgatcatgtggaacgctctctacacggctgagaaggtcatcattcgatggaccctgctcaccgaagcttgctatttcggggtccagttcttggtggtcactgccacgctagctgagacgggcctcatgtccctggggatcctgctgctcctggtcagccgcctcctttttgtcgtcatcagcatttactactattaccaagtcggccgaagacccaagaaggcctagttgcccgctgggcctggggccctgcccatgcctgggccagagtggcgctggggcctcggcttccctttggctcctggaaggcaggagggtcccctgccctgccccagtcctgccccagggaggcagggggtggggggccttcctttcctcctgggcaccccgtgtgctgtgatctcctgggctttcaggcttgacatgctggtctggggagagacagggcctctgctgccctgttcttcaccctcacagtgatacctcctttccttgggtctcttggcctccagaccccctcaatagacactgactaaagtcaggctggagtcatgagggtagtgggctaagtcgagggtccagcctcttctgccaggaagcccttcttgcttttgagagaggctgtgaccaccccccatccttctccctacactcccagccaacctagtgcccaagcagctaaacttggcttccttctaatcctggaaaaccctgtacccctcctcctcaatctggccctctccacatgcacaccctgaaaacacacacagacacacaacacacacacatacacacccctgaacacacacacagacacacatacacccatgatgtgagcaaacacacacacgtgcgccttcatagcccagccaagggcatgcaggcagggtgtgctgcctgagatggcacctccctttcagccattcttcaagaatgggccacacacagctagaagtcctctcccagctagaagtcctgtccccactctcctggcctgacaagatgagctctcctgggaccttgctctagggcactctgcctctaccctaggacactggaatgccctgggagccccctccctgcaaccagcctgagttcagccccacggacaaagggacacacagcccccaatggagaccattgtaagtggtggggctgggagaggaggaacagaaggaaagccatagcgctctcttgccccttggcatgtaccccaaggcctgatggccactgggctcagcctgtcccccactcctgcctgcttcccggtgagctgccccccacacgtgcagcccgggctgcctccagggtctggctgagtgggatcaggtggccctccaactcagcacaggaaataagtagaaacatttcagcaggccacctcccctcatcttccccgccctgtccagcgccctggcaaaggctgacaactggctgtcttggggccgaacagcccctgccctgcctctgagggcccaccagcctgtgctgcatacccaccgcccagcttctccctgagggcccaccagcctgtgctgcatacccaccgcccagcttctccctgagggcccaccagcctgtgctgtacaccccgttagtccctgatcccaaccttctccctcctgccagcacaccgatgcacacaccggaagtggcgagcccaagccctggggacaggtgtagggagaaaagcagccccaggcctcagactcgcttcccatcctggcatagagtgggggatggctggagggtgtctataggtacagcccgctctggctgctgccaggtgggcccctgccaggggtcctcacccctgtccaccctgtgcctggctgtccctgcacccagatacagcaacatggcctgtacccagcagagtggtggcaccaccatggttacagcggatgccccgagactctgcttggtaaacgtggcagagcagaatgggaggctggaccctgaggaagggcccctctcctggcatctgtctcttgctacctaagcctgtgcctctccctaaagagctgcctccctgctgccgagccctggtctggccacgagccaccactgcctccc

SEQ ID NO: 196484 - DNA, 556 bp, Homo sapiens
  Payload ID: 18761
  Gene Name: tumor protein p53 inducible protein 11
  ENST ID: ENST00000525683
  CDS Start-End: 263-556
gtgcactccttctttctctctccaccagcacgtctgcgaggaagtgggaatgatggctccatttcacagatgaggaaaccgagactcagagcacaaggccacacagcaggaagagggcagctgtgattagagaagccagggccaccccggagccagcctctgaggcttcacctcaccccgtttacactgctgtctcctctgcatagatttggctgactgaggacgcgacagcccttctgcagaggccgggctggaggagaagatggcggccaagcagcccccgcctctgatgaagaagcacagccagacggacctcgtgagccgcctgaagacccgcaagatcctcggcgtgggcggggaggatgacgacggggaggtgcatcgctccaagatcagccaggtcttaggcaatgaaatcaagtttaccattcgggagcctttggggctcagggtctggcagttcgtctctgctgtgctcttctccggcattgccatcatggcgcttgccttccctgaccagctctatgatgcggtctttgatggagcccaggtgacc

SEQ ID NO: 196485 - DNA, 499 bp, Homo sapiens
  Payload ID: 18761
  Gene Name: tumor protein p53 inducible protein 11
  ENST ID: ENST00000525138
  CDS Start-End: 129-499
cccatgtgaatgaccgtcgagacaggaaaaacctcccagtgacttctgagcggtgatggaggccatcagagggcctgatccccttgcccacagcagcagcttcagacccccgggggaggagcccaggaatgcctccttcttgccacctgctctgccctgacctctcgccctcttcagcacacccttctgcagaggccgggctggaggagaagatggcggccaagcagcccccgcctctgatgaagaagcacagccagacggacctcgtgagccgcctgaagacccgcaagatcctcggcgtgggcggggaggatgacgacggggaggtgcatcgctccaagatcagccaggtcttaggcaatgaaatcaagtttaccattcgggagcctttggggctcagggtctggcagttcgtctctgctgtgctcttctccggcattgccatcatggcgcttgccttccctgaccagctctatgatgcggtctttgatggagccca

SEQ ID NO: 196486 - DNA, 720 bp, Homo sapiens
  Payload ID: 18761
  Gene Name: tumor protein p53 inducible protein 11
  ENST ID: ENST00000525145
  CDS Start-End: 193-573
cggcccggccctgccctgccctgccctgtcctgccctgccctgccctgccctgccctgcactgcccggcccggcacgggcggcgcgatgtgaggcgtccgagcccggagcctccgcctggcatcagctccacgtagcccagcgccggcacgcgcgaggccccccttctgcagaggccgggctggaggagaagatggcggccaagcagcccccgcctctgatgaagaagcacagccagacggacctcgtgagccgcctgaagacccgcaagatcctcggcgtgggcggggaggatgacgacggggaggtgcatcgctccaagatcagccaggtcttaggcaatgaaatcaagtttaccattcgggagcctttggggctcagggtctggcagttcgtctctgctgtgctcttctccggcattgccatcatggtgagcccccacccccagcccctgagatctggccccgtgtggctccctcagcccttctctggctcaccagaggtgcctcctccatcctggcccctcgtgcaggggcccatctgtcaggctctggggctgcctccgagaacctgactcctacactgccacgcctgtgccttctccaggagcacactagatcccatggcgcttgccttccctgaccagctctatgatgcggtctttgatggagcccaggtgaccagcaagacccccatccgcctctacggcggtgccctcctc

SEQ ID NO: 196487 - DNA, 3703 bp, Homo sapiens
  Payload ID: 18761
  Gene Name: tumor protein p53 inducible protein 11
  Uniprot ID: O14683
  ENST ID: ENST00000533940
  CDS Start-End: 606-1175
agtctttgcccccgcagggccgcggacggaggtggtggcggagttcccgctgcccacaagtctggcccgaccttctggggtgggggcctgggggcaggggccctgggccggagaacccggggccgcctaacggctcggagctcaccgccgggggacaccggcgctgaggcctgggtctcagaaagtgggaagtgggaatgatggctccatttcacagatgaggaaaccgagactcagagcacaaggccacacagcaggaagagagaaatgaaaacttacggtcccacagaaacgcgggtttgtagcagctctattcataatcatcaacaactggaaacaacccacatggccttcagtgaccgaatggataaacaagctgttacacgtaccccagggaatactgctctccaataaaaaggagcggactcttgatacacacagtgacttggaggaatctcaaaggcattctgctcaatgacaggagccagcctcaaaagatttggctgactgaggacgcgacaggtactcagcttctttctgcatctcagttgcccagcacaggggctggcacgcacccttctgcagaggccgggctggaggagaagatggcggccaagcagcccccgcctctgatgaagaagcacagccagacggacctcgtgagccgcctgaagacccgcaagatcctcggcgtgggcggggaggatgacgacggggaggtgcatcgctccaagatcagccaggtcttaggcaatgaaatcaagtttaccattcgggagcctttggggctcagggtctggcagttcgtctctgctgtgctcttctccggcattgccatcatggcgcttgccttccctgaccagctctatgatgcggtctttgatggagcccaggtgaccagcaagacccccatccgcctctacggcggtgccctcctcagcatctccctgatcatgtggaacgctctctacacggctgagaaggtcatcattcgatggaccctgctcaccgaagcttgctatttcggggtccagttcttggtggtcactgccacgctagctgagacgggcctcatgtccctggggatcctgctgctcctggtcagccgcctcctttttgtcgtcatcagcatttactactattaccaagtcggccgaagacccaagaaggcctagttgcccgctgggcctggggccctgcccatgcctgggccagagtggcgctggggcctcggcttccctttggctcctggaaggcaggagggtcccctgccctgccccagtcctgccccagggaggcagggggtggggggccttcctttcctcctgggcaccccgtgtgctgtgatctcctgggctttcaggcttgacatgctggtctggggagagacagggcctctgctgccctgttcttcaccctcacagtgatacctcctttccttgggtctcttggcctccagaccccctcaatagacactgactaaagtcaggctggagtcatgagggtagtgggctaagtcgagggtccagcctcttctgccaggaagcccttcttgcttttgagagaggctgtgaccaccccccatccttctccctacactcccagccaacctagtgcccaagcagctaaacttggcttccttctaatcctggaaaaccctgtacccctcctcctcaatctggccctctccacatgcacaccctgaaaacacacacagacacacaacacacacacatacacacccctgaacacacacacagacacacatacacccatgatgtgagcaaacacacacacgtgcgccttcatagcccagccaagggcatgcaggcagggtgtgctgcctgagatggcacctccctttcagccattcttcaagaatgggccacacacagctagaagtcctctcccagctagaagtcctgtccccactctcctggcctgacaagatgagctctcctgggaccttgctctagggcactctgcctctaccctaggacactggaatgccctgggagccccctccctgcaaccagcctgagttcagccccacggacaaagggacacacagcccccaatggagaccattgtaagtggtggggctgggagaggaggaacagaaggaaagccatagcgctctcttgccccttggcatgtaccccaaggcctgatggccactgggctcagcctgtcccccactcctgcctgcttcccggtgagctgccccccacacgtgcagcccgggctgcctccagggtctggctgagtgggatcaggtggccctccaactcagcacaggaaataagtagaaacatttcagcaggccacctcccctcatcttccccgccctgtccagcgccctggcaaaggctgacaactggctgtcttggggccgaacagcccctgccctgcctctgagggcccaccagcctgtgctgcatacccaccgcccagcttctccctgagggcccaccagcctgtgctgcatacccaccgcccagcttctccctgagggcccaccagcctgtgctgtacaccccgttagtccctgatcccaaccttctccctcctgccagcacaccgatgcacacaccggaagtggcgagcccaagccctggggacaggtgtagggagaaaagcagccccaggcctcagactcgcttcccatcctggcatagagtgggggatggctggagggtgtctataggtacagcccgctctggctgctgccaggtgggcccctgccaggggtcctcacccctgtccaccctgtgcctggctgtccctgcacccagatacagcaacatggcctgtacccagcagagtggtggcaccaccatggttacagcggatgccccgagactctgcttggtaaacgtggcagagcagaatgggaggctggaccctgaggaagggcccctctcctggcatctgtctcttgctacctaagcctgtgcctctccctaaagagctgcctccctgctgccgagccctggtctggccacgagccaccactgcctcccgctgctgcccacaggtggtgccgccaatgggcagtgccctcaggccgaagcctcaatcccccatctgagccaggcctaatcctctaatagtgatggttggtttgtcctcccataactgcaggtggattccacctggggaatgaggctgcgtgtcgggcgtctgctggccctgagacatccagtcttccacactcaactgtgggatgggagggtggcgtggccttaccccatgaggctgtccaggctctggcacacagctgtgctcacaaaatactgggtggcttggttagagctaattgtagtggagcctgcaggtgagggtgagggagggggctgcaggtcaggtaagatctggaagacagacgtacagcttggagggcagggggactctaaggcaaggagatttacagttgggaaggaggcagtggcagaggggtgagggacaggggcccttaagtccagcgaggaaagctcggtgtgggcccgctctacgctccgtttggggtgacctggaacgcctcttctcccagctccctccagccatcagcagcctcttgtcaagcttctgcctcgccccagtctatccccaaccccaaatcaagaccacctttcttcacggtcactatttattctttgttcctttttctttttgtaagaaacattcacaaaaaccagtgcaa

SEQ ID NO: 196488 - DNA, 2045 bp, Homo sapiens
  Payload ID: 18761
  Gene Name: tumor protein p53 inducible protein 11
  ENST ID: ENST00000532253
  CDS Start-End: 134-328
actgcccggcccggcacgggcggcgcgatgtgaggcgtccgagcccggagcctccgcctggcatcagctccacgtagcccagcgccggcacgcgcgaggccccccttctgcagaggccgggctggaggagaagatggcggccaagcagcccccgcctctgatgaagaagcacagccagacggacctcgtgagccgcctgaagacccgcaagatcctcggcgtgggcggggaggatgacgacggggaggtgcatcgctccaagggtctggcagttcgtctctgctgtgctcttctccggcattgccatcatggcgcttgccttccctgaccagctctatgatgcggtctttgatggagcccaggtgaccagcaagacccccatccgcctctacggcggtgccctcctcagcatctccctgatcatgtggaacgctctctacacggctgagaaggtcatcattcgatggaccctgctcaccgaagcttgctatttcggggtccagttcttggtggtcactgccacgctagctgagacgggcctcatgtccctggggatcctgctgctcctggtcagccgcctcctttttgtcgtcatcagcatttactactattaccaagtcggccgaagacccaagaaggcctagttgcccgctgggcctggggccctgcccatgcctgggccagagtggcgctggggcctcggcttccctttggctcctggaaggcaggagggtcccctgccctgccccagtcctgccccagggaggcagggggtggggggccttcctttcctcctgggcaccccgtgtgctgtgatctcctgggctttcaggcttgacatgctggtctggggagagacagggcctctgctgccctgttcttcaccctcacagtgatacctcctttccttgggtctcttggcctccagaccccctcaatagacactgactaaagtcaggctggagtcatgagggtagtgggctaagtcgagggtccagcctcttctgccaggaagcccttcttgcttttgagagaggctgtgaccaccccccatccttctccctacactcccagccaacctagtgcccaagcagctaaacttggcttccttctaatcctggaaaaccctgtacccctcctcctcaatctggccctctccacatgcacaccctgaaaacacacacagacacacaacacacacacatacacacccctgaacacacacacagacacacatacacccatgatgtgagcaaacacacacacgtgcgccttcatagcccagccaagggcatgcaggcagggtgtgctgcctgagatggcacctccctttcagccattcttcaagaatgggccacacacagctagaagtcctctcccagctagaagtcctgtccccactctcctggcctgacaagatgagctctcctgggaccttgctctagggcactctgcctctaccctaggacactggaatgccctgggagccccctccctgcaaccagcctgagttcagccccacggacaaagggacacacagcccccaatggagaccattgtaagtggtggggctgggagaggaggaacagaaggaaagccatagcgctctcttgccccttggcatgtaccccaaggcctgatggccactgggctcagcctgtcccccactcctgcctgcttcccggtgagctgccccccacacgtgcagcccgggctgcctccagggtctggctgagtgggatcaggtggccctccaactcagcacaggaaataagtagaaacatttcagcaggccacctcccctcatcttccccgccctgtccagcgccctggcaaaggctgacaactggctgtcttggggccgaacagcccctgccctgcctctgagggcccaccagcctgtgctgcatacccaccgcccagcttctccctgagggcccaccagcctgtgctgcatacccaccgcccagcttctccctgagggcccaccagcctgtgctgtacaccccgttagtccctgatcccaaccttctccctcctgccag

SEQ ID NO: 196489 - DNA, 502 bp, Homo sapiens
  Payload ID: 18761
  Gene Name: tumor protein p53 inducible protein 11
  ENST ID: ENST00000528290
  CDS Start-End: 230-502
aagccccggccgcgcagggcgccgcgcgcagtccagccggcccggccctgccctgccctgccctgtcctgccctgccctgccctgccctgccctgcactgcccggcccggcacgggcggcgcgatgtgaggcgtccgagcccggagcctccgcctggcatcagctccacgtagcccagcgccggcacgcgcgaggccccccttctgcagaggccgggctggaggagaagatggcggccaagcagcccccgcctctgatgaagaagcacagccagacggacctcgtgagccgcctgaagacccgcaagatcctcggcgtgggcggggaggatgacgacggggaggtgcatcgctccaagggtctggcagttcgtctctgctgtgctcttctccggcattgccatcatggcatctccctgatcatgtggaacgctctctacacggctgagaaggtcatcattcgatggaccctgctcaccgaagcttgctatttcggggtccag

SEQ ID NO: 196490 - DNA, 642 bp, Homo sapiens
  Payload ID: 18761
  Gene Name: tumor protein p53 inducible protein 11
  ENST ID: ENST00000533443
  CDS Start-End: 363-642
agagtcgaaaaggacaggaattcttcatgttctgcccatgtgaatgaccgtcgagacaggaaaaacctcccagtgacttctgagcggtgatggaggccatcagagggcctgatccccttgcccacagcagcagcttcagacccccgggggaggagcccaggaatgcctccttcttgccacctgctctgccctgacctctcgccctcttcagcacaggcagctgtgattagagaagccagggccaccccggagccagcctctgaggcttcacctcaccccgtttacactgctgtctcctctgcatagatttggctgactgaggacgcgacagcccttctgcagaggccgggctggaggagaagatggcggccaagcagcccccgcctctgatgaagaagcacagccagacggacctcgtgagccgcctgaagacccgcaagatcctcggcgtgggcggggaggatgacgacggggaggtgcatcgctccaagatcagccaggtcttaggcaatgaaatcaagtttaccattcgggagcctttggggctcagggtctggcagttcgtctctgctgtgctcttctccggcattgccatcatggcgcttgccttccctgaccagctctatgatgcggtctttgatg

SEQ ID NO: 196491 - DNA, 1078 bp, Homo sapiens
  Payload ID: 18761
  Gene Name: tumor protein p53 inducible protein 11
  ENST ID: ENST00000531928
  CDS Start-End: 273-737
gccgcgcagggcgccgcgcgcagtccagccggcccggccctgccctgccctgccctgtcctgccctgccctgccctgccctgccctgcactgcccggcccggcacgggcggcgcgatgtgaggcgtccgagcccggagcctccgcctggcatcagctccacgtagcccagcgccggcacgcgcgaggcccggtctggaagctgggtaggaactgtggcctgaggccggtgtctcccctcagcccttctgcagaggccgggctggaggagaagatggcggccaagcagcccccgcctctgatgaagaagcacagccagacggacctcgtgagccgcctgaagacccgcaagatcctcggcgtgggcggggaggatgacgacggggaggtgcatcgctccaagatcagccaggtcttaggcaatgaaatcaagtttaccattcgggagcctttggggctcagggtctggcagttcgtctctgctgtgctcttctccggcattgccatcatggcgcttgccttccctgaccagctctatgatgcggtctttgatggagcccaggtgaccagcaagacccccatccgcctctacggcggtgccctcctcaatgctgcgcccacaccccggcctctgatgaagctctctgctggggatgtgctgccatcttgtggccattggtggaatacacccagtgggttggagcttgcagtcgccaccatctgcaaggagcgctcataagtgtgtgcactgcctctgggcgttgtggtacagagatggaggaagcccaggcccagcctctaggaattcacagcctagaggagaggcagatcaattcagtgtctgcaaaacccctcgcaccccccctattttatccccagagccacttctgtttgaaccacttctgtttcctctctaacctgagatgcacacgttaggatttggaattacaatttttaaagctcagcataggtaatatgcctctatttctacgaaatattctatggctccctattgcctacagaataaaggctgagctcctctggagttagggttgctggaataaaataaatgcacaccca

SEQ ID NO: 196492 - DNA, 3567 bp, Homo sapiens
  Payload ID: 18761
  Gene Name: tumor protein p53 inducible protein 11
  Uniprot ID: O14683
  ENST ID: ENST00000616990
  CDS Start-End: 462-1031
attacacacttgggtatcaccgccagccaaagcagtcccttccatttcaggcaccggcctgggcccgggagacaccgcaaggctatttaagatggtgtggtttgcccatctacgttgatcgtcccaagaaaggggcaccgtctgcagaacttgccaggaaagtcatcctgggcggcgcgggccacgccagggtctccccgcgcggcttcctcccccggcgccttctctcgggcgcgcgtgcgccccctgcaggcggcccccgggagagcctcgcgggggagccgggagcctggtttccccgccaacccccatcccgcccgccccggcggccaccctgggggcgaggcagcccggcgcgtgggaggggacggcgcgccattggcttgtgcgcggaaccgagaggagggaccagcgcgggccgccagactcgcccttctgcagaggccgggctggaggagaagatggcggccaagcagcccccgcctctgatgaagaagcacagccagacggacctcgtgagccgcctgaagacccgcaagatcctcggcgtgggcggggaggatgacgacggggaggtgcatcgctccaagatcagccaggtcttaggcaatgaaatcaagtttaccattcgggagcctttggggctcagggtctggcagttcgtctctgctgtgctcttctccggcattgccatcatggcgcttgccttccctgaccagctctatgatgcggtctttgatggagcccaggtgaccagcaagacccccatccgcctctacggcggtgccctcctcagcatctccctgatcatgtggaacgctctctacacggctgagaaggtcatcattcgatggaccctgctcaccgaagcttgctatttcggggtccagttcttggtggtcactgccacgctagctgagacgggcctcatgtccctggggatcctgctgctcctggtcagccgcctcctttttgtcgtcatcagcatttactactattaccaagtcggccgaagacccaagaaggcctagttgcccgctgggcctggggccctgcccatgcctgggccagagtggcgctggggcctcggcttccctttggctcctggaaggcaggagggtcccctgccctgccccagtcctgccccagggaggcagggggtggggggccttcctttcctcctgggcaccccgtgtgctgtgatctcctgggctttcaggcttgacatgctggtctggggagagacagggcctctgctgccctgttcttcaccctcacagtgatacctcctttccttgggtctcttggcctccagaccccctcaatagacactgactaaagtcaggctggagtcatgagggtagtgggctaagtcgagggtccagcctcttctgccaggaagcccttcttgcttttgagagaggctgtgaccaccccccatccttctccctacactcccagccaacctagtgcccaagcagctaaacttggcttccttctaatcctggaaaaccctgtacccctcctcctcaatctggccctctccacatgcacaccctgaaaacacacacagacacacaacacacacacatacacacccctgaacacacacacagacacacatacacccatgatgtgagcaaacacacacacgtgcgccttcatagcccagccaagggcatgcaggcagggtgtgctgcctgagatggcacctccctttcagccattcttcaagaatgggccacacacagctagaagtcctctcccagctagaagtcctgtccccactctcctggcctgacaagatgagctctcctgggaccttgctctagggcactctgcctctaccctaggacactggaatgccctgggagccccctccctgcaaccagcctgagttcagccccacggacaaagggacacacagcccccaatggagaccattgtaagtggtggggctgggagaggaggaacagaaggaaagccatagcgctctcttgccccttggcatgtaccccaaggcctgatggccactgggctcagcctgtcccccactcctgcctgcttcccggtgagctgccccccacacgtgcagcccgggctgcctccagggtctggctgagtgggatcaggtggccctccaactcagcacaggaaataagtagaaacatttcagcaggccacctcccctcatcttccccgccctgtccagcgccctggcaaaggctgacaactggctgtcttggggccgaacagcccctgccctgcctctgagggcccaccagcctgtgctgcatacccaccgcccagcttctccctgagggcccaccagcctgtgctgcatacccaccgcccagcttctccctgagggcccaccagcctgtgctgtacaccccgttagtccctgatcccaaccttctccctcctgccagcacaccgatgcacacaccggaagtggcgagcccaagccctggggacaggtgtagggagaaaagcagccccaggcctcagactcgcttcccatcctggcatagagtgggggatggctggagggtgtctataggtacagcccgctctggctgctgccaggtgggcccctgccaggggtcctcacccctgtccaccctgtgcctggctgtccctgcacccagatacagcaacatggcctgtacccagcagagtggtggcaccaccatggttacagcggatgccccgagactctgcttggtaaacgtggcagagcagaatgggaggctggaccctgaggaagggcccctctcctggcatctgtctcttgctacctaagcctgtgcctctccctaaagagctgcctccctgctgccgagccctggtctggccacgagccaccactgcctcccgctgctgcccacaggtggtgccgccaatgggcagtgccctcaggccgaagcctcaatcccccatctgagccaggcctaatcctctaatagtgatggttggtttgtcctcccataactgcaggtggattccacctggggaatgaggctgcgtgtcgggcgtctgctggccctgagacatccagtcttccacactcaactgtgggatgggagggtggcgtggccttaccccatgaggctgtccaggctctggcacacagctgtgctcacaaaatactgggtggcttggttagagctaattgtagtggagcctgcaggtgagggtgagggagggggctgcaggtcaggtaagatctggaagacagacgtacagcttggagggcagggggactctaaggcaaggagatttacagttgggaaggaggcagtggcagaggggtgagggacaggggcccttaagtccagcgaggaaagctcggtgtgggcccgctctacgctccgtttggggtgacctggaacgcctcttctcccagctccctccagccatcagcagcctcttgtcaagcttctgcctcgccccagtctatccccaaccccaaatcaagaccacctttcttcacggtcactatttattctttgttcctttttctttttgtaagaaacattcacaaaaaccagtgcaaaaccatca

SEQ ID NO: 196493 - DNA, 195 bp, Homo sapiens
  Payload ID: 18761
  Gene Name: tumor protein p53 inducible protein 11
  ENST ID: ENST00000627720
  CDS Start-End: 1-195
atggcggccaagcagcccccgcctctgatgaagaagcacagccagacggacctcgtgagccgcctgaagacccgcaagatcctcggcgtgggcggggaggatgacgacggggaggtgcatcgctccaagggtctggcagttcgtctctgctgtgctcttctccggcattgccatcatggcgcttgccttccctga

SEQ ID NO: 196494 - DNA, 1530 bp, Homo sapiens
  Payload ID: 18762
  Gene Name: tumor protein p53 inducible protein 13
  Uniprot ID: Q8NBR0
  ENST ID: ENST00000301057
  CDS Start-End: 116-1297
cggacgcgcgggcggcgcgggcggcgcgggggcgctggggctggaggggcggggcgcgcgcgctccctcgctggcggagcggctgggcggcgggccgggcccggggccgcttggaatggcgcctcctccgccttcgccccaactgcttctcctggcagccctcgcgaggctcctgggtcccagcgaggtgatggctggaccggcggaggaggcgggagcccattgtcccgagagcctgtggcctctgcctccgcaggtgtcaccaagagtgacctacacacgagtgagcccagggcaggctgaggatgtcaccttcctctaccacccctgtgcccatccctggctgaagctccagcttgccctcctggcctatgcttgtatggctaacccttccctcacccctgacttcagcctcacgcaggatcggcccctggtgctgactgcatgggggctggcgctggagatggcctgggtagagccagcctgggctgcccactggctgatgaggaggcggaggaggaagcagaggaagaagaaggcatggatctactgtgaaagcctttcagggcctgctccctccgagccaactcccggtagagggaggctgtgccgaagagggtgtgtgcaggccctggctctggcctttgctctgcggagctggcggccccctggcacagaggtgacatctcaagggcccaggcagccctcttctagtggtgccaagaggcggaggctgcgggctgcccttggtccccagcccactcgctcagccctgaggtttccctctgcttccccagggagcttgaaggccaagcagtccatggcgggaatccctggtagggagagtaatgccccatctgtgcccactgtctccctgctgccgggggcgcctggaggcaatgccagctccaggacagaggctcaggtgcccaacgggcaaggcagcccagggggctgtgtctgttcaagtcaggcttccccggcccctcgcgcagcagcgcctccacgggcagcccggggccccaccccacgcactgaagaggccgcctgggctgccatggccctgaccttcctgctggtgctgctcaccctggccacgctctgcacacggctgcacagaaacttccgacgcggggagagcatctactgggggcccacagcggacagccaggacacagtggctgctgtgctgaagcggaggctgctgcagccctcgcgccgggtcaagcgctcgcgccggagacccctcctcccgcccacgccggacagcggcccggaaggcgagagctcggagtgacggcctgggacctgccactgtggcgtgcggctcctccccgcgccgcgaggccgcgacctctgccacgtggaccgcgcgcggggcgctccctggtggcgatggcgcggcactggccgagcactgcgggggctttcctccttgttggttgctgagtgggcggccaaggggagaaaaggagccgcttctgcctcccttgccaaaactccgtttctaattaaattatttttagtaga

SEQ ID NO: 196495 - DNA, 420 bp, Homo sapiens
  Payload ID: 18762
  Gene Name: tumor protein p53 inducible protein 13
  ENST ID: ENST00000378818
  CDS Start-End: 1-339
gaggctcaggtgcccaacgggcaaggcagcccagggggctgtgtctgttcaagtcaggcttccccggcccctcgcgcagcagcgcctccacgggcagcccggggccccaccccacgcactgaagaggccgcctgggctgccatggccctgaccttcctgctggtgctgctcaccctggccacgctctgcacacggctgcacagaaacttccgacgcggggagagcatctactgggggccgcgacctctgccacgtggaccgcgcgcggggcgctccctggtggcgatggcgcggcactggccgagcactgcgggggctttcctccttgttggttgctgagtgggcggccaaggggagaaaaggagccgcttctgcctcccttgccaaaactccgtttctaattaaattatttttagtaga

SEQ ID NO: 196496 - DNA, 664 bp, Homo sapiens
  Payload ID: 18762
  Gene Name: tumor protein p53 inducible protein 13
  ENST ID: ENST00000577934
  CDS Start-End: 1-278
acttaacttttccggcttcgggtttaagacgcgtgatggctggaccggcggaggaggcgggagcccattgtcccgagagcctgtggcctctgcctccgcaggtgtcaccaagagtgacctacacacgagtgagcccagggcaggctgaggatgtcaccttcctctaccacccctgtgcccatccctggctgaagctccagcttgccctcctggcctatgcttgtatggctaacccttccctcacccctgacttcagcctcacgcaggatcggctctaacagttacctcctctcgtagcccctggtgctgactgcatgggggctggcgctggagatggcctgggtagagccagcctgggctgcccactggctgatgaggaggcggaggaggaagcagaggaagaagaaggcatggatctactgtgaaagcctttcagggcctgctccctccgagccaactcccggtagagggaggctgtgccgaagagggtgtgtgcaggccctggctctggcctttgctctgcggagctggcggccccctggcacagaggtgacatctcaagggcccaggcagccctcttctagtggtgccaagaggcggaggctgcgggctgcccttggtccccagcccactcgctcagccctgaggtttccctctgcttccc

SEQ ID NO: 196497 - DNA, 900 bp, Homo sapiens
  Payload ID: 18762
  Gene Name: tumor protein p53 inducible protein 13
  ENST ID: ENST00000581411
  CDS Start-End: 431-900
gcgataccgggggcccactgtctggggaggggcgcgcgcgagcccagggccaacggacgcgcgggcggcgcgggcggcgcgggggcgctggggctggaggggcggggcgcgcgcgctccctcgctggcggagcggctgggcggcgggccgggcccggggccgcttggaatggcgcctcctccgccttcgccccaactgcttctcctggcagccctcgcgaggctcctgggtcccagcgaggtaaggtgacccgctcctgggaaggcctcggcccgcgagctcaaagcgctttgccaaaagttcgtcctggaaggagtggcgcgccgagggggacgcggagttcttccgctggcgggctgggcctggggagagagagggcagggcctcgccgcgtccagcgccccaactcttcgctttggacccacaggtgatggctggaccggcggaggaggcgggagcccattgtcccgagagcctgtggcctctgcctccgcaggtgtcaccaagagtgacctacacacgagtgagcccagggcaggctgaggatgtcaccttcctctaccacccctgtgcccatccctggctgaagctccagcttgccctcctggcctatgcttgtatggctaacccttccctcacccctgacttcagcctcacgcaggatcggcccctggtgctgactgcatgggggctggcgctggagatggcctgggtagagccagcctgggctgcccactggctgatgaggaggcggaggaggaagcagaggaagaagaaggcatggatctactgtgaaagcctttcagggcctgctccctccgagccaactcccggtagagggaggctgtgccgaagagggtgtgtgcaggccctggctctggcctttgctctgcggagctg

SEQ ID NO: 196498 - DNA, 805 bp, Homo sapiens
  Payload ID: 18762
  Gene Name: tumor protein p53 inducible protein 13
  ENST ID: ENST00000582829
  CDS Start-End: 280-805
cggaggtcacaccgacaaatctgaagcgggtttgccaggggagtgtacccgtctccccagcctgggccacccggtccacagggattccatttccggccttacactccgctccacgatctcatccaggcgctgcagctgtgcagctgctctacagactgcagggacctgctgagacgaatccccggacgaggaaaggggccccccgcctgccctactgagccttgcgcgctgacccggttcctacacttaacttttccggcttcgggtttaagacgcgtgatggctggaccggcggaggaggcgggagcccattgtcccgagagcctgtggcctctgcctccgcaggtgtcaccaagagtgacctacacacgagtgagcccagggcaggctgaggatgtcaccttcctctaccacccctgtgcccatccctggctgaagctccagcttgccctcctggcctatgcttgtatggctaacccttccctcacccctgacttcagcctcacgcaggatcggcccctggtgctgactgcatgggggctggcgctggagatggcctgggtagagccagcctgggctgcccactggctgatgaggaggcggaggaggaagcagaggaagaagaaggcatggatctactgtgaaagcctttcagggcctgctccctccgagccaactcccggtagagggaggctgtgccgaagagggtgtgtgcaggccctggctctggcctttgctctgcggagctggcggccccctggcacagaggtgacatctcaagggcccaggcagccctcttctagtg

SEQ ID NO: 196499 - DNA, 726 bp, Homo sapiens
  Payload ID: 18762
  Gene Name: tumor protein p53 inducible protein 13
  ENST ID: ENST00000583940
  CDS Start-End: 507-726
aattgcaacaagtgggagcagagggtgagaggagccggggccaccagggagggagggcgcgccggcagccggaagggagtggggagggcacgagccggggagagcggtgttggccatggagacgtggggagactggaggccgaggcttggggacccgactgtcatcagggtcttccgccagaccctgggcgctgcgccctcagaggccgatgaaaagaagcagaagggagaggtcacaccgacaaatctgaagcgggtttgccaggggagtgtacccgtctccccagcctgggccacccggtccacagggattccatttccggccttacactccgctccacgatctcatccaggcgctgcagctgtgcagctgctctacagactgcagggacctgctgagacgaatccccggacgaggaaaggggccccccgcctgccctactgagccttgcgcgctgacccggttcctacacttaacttttccggcttcgggtttaagacgcgtgatggctggaccggcggaggaggcgggagcccattgtcccgagagcctgtggcctctgcctccgcaggtgtcaccaagagtgacctacacacgagtgagcccagggcaggctgaggatgtcaccttcctctaccacccctgtgcccatccctggctgaagctccagcttgccctcctggcctatgcttgtatggctaacccttccctcacccctgacttca

SEQ ID NO: 196500 - DNA, 824 bp, Homo sapiens
  Payload ID: 18762
  Gene Name: tumor protein p53 inducible protein 13
  ENST ID: ENST00000580183
  CDS Start-End: 269-824
gacgcgcgcctgccaccgctgggcgacggcggaggtcacaccgacaaatctgaagcgggtttgccaggggagtgtacccgtctccccagcctgggccacccggtccacagggattccatttccggccttacactccgctccacgatctcatccaggcgctgcagctgtgcagctgctctacagactgcagggacctgctgagacgaatccccggacgaggaaaggggccccccgcctgccctactgagccttgcgcgctgacccggtgatggctggaccggcggaggaggcgggagcccattgtcccgagagcctgtggcctctgcctccgcaggtgtcaccaagagtgacctacacacgagtgagcccagggcaggctgaggatgtcaccttcctctaccacccctgtgcccatccctggctgaagctccagcttgccctcctggcctatgcttgtatggctaacccttccctcacccctgacttcagcctcacgcaggatcggcccctggtgctgactgcatgggggctggcgctggagatggcctgggtagagccagcctgggctgcccactggctgatgaggaggcggaggaggaagcagaggaagaagaaggcatggatctactgtgaaagcctttcagggcctgctccctccgagccaactcccggtagagggaggctgtgccgaagagggtgtgtgcaggccctggctctggcctttgctctgcggagctggcggccccctggcacagaggtgacatctcaagggcccaggcagccctcttctagtggtgccaagaggcggaggctgcgggctgccc

SEQ ID NO: 196501 - DNA, 1050 bp, Homo sapiens
  Payload ID: 18762
  Gene Name: tumor protein p53 inducible protein 13
  ENST ID: ENST00000578749
  CDS Start-End: 466-1050
gggcgacggcggaggtggggaagacagcagcctctcggctagctccggcctcccggggcttctgggtttggagagtttggggagcggagacacctcccgaggctcctccgcgttggaccctatttgcgagggcgggagcggggtgggccgacggcgaagctccagaggtgggaccctctcccttcagcagctcttcctgacttcatgattctgcccctcttctcattgcaggtcacaccgacaaatctgaagcgggtttgccaggggagtgtacccgtctccccagcctgggccacccggtccacagggattccatttccggccttacactccgctccacgatctcatccaggcgctgcagctgtgcagctgctctacagactgcagggacctgctgagacgaatccccggacgaggaaaggggccccccgcctgccctactgagccttgcgcgctgacccggtgatggctggaccggcggaggaggcgggagcccattgtcccgagagcctgtggcctctgcctccgcaggtgtcaccaagagtgacctacacacgagtgagcccagggcaggctgaggatgtcaccttcctctaccacccctgtgcccatccctggctgaagctccagcttgccctcctggcctatgcttgtatggctaacccttccctcacccctgacttcagcctcacgcaggatcggcccctggtgctgactgcatgggggctggcgctggagatggcctgggtagagccagcctgggctgcccactggctgatgaggaggcggaggaggaagcagaggaagaagaaggcatggatctactgtgaaagcctttcagggcctgctccctccgagccaactcccggtagagggaggctgtgccgaagagggtgtgtgcaggccctggctctggcctttgctctgcggagctggcggccccctggcacagaggtgacatctcaagggcccaggcagccctcttctagtggtgccaagaggcggaggctgcgggctgcccttggtccccagcccactcgctcagccctg

SEQ ID NO: 196502 - DNA, 1998 bp, Homo sapiens
  Payload ID: 18763
  Gene Name: tumor protein p53 inducible protein 3
  Uniprot ID: Q53FA7
  ENST ID: ENST00000238721
  CDS Start-End: 856-1854
cttgcccacccatgctcaagatgggcgggatgccagcctgttacataaatgtgccaaaagcctggccatgcctggaaaatggaccaatccgcccgccaagaggttgggtctcgttccctagagagaaggaagtttcctctccttgaagtgagagctagaatcgcactttctgtcaagctgagagaaagactcttttccagaggctaaaaggacaagaaaatctgatttgcttgcttctaactttgcgttttaaagggggaaggaggaaaggaaagagggggagggtggttctgcttagccccacccctccggctaccccaggtccagccgtccattccggtggaggcagaggcagtcctggggctctggggctcgggctttgtcaccgggacccgcaggagccagaaccactcggcgccgcctggtgcatgggaggggagccgggccaggagtaagtaactcatacgggcgccggggacccgggtcgggctgggggcttccaactcagagggagtgtgatttgcctgatcctcttcggcgttgtcctgctctgccgcatccagccctgtaccgccatcccacttcccgccgttcccatctgtgttccgggtgggatcggtctggaggcggccgaggacttcccaggcaggagctcggggcggaggccgggtccgcggcagaccagggcagcgaggcgctggccggcagggggcgctgcggtgccagcctgaggctgggctgctccgcgaggatacagcggcccctgccctgtcctgtcctgccctgccctgtcctgtcctgccctgccctgccctgtcctgtcctgccctgccctgccctgtgtcctcagacaatatgttagccgtgcactttgacaagccgggaggaccggaaaacctctacgtgaaggaggtggccaagccgagcccgggggagggtgaagtcctcctgaaggtggcggccagcgccctgaaccgggcggacttaatgcagagacaaggccagtatgacccacctccaggagccagcaacattttgggacttgaggcatctggacatgtggcagagctggggcctggctgccagggacactggaagatcggggacacagccatggctctgctccccggtgggggccaggctcagtacgtcactgtccccgaagggctcctcatgcctatcccagagggattgaccctgacccaggctgcagccatcccagaggcctggctcaccgccttccagctgttacatcttgtgggaaatgttcaggctggagactatgtgctaatccatgcaggactgagtggtgtgggcacagctgctatccaactcacccggatggctggagctattcctctggtcacagctggctcccagaagaagcttcaaatggcagaaaagcttggagcagctgctggattcaattacaaaaaagaggatttctctgaagcaacgctgaaattcaccaaaggtgctggagttaatcttattctagactgcataggcggatcctactgggagaagaacgtcaactgcctggctcttgatggtcgatgggttctctatggtctgatgggaggaggtgacatcaatgggcccctgttttcaaagctactttttaagcgaggaagtctgatcaccagtttgctgaggtctagggacaataagtacaagcaaatgctggtgaatgctttcacggagcaaattctgcctcacttctccacggagggcccccaacgtctgctgccggttctggacagaatctacccagtgaccgaaatccaggaggcccataagtacatggaggccaacaagaacataggcaagatcgtcctggaactgccccagtgaaggaggatggggcaggacaggacgcggccaccccaggcctttccagagcaaacctggagaagattcacaatagacaggccaagaaacccggtgcttcctccagagccgtttaaagctgatatgaggaaataaagagtgaactgg

SEQ ID NO: 196503 - DNA, 1635 bp, Homo sapiens
  Payload ID: 18763
  Gene Name: tumor protein p53 inducible protein 3
  Uniprot ID: Q53FA7
  ENST ID: ENST00000335934
  CDS Start-End: 491-1489
aacggctcctttctcttctcttagcagcacccagcttgcccacccatgctcaagatgggcgggatgccagcctgttacataaatgtgccaaaagcctggccatgcctggaaaatggaccaatccgcccgccaagaggttgggtctcgttccctagagagaaggaagtttcctctccttgaagtgagagctagaatcgcactttctgtcaagctgagagaaagactcttttccagaggctaaaaggacaagaaaatctgatttgcttgcttctaactttgcgttttaaagggggaaggaggaaaggaaagagggggagggtggttctgcttagccccacccctccggctaccccaggtccagccgtccattccggtggaggcagaggcagtcctggggctctggggctcgggctttgtcaccgggacccgcaggagccagaaccactcggcgccgcctggtgcatgggaggggagccgggccaggaacaatatgttagccgtgcactttgacaagccgggaggaccggaaaacctctacgtgaaggaggtggccaagccgagcccgggggagggtgaagtcctcctgaaggtggcggccagcgccctgaaccgggcggacttaatgcagagacaaggccagtatgacccacctccaggagccagcaacattttgggacttgaggcatctggacatgtggcagagctggggcctggctgccagggacactggaagatcggggacacagccatggctctgctccccggtgggggccaggctcagtacgtcactgtccccgaagggctcctcatgcctatcccagagggattgaccctgacccaggctgcagccatcccagaggcctggctcaccgccttccagctgttacatcttgtgggaaatgttcaggctggagactatgtgctaatccatgcaggactgagtggtgtgggcacagctgctatccaactcacccggatggctggagctattcctctggtcacagctggctcccagaagaagcttcaaatggcagaaaagcttggagcagctgctggattcaattacaaaaaagaggatttctctgaagcaacgctgaaattcaccaaaggtgctggagttaatcttattctagactgcataggcggatcctactgggagaagaacgtcaactgcctggctcttgatggtcgatgggttctctatggtctgatgggaggaggtgacatcaatgggcccctgttttcaaagctactttttaagcgaggaagtctgatcaccagtttgctgaggtctagggacaataagtacaagcaaatgctggtgaatgctttcacggagcaaattctgcctcacttctccacggagggcccccaacgtctgctgccggttctggacagaatctacccagtgaccgaaatccaggaggcccataagtacatggaggccaacaagaacataggcaagatcgtcctggaactgccccagtgaaggaggatggggcaggacaggacgcggccaccccaggcctttccagagcaaacctggagaagattcacaatagacaggccaagaaacccggtgcttcctccagagccgtttaaagctgatatgaggaaataaagagtgaactggaa

SEQ ID NO: 196504 - DNA, 747 bp, Homo sapiens
  Payload ID: 18763
  Gene Name: tumor protein p53 inducible protein 3
  Uniprot ID: Q53FA7
  ENST ID: ENST00000407482
  CDS Start-End: 1-747
atgttagccgtgcactttgacaagccgggaggaccggaaaacctctacgtgaaggaggtggccaagccgagcccgggggagggtgaagtcctcctgaaggtggcggccagcgccctgaaccgggcggacttaatgcagagacaaggccagtatgacccacctccaggagccagcaacattttgggacttgaggcatctggacatgtggcagagctggggcctggctgccagggacactggaagatcggggacacagccatggctctgctccccggtgggggccaggctcagtacgtcactgtccccgaagggctcctcatgcctatcccagagggattgaccctgacccaggctgcagccatcccagaggcctggctcaccgccttccagctgttacatcttgtgggaaatgttcaggctggagactatgtgctaatccatgcaggactgagtggtgtgggcacagctgctatccaactcacccggatggctggagctattcctctggtcacagctggctcccagaagaagcttcaaatggcagaaaagcttggagcagctgctggattcaattacaaaaaagaggatttctctgaagcaacgctgaaattcaccaaagtacaagcaaatgctggtgaatgctttcacggagcaaattctgcctcacttctccacggagggcccccaacgtctgctgccggttctggacagaatctacccagtgaccgaaatccaggaggcccataa

SEQ ID NO: 196505 - DNA, 677 bp, Homo sapiens
  Payload ID: 18763
  Gene Name: tumor protein p53 inducible protein 3
  ENST ID: ENST00000413037
  CDS Start-End: 1-651
tttgacaagccgggaggaccggaaaacctctacgtgaaggaggtggccaagccgagcccgggggagggtgaagtcctcctgaaggtggcggccagcgccctgaaccgggcggacttaatgcagagacaaggccagtatgacccacctccaggagccagcaacattttgggacttgaggcatctggacatgtggcagagctggggcctggctgccagggacactggaagatcggggacacagccatggctctgctccccggtgggggccaggctcagtacgtcactgtccccgaagggctcctcatgcctatcccagagggattgaccctgacccaggctgcagccatcccagaggcctggctcaccgccttccagctgttacatcttgtgggaaatgttcaggctggagactatgtgctaatccatgcaggactgagtggtgtgggcacagctgctatccaactcacccggatggctggagctattcctctggtcacagctggctcccagaagaagcttcaaatggcagaaaagcttggagcagctgctggattcaattacaaaaaagaggatttctctgaagcaacgctgaaattcaccaaaggtaaacaactgcttctacagttcagcaggaatttaagagatgattaaataaaagccccaccagtctcaaagtt

SEQ ID NO: 196506 - DNA, 777 bp, Homo sapiens
  Payload ID: 18764
  Gene Name: tumor protein p53 regulated apoptosis inducing protein 1
  Uniprot ID: Q9HCN2
  ENST ID: ENST00000458238
  CDS Start-End: 211-471
ccctgagaggccgtgctcgggctcgcctgctcagctcactccgaaagcctctgctcagacctgcacccagtcacagcagcacagatgtgcaggaggagaccatttccacggaccctccgactcctaggaggcagtcccttagggactggccctaacaacaaatgaggagaagccaagttctctgctttctgcagacagggcctcccctggatgggatcttcctctgaggcgagcttcagatctgctcaagcttcctgcagtggggccaggaggcagggcctgggcaggggagaccagaacctctcggtgatgcctccgaatggcagggctcagacacacacacctggctgggtttcagatcccttagttttgggtgcccaagttcacggagggtgccggggaatagaagctctgtcagtctcgtctggatcttggtcctcagcaactgtctggatcctgacagtgcagtaagagcttgcctggcctgtgtgcagagctgcctcatcctgaaattctgggagttgaaagccccagggcaacccttaaccaatgggggaaaagcattggtgtgtaaatcccccagcttccctgggtgggctgcagctgagccatagtctacatgacacttccgaggatccccagtgggcatgacctcaatcgcccacattggatgccacaacctgcactggcttttctcccttccctgtgggtctctctctgcacttcctcccttgtgcattctaggttcaccttccaaataaatgatgtgcactcagg

SEQ ID NO: 196507 - DNA, 806 bp, Homo sapiens
  Payload ID: 18764
  Gene Name: tumor protein p53 regulated apoptosis inducing protein 1
  Uniprot ID: Q9HCN2
  ENST ID: ENST00000531399
  CDS Start-End: 211-585
ccctgagaggccgtgctcgggctcgcctgctcagctcactccgaaagcctctgctcagacctgcacccagtcacagcagcacagatgtgcaggaggagaccatttccacggaccctccgactcctaggaggcagtcccttagggactggccctaacaacaaatgaggagaagccaagttctctgctttctgcagacagggcctcccctggatgggatcttcctctgaggcgagcttcagatctgctcaagcttcctgcagtggggccaggaggcagggcctgggcaggggagaccagaacctctcggtgatgcctccgaatggcagggctcagacacacacacctggctgggtttcagatcccttagttttgggtgcccaagttcacggagggtgccggggaatagaagctctgtcagtctcgtctggatcttggtcctcagcaactgtctggatcctgacaggccttggtctaggtctctccaggcctttccttcctggagccacagtgcttagagacaggccactggggtcagcatttgagctcagctatgatcagaaaaaagcaccgttgaggttgcagtgagccgagatcacgccactgcactccagcctgggcgacagagagagactccatctcaaaacaaaaacaaacaaacaaacagaaagcaccgtcgagaaatggctccagcgctgactagcggccacctcatttccccccttgaccactgggccagttgggtggctaggttgcctcattttgcatccttctgtatccccaaatctgaaataaaagctggaaaaaaa

SEQ ID NO: 196508 - DNA, 363 bp, Homo sapiens
  Payload ID: 18764
  Gene Name: tumor protein p53 regulated apoptosis inducing protein 1
  Uniprot ID: Q9HCN2
  ENST ID: ENST00000530777
  CDS Start-End: 1-363
atgggatcttcctctgaggcgagcttcagatctgctcaagcttcctgcagtggggccaggaggcagggcctgggcaggggagaccagaacctctcggtgatgcctccgaatggcagggctcagacacacacacctggctgggtttcagatcccttagttttgggtgcccaagttcacggagggtgccggggaatagaagctctgtcagtctcgtctggatcttggtcctcagcaactgtctggatcctgacaggtctctccaggcctttccttcctggagccacagtgcttagagacaggccactggggtcagcatttgagctcagctatgatcagaaaaaagcaccgttgaggttgcagtga

SEQ ID NO: 196509 - DNA, 1538 bp, Homo sapiens
  Payload ID: 18764
  Gene Name: tumor protein p53 regulated apoptosis inducing protein 1
  Uniprot ID: Q9HCN2
  ENST ID: ENST00000527504
  CDS Start-End: 369-695
acatacagcgagctggcccagctcccggccacgtggctcacactgtccgtgctcacccacccgttgccttcacccccagcagcactggttgtgaaaagggtaactgcctgagccaccccaccactgcgggcctgccaaggacaggcaggaactcagccatgccccgcaaggagcccaggggcatctccagggacggctccccagcctatgggctcgctccctgagaggccgtgctcgggctcgcctgctcagctcactccgaaagcctctgctcagacctgcacccagtcacagcagcacagatgtgcaggaggagaccatttccacggaccctccgactcctaggaggcagacagggcctcccctggatgggatcttcctctgaggcgagcttcagatctgctcaagcttcctgcagtggggccaggaggcagggcctgggcaggggagaccagaacctctcggtgatgcctccgaatggcagggctcagacacacacacctggctgggtaagtccctgcagtgaaaaccgagacggtcttttgcctgccacagccccgggcagactctgctctcaccgtggtgccgacatcccaagttttcagactcaccaggacccagtgacagcatctgggtcctcagagctgcatgcggactgtccccagttcagagcattggacagagctgggaactgacagccctgatcaatagtcccaagaggaaggccagccctcctcctcctcggaatcctgggtttctaggaggcagaaaggttttctgagaaacaaggcttttggaaggaaggtggtgcctggctgcatccagaaagtgagagctaaatggagaggctgaacaaaggacgcatgtggagcgcatggggagggaaggctggggtgcagggctccgggcctgctcttctgcgtccaccccggatcctgcttttgtccagatgggcctcggagcaccagtcacttactccaagaagtcgtttcctgtggccaataatgaagatgacgcactcggaagcttgtgggctctgaggagggggtaaggatgcaggggccatgcattcatcccagcacaggcagcgcatggctccggaagcagacacaggccaggcctgggccaggagtctgccaggagccaggagcgcctacacctccctggaggcccacacttctctccccagaagctcacacgcagcgtctgaggtgcagggcccaggtgtgctggggtgacaaagccccgagctgtggtgatgggagggaggaagcgccggtttatgtctgttctttgggctgatttgctgtctctgtctttgtctctaatgtcctttgcaccactgaccttgaggagccttttgttcctcctgtcccagtttggtttccatgggaacctgagtggcagcgtcatcactttgctgaggtttcagatcccttagttttgggtgcccaagttcacggagggtgccggggaatagaagctctgtcagtctcgtctggatcttggtcctcagcaactgtctggatcctgacagg

SEQ ID NO: 196510 - DNA, 3124 bp, Homo sapiens
  Payload ID: 18764
  Gene Name: tumor protein p53 regulated apoptosis inducing protein 1
  Uniprot ID: Q9HCN2
  ENST ID: ENST00000602346
  CDS Start-End: 683-1009
gtgggaagttggaaaaaataatctgcaaggtaaacaccttcaagtcaatttcaagaggctggctagaaaccgccaggacttcagggggccctgtctcgcgggtctccctgcgccctcagcactttggcttggtataaggccaccttgtccctgaagagaggcctattttaagctgagcaagaaaaggtgagaaagactaaaatcagctttgtgcagagacgccaatttctgctgcacacatggaaacgatgtgcacatacagcgagctggcccagctcccggccacgtggctcacactgtccgtgctcacccacccgttgccttcacccccagcagcactggttgtgaaaagggtaactgcctgagccaccccaccactgcgggcctgccaaggacaggcaggaactcagccatgccccgcaaggagcccaggggcatctccagggacggctccccagcctatgggctcgctccctgagaggccgtgctcgggctcgcctgctcagctcactccgaaagcctctgctcagacctgcacccagtcacagcagcacagatgtgcaggaggagaccatttccacggaccctccgactcctaggaggcagtcccttagggactggccctaacaacaaatgaggagaagccaagttctctgctttctgcagacagggcctcccctggatgggatcttcctctgaggcgagcttcagatctgctcaagcttcctgcagtggggccaggaggcagggcctgggcaggggagaccagaacctctcggtgatgcctccgaatggcagggctcagacacacacacctggctgggtaagtccctgcagtgaaaaccgagacggtcttttgcctgccacagccccgggcagactctgctctcaccgtggtgccgacatcccaagttttcagactcaccaggacccagtgacagcatctgggtcctcagagctgcatgcggactgtccccagttcagagcattggacagagctgggaactgacagccctgatcaatagtcccaagaggaaggccagccctcctcctcctcggaatcctgggtttctaggaggcagaaaggttttctgagaaacaaggcttttggaaggaaggtggtgcctggctgcatccagaaagtgagagctaaatggagaggctgaacaaaggacgcatgtggagcgcatggggagggaaggctggggtgcagggctccgggcctgctcttctgcgtccaccccggatcctgcttttgtccagatgggcctcggagcaccagtcacttactccaagaagtcgtttcctgtggccaataatgaagatgacgcactcggaagcttgtgggctctgaggagggggtaaggatgcaggggccatgcattcatcccagcacaggcagcgcatggctccggaagcagacacaggccaggcctgggccaggagtctgccaggagccaggagcgcctacacctccctggaggcccacacttctctccccagaagctcacacgcagcgtctgaggtgcagggcccaggtgtgctggggtgacaaagccccgagctgtggtgatgggagggaggaagcgccggtttatgtctgttctttgggctgatttgctgtctctgtctttgtctctaatgtcctttgcaccactgaccttgaggagccttttgttcctcctgtcccagtttggtttccatgggaacctgagtggcagcgtcatcactttgctgaggtgaaatgcccctggatgccatgaatacctaggggaaaacctgccagagaagaataaaccatccaagagacggcgctgcagggcctcacagtctgcttccatttcctctcaggtttcagatcccttagttttgggtgcccaagttcacggagggtgccggggaatagaagctctgtcagtctcgtctggatcttggtcctcagcaactgtctggatcctgacaggtgtgtgataattacttagtgaattcatgggtgtgggccgtgatagaattaagtgatttgatgtcctctcgataaatccaggtaacgacatagggttttttgagtttgaccctctcctgaaatttgccatctgacaaaatgacatcatggcagagttgtaaactgctgtggatgtattttatttaatttctcaaattaaaataaaaggtaacggtacacttaagagtggtcactacagccaagctaattgacacccactgaactttctggaatgggccataggatgctggacaataggacagatttggaatgagcagtcttccattccaactttagtttctgcaaagctgttgagagcatggagccaggctgcggggtctgggttcaaatcctgactctaccacttaggagctgtgtgtacatgggcaggacaactggcctgcctgagtctcagtgtaggtgtctgtaaaatggaatgataatagcttccatctcacagattcactgtgtgggtaaaatgatagatatgaaatgctaagaacagcacctgtacgtagtatgtcctacatatcttactgttatcattagcatattttgtttattccaagatacatttttgttggcccatttgatatctatgaaatctaaagattttttttcctgtcttgggagatagaataatgatgtgccttacaatggattgtgttttagattcactgaaattcattattgttgtttttatccctggtctgtaacatgatatttggtaaataacaaggactccatacgttttgcaaagagtaaattctctccctccctactgaggccttggtctaggtctctccaggcctttccttcctggagccacagtgcttagagacaggccactggggtcagcatttgagctcagctatgatcagaaaaaagcaccgttgaggttgcagtgagccgagatcacgccactgcactccagcctgggcgacagagagagactccatctcaaaacaaaaacaaacaaacaaacagaaagcaccgtcgagaaatggctccagcgctgactagcggccacctcatttccccccttgaccactgggccagttgggtggctaggttgcctcattttgcatccttctgtatccccaaatctgaaataaaagctgg

SEQ ID NO: 196511 - DNA, 940 bp, Homo sapiens
  Payload ID: 18764
  Gene Name: tumor protein p53 regulated apoptosis inducing protein 1
  Uniprot ID: Q9HCN2
  ENST ID: ENST00000621818
  CDS Start-End: 683-940
gtgggaagttggaaaaaataatctgcaaggtaaacaccttcaagtcaatttcaagaggctggctagaaaccgccaggacttcagggggccctgtctcgcgggtctccctgcgccctcagcactttggcttggtataaggccaccttgtccctgaagagaggcctattttaagctgagcaagaaaaggtgagaaagactaaaatcagctttgtgcagagacgccaatttctgctgcacacatggaaacgatgtgcacatacagcgagctggcccagctcccggccacgtggctcacactgtccgtgctcacccacccgttgccttcacccccagcagcactggttgtgaaaagggtaactgcctgagccaccccaccactgcgggcctgccaaggacaggcaggaactcagccatgccccgcaaggagcccaggggcatctccagggacggctccccagcctatgggctcgctccctgagaggccgtgctcgggctcgcctgctcagctcactccgaaagcctctgctcagacctgcacccagtcacagcagcacagatgtgcaggaggagaccatttccacggaccctccgactcctaggaggcagtcccttagggactggccctaacaacaaatgaggagaagccaagttctctgctttctgcagacagggcctcccctggatgggatcttcctctgaggcgagcttcagatctgctcaagcttcctgcagtggggccaggaggcagggcctgggcaggggagaccagaacctctcggtgatgcctccgaatggcagggctcagacacacacacctggctgggtttcagatcccttagttttgggtgcccaagttcacggagggtgccggggaatagaagctctgtcagtctcgtctggatcttggtcctcagcaactgtctggatcctgacagtccaa

SEQ ID NO: 196512 - DNA, 4909 bp, Homo sapiens
  Payload ID: 18765
  Gene Name: tumor protein p63
  Uniprot ID: Q9H3D4
  ENST ID: ENST00000264731
  CDS Start-End: 90-2132
cccggctttatatctatatatacacaggtatatgtgtatattttatataattgttctccgttcgttgatatcaaagacagttgaaggaaatgaattttgaaacttcacggtgtgccaccctacagtactgccctgacccttacatccagcgtttcgtagaaaccccagctcatttctcttggaaagaaagttattaccgatccaccatgtcccagagcacacagacaaatgaattcctcagtccagaggttttccagcatatctgggattttctggaacagcctatatgttcagttcagcccattgacttgaactttgtggatgaaccatcagaagatggtgcgacaaacaagattgagattagcatggactgtatccgcatgcaggactcggacctgagtgaccccatgtggccacagtacacgaacctggggctcctgaacagcatggaccagcagattcagaacggctcctcgtccaccagtccctataacacagaccacgcgcagaacagcgtcacggcgccctcgccctacgcacagcccagctccaccttcgatgctctctctccatcacccgccatcccctccaacaccgactacccaggcccgcacagtttcgacgtgtccttccagcagtcgagcaccgccaagtcggccacctggacgtattccactgaactgaagaaactctactgccaaattgcaaagacatgccccatccagatcaaggtgatgaccccacctcctcagggagctgttatccgcgccatgcctgtctacaaaaaagctgagcacgtcacggaggtggtgaagcggtgccccaaccatgagctgagccgtgaattcaacgagggacagattgcccctcctagtcatttgattcgagtagaggggaacagccatgcccagtatgtagaagatcccatcacaggaagacagagtgtgctggtaccttatgagccaccccaggttggcactgaattcacgacagtcttgtacaatttcatgtgtaacagcagttgtgttggagggatgaaccgccgtccaattttaatcattgttactctggaaaccagagatgggcaagtcctgggccgacgctgctttgaggcccggatctgtgcttgcccaggaagagacaggaaggcggatgaagatagcatcagaaagcagcaagtttcggacagtacaaagaacggtgatggtacgaagcgcccgtttcgtcagaacacacatggtatccagatgacatccatcaagaaacgaagatccccagatgatgaactgttatacttaccagtgaggggccgtgagacttatgaaatgctgttgaagatcaaagagtccctggaactcatgcagtaccttcctcagcacacaattgaaacgtacaggcaacagcaacagcagcagcaccagcacttacttcagaaacagacctcaatacagtctccatcttcatatggtaacagctccccacctctgaacaaaatgaacagcatgaacaagctgccttctgtgagccagcttatcaaccctcagcagcgcaacgccctcactcctacaaccattcctgatggcatgggagccaacattcccatgatgggcacccacatgccaatggctggagacatgaatggactcagccccacccaggcactccctcccccactctccatgccatccacctcccactgcacacccccacctccgtatcccacagattgcagcattgtcagtttcttagcgaggttgggctgttcatcatgtctggactatttcacgacccaggggctgaccaccatctatcagattgagcattactccatggatgatctggcaagtctgaaaatccctgagcaatttcgacatgcgatctggaagggcatcctggaccaccggcagctccacgaattctcctccccttctcatctcctgcggaccccaagcagtgcctctacagtcagtgtgggctccagtgagacccggggtgagcgtgttattgatgctgtgcgattcaccctccgccagaccatctctttcccaccccgagatgagtggaatgacttcaactttgacatggatgctcgccgcaataagcaacagcgcatcaaagaggagggggagtgagcctcaccatgtgagctcttcctatccctctcctaactgccagccccctaaaagcactcctgcttaatcttcaaagccttctccctagctcctccccttcctcttgtctgatttcttaggggaaggagaagtaagaggctacctcttacctaacatctgacctggcatctaattctgattctggctttaagccttcaaaactatagcttgcagaactgtagctgccatggctaggtagaagtgagcaaaaaagagttgggtgtctccttaagctgcagagatttctcattgacttttataaagcatgttcacccttatagtctaagactatatatataaatgtataaatatacagtatagatttttgggtggggggcattgagtattgtttaaaatgtaatttaaatgaaagaaaattgagttgcacttattgaccattttttaatttacttgttttggatggcttgtctatactccttcccttaaggggtatcatgtatggtgataggtatctagagcttaatgctacatgtgagtgacgatgatgtacagattctttcagttctttggattctaaatacatgccacatcaaacctttgagtagatccatttccattgcttattatgtaggtaagactgtagatatgtattcttttctcagtgttggtatattttatattactgacatttcttctagtgatgatggttcacgttggggtgatttaatccagttataagaagaagttcatgtccaaacgtcctctttagtttttggttgggaatgaggaaaattcttaaaaggcccatagcagccagttcaaaaacacccgacgtcatgtatttgagcatatcagtaacccccttaaatttaataccagataccttatcttacaatattgattgggaaaacatttgctgccattacagaggtattaaaactaaatttcactactagattgactaactcaaatacacatttgctactgttgtaagaattctgattgatttgattgggatgaatgccatctatctagttctaacagtgaagttttactgtctattaatattcagggtaaataggaatcattcagaaatgttgagtctgtactaaacagtaagatatctcaatgaaccataaattcaactttgtaaaaatcttttgaagcatagataatattgtttggtaaatgtttcttttgtttggtaaatgtttcttttaaagaccctcctattctataaaactctgcatgtagaggcttgtttacctttctctctctaaggtttacaataggagtggtgatttgaaaaatataaaattatgagattggttttcctgtggcataaattgcatcactgtatcattttcttttttaaccggtaagagtttcagtttgttggaaagtaactgtgagaacccagtttcccgtccatctcccttagggactacccatagacatgaaaggtccccacagagcaagagataagtctttcatggctgctgttgcttaaaccacttaaacgaagagttcccttgaaactttgggaaaacatgttaatgacaatattccagatctttcagaaatataacacatttttttgcatgcatgcaaatgagctctgaaatcttcccatgcattctggtcaagggctgtcattgcacataagcttccattttaattttaaagtgcaaaagggccagcgtggctctaaaaggtaatgtgtggattgcctctgaaaagtgtgtatatattttgtgtgaaattgcatactttgtattttgattattttttttttcttcttgggatagtgggatttccagaaccacacttgaaacctttttttatcgtttttgtattttcatgaaaataccatttagtaagaataccacatcaaataagaaataatgctacaattttaagaggggagggaagggaaagtttttttttattatttttttaaaattttgtatgttaaagagaatgagtccttgatttcaaagttttgttgtacttaaatggtaataagcactgtaaacttctgcaacaagcatgcagctttgcaaacccattaaggggaagaatgaaagctgttccttggtcctagtaagaagacaaactgcttcccttactttgctgagggtttgaataaacctaggacttccgagctatgtcagtactattcaggtaacactagggccttggaaattcctgtactgtgtctcatggatttggcactagccaaagcgaggcacccttactggcttacctcctcatggcagcctactctccttgagtgtatgagtagccagggtaaggggtaaaaggatagtaagcatagaaaccactagaaagtgggcttaatggagttcttgtggcctcagctcaatgcagttagctgaagaattgaaaagtttttgtttggagacgtttataaacagaaatggaaagcagagttttcattaaatccttttaccttttttttttcttggtaatcccctaaaataacagtatgtgggatattgaatgttaaagggatatttttttctattatttttataattgtacaaaattaagcaaatgttaaaagttttatatgctttattaatgttttcaaaaggtattatacatgtgatacattttttaagcttcagttgcttgtcttctggtactttctgttatgggcttttggggagccagaagccaatctacaatctctttttgtttgccaggacatgcaataaaatttaaaaaataaataaaaactaattaagaaattg

SEQ ID NO: 196513 - DNA, 2032 bp, Homo sapiens
  Payload ID: 18765
  Gene Name: tumor protein p63
  Uniprot ID: Q9H3D4
  ENST ID: ENST00000320472
  CDS Start-End: 29-1561
tcgttgatatcaaagacagttgaaggaaatgaattttgaaacttcacggtgtgccaccctacagtactgccctgacccttacatccagcgtttcgtagaaaccccagctcatttctcttggaaagaaagttattaccgatccaccatgtcccagagcacacagacaaatgaattcctcagtccagaggttttccagcatatctgggattttctggaacagcctatatgttcagttcagcccattgacttgaactttgtggatgaaccatcagaagatggtgcgacaaacaagattgagattagcatggactgtatccgcatgcaggactcggacctgagtgaccccatgtggccacagtacacgaacctggggctcctgaacagcatggaccagcagattcagaacggctcctcgtccaccagtccctataacacagaccacgcgcagaacagcgtcacggcgccctcgccctacgcacagcccagctccaccttcgatgctctctctccatcacccgccatcccctccaacaccgactacccaggcccgcacagtttcgacgtgtccttccagcagtcgagcaccgccaagtcggccacctggacgtattccactgaactgaagaaactctactgccaaattgcaaagacatgccccatccagatcaaggtgatgaccccacctcctcagggagctgttatccgcgccatgcctgtctacaaaaaagctgagcacgtcacggaggtggtgaagcggtgccccaaccatgagctgagccgtgaattcaacgagggacagattgcccctcctagtcatttgattcgagtagaggggaacagccatgcccagtatgtagaagatcccatcacaggaagacagagtgtgctggtaccttatgagccaccccaggttggcactgaattcacgacagtcttgtacaatttcatgtgtaacagcagttgtgttggagggatgaaccgccgtccaattttaatcattgttactctggaaaccagagatgggcaagtcctgggccgacgctgctttgaggcccggatctgtgcttgcccaggaagagacaggaaggcggatgaagatagcatcagaaagcagcaagtttcggacagtacaaagaacggtgatggtacgaagcgcccgtttcgtcagaacacacatggtatccagatgacatccatcaagaaacgaagatccccagatgatgaactgttatacttaccagtgaggggccgtgagacttatgaaatgctgttgaagatcaaagagtccctggaactcatgcagtaccttcctcagcacacaattgaaacgtacaggcaacagcaacagcagcagcaccagcacttacttcagaaacagacctcaatacagtctccatcttcatatggtaacagctccccacctctgaacaaaatgaacagcatgaacaagctgccttctgtgagccagcttatcaaccctcagcagcgcaacgccctcactcctacaaccattcctgatggcatgggagccaacagatctggcaagtctgaaaatccctgagcaatttcgacatgcgatctggaagggcatcctggaccaccggcagctccacgaattctcctccccttctcatctcctgcggaccccaagcagtgcctctacagtcagtgtgggctccagtgagacccggggtgagcgtgttattgatgctgtgcgattcaccctccgccagaccatctctttcccaccccgagatgagtggaatgacttcaactttgacatggatgctcgccgcaataagcaacagcgcatcaaagaggagggggagtgagcctcaccatgtgagctcttcctatccctctcctaactgccagccccctaaaagcactcctgcttaatcttcaaagccttctccctagctcctccccttcctcttgtctgatttcttaggggaaggagaagtaagaggctacctcttacctaacatctgacctggcatctaattctgattctggctttaagccttcaaaa

SEQ ID NO: 196514 - DNA, 4668 bp, Homo sapiens
  Payload ID: 18765
  Gene Name: tumor protein p63
  Uniprot ID: Q9H3D4
  ENST ID: ENST00000354600
  CDS Start-End: 142-1902
agagagagaaagagagagagggacttgagttctgttatcttcttaagtagattcatattgtaagggtctcggggtgggggggttggcaaaatcctggagccagaagaaaggacagcagcattgatcaatcttacagctaacatgttgtacctggaaaacaatgcccagactcaatttagtgagccacagtacacgaacctggggctcctgaacagcatggaccagcagattcagaacggctcctcgtccaccagtccctataacacagaccacgcgcagaacagcgtcacggcgccctcgccctacgcacagcccagctccaccttcgatgctctctctccatcacccgccatcccctccaacaccgactacccaggcccgcacagtttcgacgtgtccttccagcagtcgagcaccgccaagtcggccacctggacgtattccactgaactgaagaaactctactgccaaattgcaaagacatgccccatccagatcaaggtgatgaccccacctcctcagggagctgttatccgcgccatgcctgtctacaaaaaagctgagcacgtcacggaggtggtgaagcggtgccccaaccatgagctgagccgtgaattcaacgagggacagattgcccctcctagtcatttgattcgagtagaggggaacagccatgcccagtatgtagaagatcccatcacaggaagacagagtgtgctggtaccttatgagccaccccaggttggcactgaattcacgacagtcttgtacaatttcatgtgtaacagcagttgtgttggagggatgaaccgccgtccaattttaatcattgttactctggaaaccagagatgggcaagtcctgggccgacgctgctttgaggcccggatctgtgcttgcccaggaagagacaggaaggcggatgaagatagcatcagaaagcagcaagtttcggacagtacaaagaacggtgatggtacgaagcgcccgtttcgtcagaacacacatggtatccagatgacatccatcaagaaacgaagatccccagatgatgaactgttatacttaccagtgaggggccgtgagacttatgaaatgctgttgaagatcaaagagtccctggaactcatgcagtaccttcctcagcacacaattgaaacgtacaggcaacagcaacagcagcagcaccagcacttacttcagaaacagacctcaatacagtctccatcttcatatggtaacagctccccacctctgaacaaaatgaacagcatgaacaagctgccttctgtgagccagcttatcaaccctcagcagcgcaacgccctcactcctacaaccattcctgatggcatgggagccaacattcccatgatgggcacccacatgccaatggctggagacatgaatggactcagccccacccaggcactccctcccccactctccatgccatccacctcccactgcacacccccacctccgtatcccacagattgcagcattgtcagtttcttagcgaggttgggctgttcatcatgtctggactatttcacgacccaggggctgaccaccatctatcagattgagcattactccatggatgatctggcaagtctgaaaatccctgagcaatttcgacatgcgatctggaagggcatcctggaccaccggcagctccacgaattctcctccccttctcatctcctgcggaccccaagcagtgcctctacagtcagtgtgggctccagtgagacccggggtgagcgtgttattgatgctgtgcgattcaccctccgccagaccatctctttcccaccccgagatgagtggaatgacttcaactttgacatggatgctcgccgcaataagcaacagcgcatcaaagaggagggggagtgagcctcaccatgtgagctcttcctatccctctcctaactgccagccccctaaaagcactcctgcttaatcttcaaagccttctccctagctcctccccttcctcttgtctgatttcttaggggaaggagaagtaagaggctacctcttacctaacatctgacctggcatctaattctgattctggctttaagccttcaaaactatagcttgcagaactgtagctgccatggctaggtagaagtgagcaaaaaagagttgggtgtctccttaagctgcagagatttctcattgacttttataaagcatgttcacccttatagtctaagactatatatataaatgtataaatatacagtatagatttttgggtggggggcattgagtattgtttaaaatgtaatttaaatgaaagaaaattgagttgcacttattgaccattttttaatttacttgttttggatggcttgtctatactccttcccttaaggggtatcatgtatggtgataggtatctagagcttaatgctacatgtgagtgacgatgatgtacagattctttcagttctttggattctaaatacatgccacatcaaacctttgagtagatccatttccattgcttattatgtaggtaagactgtagatatgtattcttttctcagtgttggtatattttatattactgacatttcttctagtgatgatggttcacgttggggtgatttaatccagttataagaagaagttcatgtccaaacgtcctctttagtttttggttgggaatgaggaaaattcttaaaaggcccatagcagccagttcaaaaacacccgacgtcatgtatttgagcatatcagtaacccccttaaatttaataccagataccttatcttacaatattgattgggaaaacatttgctgccattacagaggtattaaaactaaatttcactactagattgactaactcaaatacacatttgctactgttgtaagaattctgattgatttgattgggatgaatgccatctatctagttctaacagtgaagttttactgtctattaatattcagggtaaataggaatcattcagaaatgttgagtctgtactaaacagtaagatatctcaatgaaccataaattcaactttgtaaaaatcttttgaagcatagataatattgtttggtaaatgtttcttttgtttggtaaatgtttcttttaaagaccctcctattctataaaactctgcatgtagaggcttgtttacctttctctctctaaggtttacaataggagtggtgatttgaaaaatataaaattatgagattggttttcctgtggcataaattgcatcactgtatcattttcttttttaaccggtaagagtttcagtttgttggaaagtaactgtgagaacccagtttcccgtccatctcccttagggactacccatagacatgaaaggtccccacagagcaagagataagtctttcatggctgctgttgcttaaaccacttaaacgaagagttcccttgaaactttgggaaaacatgttaatgacaatattccagatctttcagaaatataacacatttttttgcatgcatgcaaatgagctctgaaatcttcccatgcattctggtcaagggctgtcattgcacataagcttccattttaattttaaagtgcaaaagggccagcgtggctctaaaaggtaatgtgtggattgcctctgaaaagtgtgtatatattttgtgtgaaattgcatactttgtattttgattattttttttttcttcttgggatagtgggatttccagaaccacacttgaaacctttttttatcgtttttgtattttcatgaaaataccatttagtaagaataccacatcaaataagaaataatgctacaattttaagaggggagggaagggaaagtttttttttattatttttttaaaattttgtatgttaaagagaatgagtccttgatttcaaagttttgttgtacttaaatggtaataagcactgtaaacttctgcaacaagcatgcagctttgcaaacccattaaggggaagaatgaaagctgttccttggtcctagtaagaagacaaactgcttcccttactttgctgagggtttgaataaacctaggacttccgagctatgtcagtactattcaggtaacactagggccttggaaattcctgtactgtgtctcatggatttggcactagccaaagcgaggcacccttactggcttacctcctcatggcagcctactctccttgagtgtatgagtagccagggtaaggggtaaaaggatagtaagcatagaaaccactagaaagtgggcttaatggagttcttgtggcctcagctcaatgcagttagctgaagaattgaaaagtttttgtttggagacgtttataaacagaaatggaaagcagagttttcattaaatccttttaccttttttttttcttggtaatcccctaaaataacagtatgtgggatattgaatgttaaagggatatttttttctattatttttataattgtacaaaattaagcaaatgttaaaagttttatatgctttattaatgttttcaaaaggtattatacatgtgatacattttttaagcttcagttgcttgtcttctggtactttctgttatgggcttttggggagccagaagccaatctacaatctctttttgtttgccaggacatgcaataaaatttaaaaaataaataaaaactaa

SEQ ID NO: 196515 - DNA, 1668 bp, Homo sapiens
  Payload ID: 18765
  Gene Name: tumor protein p63
  Uniprot ID: Q9H3D4
  ENST ID: ENST00000392460
  CDS Start-End: 1-1668
atgaattttgaaacttcacggtgtgccaccctacagtactgccctgacccttacatccagcgtttcgtagaaaccccagctcatttctcttggaaagaaagttattaccgatccaccatgtcccagagcacacagacaaatgaattcctcagtccagaggttttccagcatatctgggattttctggaacagcctatatgttcagttcagcccattgacttgaactttgtggatgaaccatcagaagatggtgcgacaaacaagattgagattagcatggactgtatccgcatgcaggactcggacctgagtgaccccatgtggccacagtacacgaacctggggctcctgaacagcatggaccagcagattcagaacggctcctcgtccaccagtccctataacacagaccacgcgcagaacagcgtcacggcgccctcgccctacgcacagcccagctccaccttcgatgctctctctccatcacccgccatcccctccaacaccgactacccaggcccgcacagtttcgacgtgtccttccagcagtcgagcaccgccaagtcggccacctggacgtattccactgaactgaagaaactctactgccaaattgcaaagacatgccccatccagatcaaggtgatgaccccacctcctcagggagctgttatccgcgccatgcctgtctacaaaaaagctgagcacgtcacggaggtggtgaagcggtgccccaaccatgagctgagccgtgaattcaacgagggacagattgcccctcctagtcatttgattcgagtagaggggaacagccatgcccagtatgtagaagatcccatcacaggaagacagagtgtgctggtaccttatgagccaccccaggttggcactgaattcacgacagtcttgtacaatttcatgtgtaacagcagttgtgttggagggatgaaccgccgtccaattttaatcattgttactctggaaaccagagatgggcaagtcctgggccgacgctgctttgaggcccggatctgtgcttgcccaggaagagacaggaaggcggatgaagatagcatcagaaagcagcaagtttcggacagtacaaagaacggtgatggtacgaagcgcccgtttcgtcagaacacacatggtatccagatgacatccatcaagaaacgaagatccccagatgatgaactgttatacttaccagtgaggggccgtgagacttatgaaatgctgttgaagatcaaagagtccctggaactcatgcagtaccttcctcagcacacaattgaaacgtacaggcaacagcaacagcagcagcaccagcacttacttcagaaacagacctcaatacagtctccatcttcatatggtaacagctccccacctctgaacaaaatgaacagcatgaacaagctgccttctgtgagccagcttatcaaccctcagcagcgcaacgccctcactcctacaaccattcctgatggcatgggagccaacattcccatgatgggcacccacatgccaatggctggagacatgaatggactcagccccacccaggcactccctcccccactctccatgccatccacctcccactgcacacccccacctccgtatcccacagattgcagcattgtcaggatctggcaagtctga

SEQ ID NO: 196516 - DNA, 1251 bp, Homo sapiens
  Payload ID: 18765
  Gene Name: tumor protein p63
  Uniprot ID: Q9H3D4
  ENST ID: ENST00000392461
  CDS Start-End: 1-1251
atgttgtacctggaaaacaatgcccagactcaatttagtgagccacagtacacgaacctggggctcctgaacagcatggaccagcagattcagaacggctcctcgtccaccagtccctataacacagaccacgcgcagaacagcgtcacggcgccctcgccctacgcacagcccagctccaccttcgatgctctctctccatcacccgccatcccctccaacaccgactacccaggcccgcacagtttcgacgtgtccttccagcagtcgagcaccgccaagtcggccacctggacgtattccactgaactgaagaaactctactgccaaattgcaaagacatgccccatccagatcaaggtgatgaccccacctcctcagggagctgttatccgcgccatgcctgtctacaaaaaagctgagcacgtcacggaggtggtgaagcggtgccccaaccatgagctgagccgtgaattcaacgagggacagattgcccctcctagtcatttgattcgagtagaggggaacagccatgcccagtatgtagaagatcccatcacaggaagacagagtgtgctggtaccttatgagccaccccaggttggcactgaattcacgacagtcttgtacaatttcatgtgtaacagcagttgtgttggagggatgaaccgccgtccaattttaatcattgttactctggaaaccagagatgggcaagtcctgggccgacgctgctttgaggcccggatctgtgcttgcccaggaagagacaggaaggcggatgaagatagcatcagaaagcagcaagtttcggacagtacaaagaacggtgatggtacgaagcgcccgtttcgtcagaacacacatggtatccagatgacatccatcaagaaacgaagatccccagatgatgaactgttatacttaccagtgaggggccgtgagacttatgaaatgctgttgaagatcaaagagtccctggaactcatgcagtaccttcctcagcacacaattgaaacgtacaggcaacagcaacagcagcagcaccagcacttacttcagaaacagacctcaatacagtctccatcttcatatggtaacagctccccacctctgaacaaaatgaacagcatgaacaagctgccttctgtgagccagcttatcaaccctcagcagcgcaacgccctcactcctacaaccattcctgatggcatgggagccaacagatctggcaagtctgaaaatccctga

SEQ ID NO: 196517 - DNA, 1386 bp, Homo sapiens
  Payload ID: 18765
  Gene Name: tumor protein p63
  Uniprot ID: Q9H3D4
  ENST ID: ENST00000392463
  CDS Start-End: 1-1386
atgttgtacctggaaaacaatgcccagactcaatttagtgagccacagtacacgaacctggggctcctgaacagcatggaccagcagattcagaacggctcctcgtccaccagtccctataacacagaccacgcgcagaacagcgtcacggcgccctcgccctacgcacagcccagctccaccttcgatgctctctctccatcacccgccatcccctccaacaccgactacccaggcccgcacagtttcgacgtgtccttccagcagtcgagcaccgccaagtcggccacctggacgtattccactgaactgaagaaactctactgccaaattgcaaagacatgccccatccagatcaaggtgatgaccccacctcctcagggagctgttatccgcgccatgcctgtctacaaaaaagctgagcacgtcacggaggtggtgaagcggtgccccaaccatgagctgagccgtgaattcaacgagggacagattgcccctcctagtcatttgattcgagtagaggggaacagccatgcccagtatgtagaagatcccatcacaggaagacagagtgtgctggtaccttatgagccaccccaggttggcactgaattcacgacagtcttgtacaatttcatgtgtaacagcagttgtgttggagggatgaaccgccgtccaattttaatcattgttactctggaaaccagagatgggcaagtcctgggccgacgctgctttgaggcccggatctgtgcttgcccaggaagagacaggaaggcggatgaagatagcatcagaaagcagcaagtttcggacagtacaaagaacggtgatggtacgaagcgcccgtttcgtcagaacacacatggtatccagatgacatccatcaagaaacgaagatccccagatgatgaactgttatacttaccagtgaggggccgtgagacttatgaaatgctgttgaagatcaaagagtccctggaactcatgcagtaccttcctcagcacacaattgaaacgtacaggcaacagcaacagcagcagcaccagcacttacttcagaaacagacctcaatacagtctccatcttcatatggtaacagctccccacctctgaacaaaatgaacagcatgaacaagctgccttctgtgagccagcttatcaaccctcagcagcgcaacgccctcactcctacaaccattcctgatggcatgggagccaacattcccatgatgggcacccacatgccaatggctggagacatgaatggactcagccccacccaggcactccctcccccactctccatgccatccacctcccactgcacacccccacctccgtatcccacagattgcagcattgtcaggatctggcaagtctga

SEQ ID NO: 196518 - DNA, 1506 bp, Homo sapiens
  Payload ID: 18765
  Gene Name: tumor protein p63
  Uniprot ID: Q9H3D4
  ENST ID: ENST00000449992
  CDS Start-End: 1-1506
atgttgtacctggaaaacaatgcccagactcaatttagtgagtattccactgaactgaagaaactctactgccaaattgcaaagacatgccccatccagatcaaggtgatgaccccacctcctcagggagctgttatccgcgccatgcctgtctacaaaaaagctgagcacgtcacggaggtggtgaagcggtgccccaaccatgagctgagccgtgaattcaacgagggacagattgcccctcctagtcatttgattcgagtagaggggaacagccatgcccagtatgtagaagatcccatcacaggaagacagagtgtgctggtaccttatgagccaccccaggttggcactgaattcacgacagtcttgtacaatttcatgtgtaacagcagttgtgttggagggatgaaccgccgtccaattttaatcattgttactctggaaaccagagatgggcaagtcctgggccgacgctgctttgaggcccggatctgtgcttgcccaggaagagacaggaaggcggatgaagatagcatcagaaagcagcaagtttcggacagtacaaagaacggtgatggtacgaagcgcccgtttcgtcagaacacacatggtatccagatgacatccatcaagaaacgaagatccccagatgatgaactgttatacttaccagtgaggggccgtgagacttatgaaatgctgttgaagatcaaagagtccctggaactcatgcagtaccttcctcagcacacaattgaaacgtacaggcaacagcaacagcagcagcaccagcacttacttcagaaacagacctcaatacagtctccatcttcatatggtaacagctccccacctctgaacaaaatgaacagcatgaacaagctgccttctgtgagccagcttatcaaccctcagcagcgcaacgccctcactcctacaaccattcctgatggcatgggagccaacattcccatgatgggcacccacatgccaatggctggagacatgaatggactcagccccacccaggcactccctcccccactctccatgccatccacctcccactgcacacccccacctccgtatcccacagattgcagcattgtcagtttcttagcgaggttgggctgttcatcatgtctggactatttcacgacccaggggctgaccaccatctatcagattgagcattactccatggatgatctggcaagtctgaaaatccctgagcaatttcgacatgcgatctggaagggcatcctggaccaccggcagctccacgaattctcctccccttctcatctcctgcggaccccaagcagtgcctctacagtcagtgtgggctccagtgagacccggggtgagcgtgttattgatgctgtgcgattcaccctccgccagaccatctctttcccaccccgagatgagtggaatgacttcaactttgacatggatgctcgccgcaataagcaacagcgcatcaaagaggagggggagtga

SEQ ID NO: 196519 - DNA, 1749 bp, Homo sapiens
  Payload ID: 18765
  Gene Name: tumor protein p63
  Uniprot ID: Q9H3D4
  ENST ID: ENST00000456148
  CDS Start-End: 1-1749
atgttgtacctggaaaacaatgcccagactcaatttagtgagccacagtacacgaacctggggctcctgaacagcatggaccagcagattcagaacggctcctcgtccaccagtccctataacacagaccacgcgcagaacagcgtcacggcgccctcgccctacgcacagcccagctccaccttcgatgctctctctccatcacccgccatcccctccaacaccgactacccaggcccgcacagtttcgacgtgtccttccagcagtcgagcaccgccaagtcggccacctggacgtattccactgaactgaagaaactctactgccaaattgcaaagacatgccccatccagatcaaggtgatgaccccacctcctcagggagctgttatccgcgccatgcctgtctacaaaaaagctgagcacgtcacggaggtggtgaagcggtgccccaaccatgagctgagccgtgaattcaacgagggacagattgcccctcctagtcatttgattcgagtagaggggaacagccatgcccagtatgtagaagatcccatcacaggaagacagagtgtgctggtaccttatgagccaccccaggttggcactgaattcacgacagtcttgtacaatttcatgtgtaacagcagttgtgttggagggatgaaccgccgtccaattttaatcattgttactctggaaaccagagatgggcaagtcctgggccgacgctgctttgaggcccggatctgtgcttgcccaggaagagacaggaaggcggatgaagatagcatcagaaagcagcaagtttcggacagtacaaagaacggtgatgcgtttcgtcagaacacacatggtatccagatgacatccatcaagaaacgaagatccccagatgatgaactgttatacttaccagtgaggggccgtgagacttatgaaatgctgttgaagatcaaagagtccctggaactcatgcagtaccttcctcagcacacaattgaaacgtacaggcaacagcaacagcagcagcaccagcacttacttcagaaacagacctcaatacagtctccatcttcatatggtaacagctccccacctctgaacaaaatgaacagcatgaacaagctgccttctgtgagccagcttatcaaccctcagcagcgcaacgccctcactcctacaaccattcctgatggcatgggagccaacattcccatgatgggcacccacatgccaatggctggagacatgaatggactcagccccacccaggcactccctcccccactctccatgccatccacctcccactgcacacccccacctccgtatcccacagattgcagcattgtcagtttcttagcgaggttgggctgttcatcatgtctggactatttcacgacccaggggctgaccaccatctatcagattgagcattactccatggatgatctggcaagtctgaaaatccctgagcaatttcgacatgcgatctggaagggcatcctggaccaccggcagctccacgaattctcctccccttctcatctcctgcggaccccaagcagtgcctctacagtcagtgtgggctccagtgagacccggggtgagcgtgttattgatgctgtgcgattcaccctccgccagaccatctctttcccaccccgagatgagtggaatgacttcaactttgacatggatgctcgccgcaataagcaacagcgcatcaaagaggagggggagtga

SEQ ID NO: 196520 - DNA, 2500 bp, Homo sapiens
  Payload ID: 18765
  Gene Name: tumor protein p63
  Uniprot ID: Q9H3D4
  ENST ID: ENST00000437221
  CDS Start-End: 1-1182
atgttgtacctggaaaacaatgcccagactcaatttagtgagccacagtacacgaacctggggctcctgaacagcatggaccagcagattcagaacggctcctcgtccaccagtccctataacacagaccacgcgcagaacagcgtcacggcgccctcgccctacgcacagcccagctccaccttcgatgctctctctccatcacccgccatcccctccaacaccgactacccaggcccgcacagtttcgacgtgtccttccagcagtcgagcaccgccaagtcggccacctggacgtattccactgaactgaagaaactctactgccaaattgcaaagacatgccccatccagatcaaggtgatgaccccacctcctcagggagctgttatccgcgccatgcctgtctacaaaaaagctgagcacgtcacggaggtggtgaagcggtgccccaaccatgagctgagccgtgaattcaacgagggacagattgcccctcctagtcatttgattcgagtagaggggaacagccatgcccagtatgtagaagatcccatcacaggaagacagagtgtgctggtaccttatgagccaccccaggttggcactgaattcacgacagtcttgtacaatttcatgtgtaacagcagttgtgttggagggatgaaccgccgtccaattttaatcattgttactctggaaaccagagatgggcaagtcctgggccgacgctgctttgaggcccggatctgtgcttgcccaggaagagacaggaaggcggatgaagatagcatcagaaagcagcaagtttcggacagtacaaagaacggtgatggtacgaagcgcccgtttcgtcagaacacacatggtatccagatgacatccatcaagaaacgaagatccccagatgatgaactgttatacttaccagtgaggggccgtgagacttatgaaatgctgttgaagatcaaagagtccctggaactcatgcagtaccttcctcagcacacaattgaaacgtacaggcaacagcaacagcagcagcaccagcacttacttcagaaacatctcctttcagcctgcttcaggaatgagcttgtggagccccggagagaaactccaaaacaatctgacgtcttctttagacattccaagcccccaaaccgatcagtgtacccatagagccctatctctatattttaagtgtgtgtgttgtatttccatgtgtatatgtgagtgtgtgtgtgtgtatgtgtgtgcgtgtgtatctagccctcataaacaggacttgaagacactttggctcagagacccaactgctcaaaggcacaaagccactagtgagagaatcttttgaagggactcaaacctttacaagaaaggatgttttctgcagattttgtatccttagaccggccattggtgggtgaggaaccactgtgtttgtctgtgagctttctgttgtttcctgggagggaggggtcaggtggggaaaggggcattaagatgtttattggaacccttttctgtcttcttctgttgtttttctaaaattcacagggaagcttttgagcaggtctcaaacttaagatgtctttttaagaaaaggagaaaaaagttgttattgtctgtgcataagtaagttgtaggtgactgagagactcagtcagacccttttaatgctggtcatgtaataatattgcaagtagtaagaaacgaaggtgtcaagtgtactgctgggcagcgaggtgatcattaccaaaagtaatcaactttgtgggtggagagttctttgtgagaacttgcattatttgtgtcctcccctcatgtgtaggtagaacatttcttaatgctgtgtacctgcctctgccactgtatgttggcatctgttatgctaaagtttttcttgtacatgaaaccctggaagacctactacaaaaaaactgttgtttggcccccatagcaggtgaactcattttgtgcttttaatagaaagacaaatccaccccagtaatattgcccttacgtagttgtttaccattattcaaagctcaaaatagaatttgaagccctctcacaaaatctgtgattaatttgcttaattagagcttctatccctcaagcctacctaccataaaaccagccatattactgatactgttcagtgcatttagccaggagacttacgttttgagtaagtgagatccaagcagacgtgttaaaatcagcactcctggactggaaattaaagattgaaagggtagactacttttcttttttttactcaaaagtttagagaatctctgtttctttccattttaaaaacatattttaagataatagcataaagactttaaaaatgttcctcccctccatcttcccacacccagtcaccagcactgtattttctgtcaccaagacaatgatttcttgttattgaggctgttgcttttgtggatgtgtgattttaattttcaataaacttttgcatcttggttta

SEQ ID NO: 196521 - DNA, 2031 bp, Homo sapiens
  Payload ID: 18765
  Gene Name: tumor protein p63
  Uniprot ID: Q9H3D4
  ENST ID: ENST00000440651
  CDS Start-End: 1-2031
atgaattttgaaacttcacggtgtgccaccctacagtactgccctgacccttacatccagcgtttcgtagaaaccccagctcatttctcttggaaagaaagttattaccgatccaccatgtcccagagcacacagacaaatgaattcctcagtccagaggttttccagcatatctgggattttctggaacagcctatatgttcagttcagcccattgacttgaactttgtggatgaaccatcagaagatggtgcgacaaacaagattgagattagcatggactgtatccgcatgcaggactcggacctgagtgaccccatgtggccacagtacacgaacctggggctcctgaacagcatggaccagcagattcagaacggctcctcgtccaccagtccctataacacagaccacgcgcagaacagcgtcacggcgccctcgccctacgcacagcccagctccaccttcgatgctctctctccatcacccgccatcccctccaacaccgactacccaggcccgcacagtttcgacgtgtccttccagcagtcgagcaccgccaagtcggccacctggacgtattccactgaactgaagaaactctactgccaaattgcaaagacatgccccatccagatcaaggtgatgaccccacctcctcagggagctgttatccgcgccatgcctgtctacaaaaaagctgagcacgtcacggaggtggtgaagcggtgccccaaccatgagctgagccgtgaattcaacgagggacagattgcccctcctagtcatttgattcgagtagaggggaacagccatgcccagtatgtagaagatcccatcacaggaagacagagtgtgctggtaccttatgagccaccccaggttggcactgaattcacgacagtcttgtacaatttcatgtgtaacagcagttgtgttggagggatgaaccgccgtccaattttaatcattgttactctggaaaccagagatgggcaagtcctgggccgacgctgctttgaggcccggatctgtgcttgcccaggaagagacaggaaggcggatgaagatagcatcagaaagcagcaagtttcggacagtacaaagaacggtgatgcgtttcgtcagaacacacatggtatccagatgacatccatcaagaaacgaagatccccagatgatgaactgttatacttaccagtgaggggccgtgagacttatgaaatgctgttgaagatcaaagagtccctggaactcatgcagtaccttcctcagcacacaattgaaacgtacaggcaacagcaacagcagcagcaccagcacttacttcagaaacagacctcaatacagtctccatcttcatatggtaacagctccccacctctgaacaaaatgaacagcatgaacaagctgccttctgtgagccagcttatcaaccctcagcagcgcaacgccctcactcctacaaccattcctgatggcatgggagccaacattcccatgatgggcacccacatgccaatggctggagacatgaatggactcagccccacccaggcactccctcccccactctccatgccatccacctcccactgcacacccccacctccgtatcccacagattgcagcattgtcagtttcttagcgaggttgggctgttcatcatgtctggactatttcacgacccaggggctgaccaccatctatcagattgagcattactccatggatgatctggcaagtctgaaaatccctgagcaatttcgacatgcgatctggaagggcatcctggaccaccggcagctccacgaattctcctccccttctcatctcctgcggaccccaagcagtgcctctacagtcagtgtgggctccagtgagacccggggtgagcgtgttattgatgctgtgcgattcaccctccgccagaccatctctttcccaccccgagatgagtggaatgacttcaactttgacatggatgctcgccgcaataagcaacagcgcatcaaagaggagggggagtga

SEQ ID NO: 196522 - DNA, 676 bp, Homo sapiens
  Payload ID: 18765
  Gene Name: tumor protein p63
  ENST ID: ENST00000434928
  CDS Start-End: 127-676
gagagggacttgagttctgttatcttcttaagtagattcatattgtaagggtctcggggtgggggggttggcaaaatcctggagccagaagaaaggacagcagcattgatcaatcttacagctaacatgttgtacctggaaaacaatgcccagactcaatttagtgagccacagtacacgaacctggggctcctgaacagcatggaccagcagattcagaacggctcctcgtccaccagtccctataacacagaccacgcgcagaacagcgtcacggcgccctcgccctacgcacagcccagctccaccttcgatgctctctctccatcacccgccatcccctccaacaccgactacccaggcccgcacagtttcgacgtgtccttccagcagtcgagcaccgccaagtcggccacctggacgagtctcgccttgtctcccaggctggagtgcaatggcatgatctcagctcactgcaacctccacctcctgggttcaagtggttctcctttctcagcctcccaagtaggtgggattacaggcacgcgccaccacgcccagctaatttttggcacgacctcagctcactgcaacctccgccttctggattcaagcgattctcctttctcagcctcccaatattccactgaactgaagaaactctactgccaaattg

SEQ ID NO: 196523 - DNA, 2810 bp, Homo sapiens
  Payload ID: 18765
  Gene Name: tumor protein p63
  Uniprot ID: Q9H3D4
  ENST ID: ENST00000418709
  CDS Start-End: 29-1492
tcgttgatatcaaagacagttgaaggaaatgaattttgaaacttcacggtgtgccaccctacagtactgccctgacccttacatccagcgtttcgtagaaaccccagctcatttctcttggaaagaaagttattaccgatccaccatgtcccagagcacacagacaaatgaattcctcagtccagaggttttccagcatatctgggattttctggaacagcctatatgttcagttcagcccattgacttgaactttgtggatgaaccatcagaagatggtgcgacaaacaagattgagattagcatggactgtatccgcatgcaggactcggacctgagtgaccccatgtggccacagtacacgaacctggggctcctgaacagcatggaccagcagattcagaacggctcctcgtccaccagtccctataacacagaccacgcgcagaacagcgtcacggcgccctcgccctacgcacagcccagctccaccttcgatgctctctctccatcacccgccatcccctccaacaccgactacccaggcccgcacagtttcgacgtgtccttccagcagtcgagcaccgccaagtcggccacctggacgtattccactgaactgaagaaactctactgccaaattgcaaagacatgccccatccagatcaaggtgatgaccccacctcctcagggagctgttatccgcgccatgcctgtctacaaaaaagctgagcacgtcacggaggtggtgaagcggtgccccaaccatgagctgagccgtgaattcaacgagggacagattgcccctcctagtcatttgattcgagtagaggggaacagccatgcccagtatgtagaagatcccatcacaggaagacagagtgtgctggtaccttatgagccaccccaggttggcactgaattcacgacagtcttgtacaatttcatgtgtaacagcagttgtgttggagggatgaaccgccgtccaattttaatcattgttactctggaaaccagagatgggcaagtcctgggccgacgctgctttgaggcccggatctgtgcttgcccaggaagagacaggaaggcggatgaagatagcatcagaaagcagcaagtttcggacagtacaaagaacggtgatggtacgaagcgcccgtttcgtcagaacacacatggtatccagatgacatccatcaagaaacgaagatccccagatgatgaactgttatacttaccagtgaggggccgtgagacttatgaaatgctgttgaagatcaaagagtccctggaactcatgcagtaccttcctcagcacacaattgaaacgtacaggcaacagcaacagcagcagcaccagcacttacttcagaaacatctcctttcagcctgcttcaggaatgagcttgtggagccccggagagaaactccaaaacaatctgacgtcttctttagacattccaagcccccaaaccgatcagtgtacccatagagccctatctctatattttaagtgtgtgtgttgtatttccatgtgtatatgtgagtgtgtgtgtgtgtatgtgtgtgcgtgtgtatctagccctcataaacaggacttgaagacactttggctcagagacccaactgctcaaaggcacaaagccactagtgagagaatcttttgaagggactcaaacctttacaagaaaggatgttttctgcagattttgtatccttagaccggccattggtgggtgaggaaccactgtgtttgtctgtgagctttctgttgtttcctgggagggaggggtcaggtggggaaaggggcattaagatgtttattggaacccttttctgtcttcttctgttgtttttctaaaattcacagggaagcttttgagcaggtctcaaacttaagatgtctttttaagaaaaggagaaaaaagttgttattgtctgtgcataagtaagttgtaggtgactgagagactcagtcagacccttttaatgctggtcatgtaataatattgcaagtagtaagaaacgaaggtgtcaagtgtactgctgggcagcgaggtgatcattaccaaaagtaatcaactttgtgggtggagagttctttgtgagaacttgcattatttgtgtcctcccctcatgtgtaggtagaacatttcttaatgctgtgtacctgcctctgccactgtatgttggcatctgttatgctaaagtttttcttgtacatgaaaccctggaagacctactacaaaaaaactgttgtttggcccccatagcaggtgaactcattttgtgcttttaatagaaagacaaatccaccccagtaatattgcccttacgtagttgtttaccattattcaaagctcaaaatagaatttgaagccctctcacaaaatctgtgattaatttgcttaattagagcttctatccctcaagcctacctaccataaaaccagccatattactgatactgttcagtgcatttagccaggagacttacgttttgagtaagtgagatccaagcagacgtgttaaaatcagcactcctggactggaaattaaagattgaaagggtagactacttttcttttttttactcaaaagtttagagaatctctgtttctttccattttaaaaacatattttaagataatagcataaagactttaaaaatgttcctcccctccatcttcccacacccagtcaccagcactgtattttctgtcaccaagacaatgatttcttgttattgaggctgttgcttttgtggatgtgtgattttaattttcaataaacttttgcatcttggttta

SEQ ID NO: 196524 - DNA, 5479 bp, Homo sapiens
  Payload ID: 18766
  Gene Name: tumor protein p63 regulated 1
  Uniprot ID: Q6ZUI0
  ENST ID: ENST00000345063
  CDS Start-End: 168-995
cttggtgaagtgagattcagactgagtggggtcacagcacagggcactgtcttgcctggctttatctgagccaatcacacctctcctggccactatctgtggtctagccccctttgtgcagaaagagaaagaagagccttgaggaccagcctagtcaggctgaagaaatgtcaacaattgggagttttgaaggattccaggctgtgtctctgaagcaagagggagatgaccaaccctctgagactgaccacctatcgatggaggaagaggacccgatgccaagacagatttcaaggcagtcaagtgtgaccgaatcaactctttaccccaatccttatcatcagccttatatctcacggaagtactttgctacacggccgggggccattgagactgccatggaagacttgaaaggtcacgtagctgagacttctggagagaccattcaaggcttctggctcttgacaaagatagaccactggaacaatgagaaggagagaattctactggtcacagacaagactctcttgatctgcaaatacgacttcatcatgctgagttgtgtgcagctgcagcggattcctctgagcgctgtctatcgcatctgcctgggcaagttcaccttccctgggatgtccctggacaagagacaaggagaaggccttaggatctactgggggagtccggaggagcagtctcttctgtcccgctggaacccatggtccactgaagttccttatgctactttcactgagcatcctatgaaatacaccagtgagaaattccttgaaatttgcaagttgtctgggttcatgtctaagcttgttccagctatccagaatgcccacaagaattcaactggatctggaagaggaaagaaactgatggtgttaactgaacccattttgattgagacctacacagggctgatgtcattcattggaaaccgcaacaaacttggctattcccttgcccgtgggagtattggtttttgagagtctttttggtaccataagcatatcatccacagatatgtcactttgaaaattccagtttgacccacgctatttttggactgaaacaattaattatttttaaatgacgctttatgatttagaaatttagtatttccgaaaatttaaaagcttgattggactgatagatacacactttagacctcatacaagaataatcaaattttcttaaaactagaaaataaatgctgctgagcctatcaaatactgttatcaaatgagtgcctgatcatcaactcaggaaagaagactctaagtcctgttgcttcagctctctaaatgtaggcttttttttttttttttttttaggtcttggtcttcagccctcttatcctgatttattctctcattggggtctcactgtctctagtattttagctaccacttgataaggatgacttccaaatttatattcccattcccaatatttattccaagactcagttttgcatttctgactgctaatcatctatatatcagtgtcccagtggcctcttaattgagcattatcaaaatcctgtggtatttatatggtcccagttatccatccctgaagtctgtcaattttgatttctctaaattccttgccatgacatcctatatatgatcacatctctatacggcttagcattgtattccgatgcccagatgtcaaacttgaagctcattctcttatcaaaattgttcatgtattcctcctttccattcttatagctgtattattagatcaggtttttaattctgctcaaccaattattaccacagcctgttaaatggaatccctactccaaggctgactgtttcaatctatcctacacttggtttctagctcatttacttataccatcttttgttcaaatatatattttttaataacagacctttttcttctaaagaaatcttttgtagaagcagcatatacgaagcagataaaagtaggttcaatgcggttggagtgaagatgagaatgccacaggcatctttctttctaggcctcagaggtgctgcatatggaatgtccatggatcgcagagggttttgaagaccatgttttcaaaaacactgtcttaacactctattgtcattgctcttttccctcttatttcctctttgtctcttcccgacttagatctaattttcaacaacccaggaaattatctcatatgtttgcatctctcaagtttcttttcttttttctttcagagtcttattttatctaaatttatgtagaaaaaaaagctttgaatgttgactacatagacattactacaataagctttttgcctttcccaagactcaaaattgacacatctttgttgatgtttaagttgaaattccagccaacttttttttgacttttatgtgaagtttaaagtcttttctttgaaaagcttgcttcctcaatttcaaagatttgtcctctgatatatttataaacatcaatttaatgcagacattcaaaccctaaaccttgaataactcttattttattttgtctttgtttacttccattaatttttttttctttccctctcttccgcctttacagcacccactttttcttccccccatgatggcaaatattgttatagtccccaaggcagggaacttctattcagactgtaaaaggaaatgttgaaatccatagctgtcctgtcaacagtagtggaatgaaaagtcgttggattgttttggcactggttctgaagcaggcataattggcaaattattataatactgctgcccgaaaatccccatttgcctcaagatagtggcatttattggcagaagcctctgaaatgtccagcacattcttttgagttaccatttaaggatcagcctgacaatcgacttctctctgcacatttgccccctttgtaacctaagccagactgttcccaaatgaccttctaaaggacacagtgcaccatcatcaatggaaacagttcagaaaggatgacaggagggagatgtttcttagttctgagagccagtctgtaacaatgggataagcatttaatggaatcaaagctgttttgcataaagagtgaactcagagacgacaagagggtctttatgaattcccttcacattttgtaaaaactgtcatatataggctatccccttaattgataaatgggatctagaaagcggtattatgaccagagggtgagaagatttaggaatttggatagcagttcaagataagaaagaacttcttatagttataaattttcaatgatggaatgggttgcttctttaaacagtgagcccaccatcacttggtatgttcaaggaaagactagataaagtcgatattgtgagaggaattgctgtatgataccgtttggagaaatgattgacataatcttttaaggccggtgaccctatcattttccaaataattgttgctagtacttagttaattagacccatttttttcttaggaaagagttggatcaatcatgggagaccctgaaaaatttccttacctttcctaaggtttaatttcctcttctgcgaaatggagacaattatattacttttgcttatttcataaagatcttgtgaggattcaatgaaatgaggttaaattcttttattaaacagaaagttttgagtatttgcctagagagtgatgtgacttttgcagcagaaggtgggaaaacatccaagggaactacatttcctccagaaattgtttcttcattaccatcgacctactgattatggttttctcattttacacttggtgttcttacttgggatctttgtccttaagctcaacagggagccacaacccaggggacctatgtgtacacttggagtttttatcagactatcatttgaacttaccactacagtttagcaaatggcatgatgagtttgattgataataggagtagacgcaagatacattaagtagagtacaaagcatttcataaccaaaatgtcatggttggaggtcttcattattcggtctttatctcattcaggaatttccacttgaaaaatctctgataagctttatttcagaaactgcttgaacagctccactgacaaatgcctcactatcttctgatacatcgtaggcagttctgagggtgagaaagttcaaagcagatagatgttttaacacaacaggaggacttttaaacaatcaccaggactcactcctcggtggtcaattgggcctgtttggaggcctgacctttggtcatcttaaggtcatctaaggcagaaaagagaagctcacttataagttggcacttctgaatcatttgccttgaggtccattttttattcagcctttgtttaaaccttcttaggaagccagtttgtagagttctggggataagaaggcagaaaaaccatgtcaattcagtgcttttatttcacagaaaatgaagcaaaggcctagaaactagaaagacatttctcaaaaagaagatggtgaacttttggaaatactgagattagactacattttccaatttctatccctagcccactgctctttccaatataatatctgtattccatgggaaagacatgccatctgaattgatgtatcgtagttgttgagataattttgaaatgagaaaacaatagggcacagtcgtttgggaagaatttccagaaattgccatcattttcttaaaggctaaggacacttatagagctctccgatttcctatctgataaaaaaagcccaaacaaagctgcggaagctggcagagccagcagatattttgtaaggcagcttcacctctgctggcattttgtggggcaggagagggggagggcaaaggtattaaatttaggcttaaaagctcctcagaaattctttacacacaagagaccaagttggagaaaagaagatgacttgtgccaaggggaagaaagagagagactaatgcctgtggttttcaaaggttaacaacaacataaaaaagccaaggtatttgcacagggatgaatgctcattggctcttggccaacaattatacaagggcttgtgcccacatcctgtagctgtggtttagggacgctgctcatgagtgacttcttatgcttagtggcaggaaactttagtcactgatgtgtaaactcacctttggtctgcacctcccacaacgtgctccgaaagcagttaggggactaggcctcttgatttccttgtagataccagttccccagaagctaaggaaaaactctgaggccttggagttactgagagtggaccaatacttgtcttattctacctgattttggcaactgcttagggttcttctgtatccacaaaaaggaattatgatatcctctgctaaaccctctctttagcctcaaagcccaagaccaaaaaaaatgagccatatttcattgcaggcctgctgccaatgtgaaatataaggaataaagtcatgagactgcttctcaaccta

SEQ ID NO: 196525 - DNA, 411 bp, Homo sapiens
  Payload ID: 18766
  Gene Name: tumor protein p63 regulated 1
  ENST ID: ENST00000456832
  CDS Start-End: 12-411
aggctgaagaaatgtcaacaattgggagttttgaaggattccaggctgtgtctctgaagcaagagggagatgaccaaccctctgagactgaccacctatcgatggaggaagaggacccgatgccaagacagatttcaaggcagtcaagtgtgaccgaatcaactctttaccccaatccttatcatcagccttatatctcacggaagtactttgctacacggccgggggccattgagactgccatggaagacttgaaaggtcacgtagctgagacttctggagagaccattcaaggcttctggctcttgacaaaaacggatccattaagccagcaccaaggagaacatcttgacactttatggaatttcaaaaagtatgatatgatggcaataaagtggctcttcagcagaa

SEQ ID NO: 196526 - DNA, 616 bp, Homo sapiens
  Payload ID: 18766
  Gene Name: tumor protein p63 regulated 1
  ENST ID: ENST00000425670
  CDS Start-End: 1-451
cattgagactgccatggaagacttgaaaggtcacgtagctgagacttctggagagaccattcaaggcttctggctcttgacaaagatagaccactggaacaatgagaaggagagaattctactggtcacagacaagactctcttgatctgcaaatacgacttcatcatgctgagttgtgtgcagctgcagcggattcctctgagcgctgtctatcgcatctgcctgggcaagttcaccttccctgggatgtccctggacaagagacaaggagaaggccttaggatctactgggggagtccggaggagcagtctcttctgtcccgctggaacccatggtccactgaagttccttatgctactttcactgagcatcctatgaaatacaccagtgagaaattccttgaaatttgcaagtatgcagagactactgctgggaaggatgagtactgaacccagaactgatgaatagcagtgaacgcattatgtgtgccctacaaccatcatgatctacagaccaaccatttgtactcttttcttgtatttctatccatcttttcaaggggatcatgtaaatgaaccaatgttttagcaattaaatttaactttatactctta

SEQ ID NO: 196527 - DNA, 2296 bp, Homo sapiens
  Payload ID: 18766
  Gene Name: tumor protein p63 regulated 1
  Uniprot ID: Q6ZUI0
  ENST ID: ENST00000433971
  CDS Start-End: 1228-2055
agacttgcttcaggttccaacccggtaaggcaaatggagaggctgtcaggagaccagaagtttacctcagctattgcaccgacgcaccacgtgctctggtgcacatccaccgcctcttcctgcctcagtttctccttttgtaaaacaacagcttgtaaaggcctggggatcttctcatccacgggagttttctaaggatgcaggcgaaagaggatctcactctgttgcctaggctggaatgtggtggcatgatcacagctcactgcagccacaaattcctgggctcaagcaatcctcctgcttcagcctcctgagtagctgggactataggcaagcgctactgtgctcagctctcactctctggctgaatgtagaggactctgaaggcttaggcaagaggggagttataaggcaccacagaaccctgaatgactgcatggagcagaacccttcgcaaacctgctcttcaggcctcctttttgagacagctggaaaagattctttctccttttctagcaattacttcctccctccgactcaaatgcctactcagcctctagtattcagtggctgctgcagtttgcggggttcttctccagaccatagatgcctcagtttttgcagtacctggaggtttcaccagtgaaagctctgaaacagcaaagatggcagcctgccctttcctctgggagttccatcctaggggtgtacagaactgttgctggcctgaatacacctgcatgaggtggctgaagactccagttggattatttatgaggatggcctgtgcaaaaagacacccagagatttcatgctgttgattcacagaaagcctgttcctcttcactccgtagagtcctcagagtctggatcatcccttacagaagatccttgataatatttctgatatacctccaaggttccgtttgtcaaatgtgtgcgacccttctgataagtcaccagaggtgatgagggagagagagaaagaaagcaaattacaactgtaaagagtctctgaacagtgaaagatcaaaacagacagtctctggctttactggatgagtcaccattgcagcccgaccgcaaaaacaagcgtggcttctgtacttagcagcagtcttcctgtctggaaaggaaacattgctcagattggagatactggccattttatagacttcaaagcaacttaggccactgaactgtcaggcgggaaaacaggctgaagaaatgtcaacaattgggagttttgaaggattccaggctgtgtctctgaagcaagagggagatgaccaaccctctgagactgaccacctatcgatggaggaagaggacccgatgccaagacagatttcaaggcagtcaagtgtgaccgaatcaactctttaccccaatccttatcatcagccttatatctcacggaagtactttgctacacggccgggggccattgagactgccatggaagacttgaaaggtcacgtagctgagacttctggagagaccattcaaggcttctggctcttgacaaagatagaccactggaacaatgagaaggagagaattctactggtcacagacaagactctcttgatctgcaaatacgacttcatcatgctgagttgtgtgcagctgcagcggattcctctgagcgctgtctatcgcatctgcctgggcaagttcaccttccctgggatgtccctggacaagagacaaggagaaggccttaggatctactgggggagtccggaggagcagtctcttctgtcccgctggaacccatggtccactgaagttccttatgctactttcactgagcatcctatgaaatacaccagtgagaaattccttgaaatttgcaagttgtctgggttcatgtctaagcttgttccagctatccagaatgcccacaagaattcaactggatctggaagaggaaagaaactgatggtgttaactgaacccattttgattgagacctacacagggctgatgtcattcattggaaaccgcaacaaacttggctattcccttgcccgtgggagtattggtttttgagagtctttttggtaccataagcatatcatccacagatatgtcactttgaaaattccagtttgacccacgctatttttggactgaaacaattaattatttttaaatgacgctttatgatttagaaatttagtatttccgaaaatttaaaagcttgattggactgatagatacacactttagacctcatacaagaataatcaaattttcttaaaactagaaaataaatgctgctgagcctatc

SEQ ID NO: 196528 - DNA, 1129 bp, Homo sapiens
  Payload ID: 18766
  Gene Name: tumor protein p63 regulated 1
  ENST ID: ENST00000412373
  CDS Start-End: 828-1129
aggcttgaaaaagaggtcaggccccaggagctgggctggagcagtgaggagtgtttcttccaagagaagatgactgcctgagaggattatttatgaggatggcctgtgcaaaaagacacccagagatttcatgctgttgattcacagaaagcctgttcctcttcactccgtagagtcctcagagtctggatcatcccttacagaagatccttgataatatttctgatatacctccaaggttccgtttgtcaaatgtgtgcgacccttctgataagtcaccagaggtgatgagggagagagagaaagaaagcaaattacaactgtaaagagtctctgaacagtgaaagatcaaaacagacagtctctggctttactggatgagtcaccattgcagcccgaccgcaaaaacaagcgtggcttctgtacttagcagcagtcttcctgtctggaaaggaaacattgctcagattggagatactggccattttatagacttcaaagcaacttaggccactgaactgtcaggcgggaaaacaggatgtcttccatttggaagcccctttgcttctaagaagttccagagaccatcccaggcccacagagttataaggattcatctgggcactgaagacatttgggacctcagtgaagtttctccgaggccagatggtcacattgattttctggaatcattttgaataaaaatgagcgaggtggtgaacacaatgcaaggctctccacgtactgtctggtattgttcaaccagctccacgactccctgagggcagagatgagcagatgttaatggataaagccaggctgaagaaatgtcaacaattgggagttttgaaggattccaggctgtgtctctgaagcaagagggagatgaccaaccctctgagactgaccacctatcgatggaggaagaggacccgatgccaagacagatttcaaggcagtcaagtgtgaccgaatcaactctttaccccaatccttatcatcagccttatatctcacggaagtactttgctacacggccgggggccattgagactgccatggaagacttgaaaggtcacgtagctgagacttctggagagaccattcaaggcttctggctcttgacaaa

SEQ ID NO: 196529 - DNA, 2189 bp, Homo sapiens
  Payload ID: 18767
  Gene Name: tumor protein p63 regulated 1-like
  Uniprot ID: Q5T0D9
  ENST ID: ENST00000344579
  CDS Start-End: 24-665
cggggtcggtaaggggtgcggcaatgctgcaactgcgggactcggtggactcggccggtacgagccccacggcggtgctggcggccggcgaggaggtgggggcaggcggcggcccgggcggggggcggccgggggcggggacgccgctgcgccagacactctggcctctcagcatccacgaccccacgcgccgcgcccgcgtcaaggagtacttcgtgttccggcccggcagcatcgagcaggcagtggaggagatccgcgtggtggtgcggcccgtggaggacggcgagatccagggagtgtggctgcttaccgagcgagaaggttttgggattcgaattcagtgggacaagcaaagtcgtccttccttcataaacagatggaatccctggtctaccaacgtgccctatgccactttcacagaacacccgatggctggcgcagatgagaagacagcatctctgtgtcagttggaaagcttcaaggctctgttaatccaagctgtcaaaaaagcccaaaaagaaagccctttgccaggacaggcgaatggcgtgctgatcctggagcgccccctgctcatcgagacctacgtgggactcatgtccttcattaacaacgaggcgaaactgggctactccatgaccaggggcaaaataggcttttagccgctgcgttctgggagctcctcccccttctgggagctcctccccctccccagaaggccaagggatgtgggggctgggggactgggaggcctggcagtcttcatgctgccctgctgctgctggaaggatggggatctttcacctttagggatctcagcacaattagaatcgtaaagtgaattctatctatttaattggatattggactctgctcatataagctacagacaaaagccaaaagactctcgctgtccctgtgctgctggtatttcattctctgtaacttcagttctggtgttttccttgagtatctacttggcttctcgtggtttttcccaccccagctgccccagcacgcgggacccatagcacaccccttagcgcttgcctaggttgctgaaaacagggaggcacctggtatctcgagtgcctgcagttgcaagtatgtttacacctggtgtccaattttgtattttaaaatgtaatccatttttacttcagctcatccaaaagcagccagcagaccggttgactgagaccggtctgtggctgtgggccccttggtgacccgctgctcttttggaaatgggtgacctgaagtgacactttttccacaattaacccaagttgtgttaatacttcaggtctgtttcccagacccagaaagctttacagaaaatcattgtaagacaatttattaatttgagaaagtcaccttgacagttctttgcacacaagttttacacctctctggattcgaagtttgtattgtattcatagttaaagggaatcgggtactttgcttgttgaataatgcactttaaaacaaggaaccgtatcaggccagcatggtggctcatgcctgtaatcccagcattttgggaggctcaggcagacaaatcgctctagctcagaagttgcagagcagcctgggcaacatggtgaaacccgtctctaccaaacagacaaaaagcagccaggcgtggtggcacatctgtggtcccagctacttgagaggctgagccaggaggatcgcttgagcccaggaggcggaggttgcagtgagctgagatggcaccacttattgcactccagcccgggcgacagagcgagactccatctaccagatccttatgacgcagctgatgcctgccttggttcctaccactctggtgtagacagaggactttgtccaagtctcacactaaacatgcccgggcttcgatgtgcctggaggatttccccacagggacccacgcacctccctgtatctgcgcagcttgctcgtgtggctggaagcgctgtcgataagcttcacgcactggcttgccagttcttcagctctaggacttgtagctttaagcaaacggtgtggcatgggttgagtgtggccacctgcaggatgtgcagggctgcctcagaagctggctggggactctagcctctgtgttcataaagacattaagaagtggatggatgttgttccttttttgaagttgtcattaaagtaggtgcaacaaccaa

SEQ ID NO: 196530 - DNA, 2414 bp, Homo sapiens
  Payload ID: 18767
  Gene Name: tumor protein p63 regulated 1-like
  Uniprot ID: Q5T0D9
  ENST ID: ENST00000378344
  CDS Start-End: 72-890
gggtggtggcggtggctgcggcgacggcggtcgcgtcggcgtcagggtcggggtcggtaaggggtgcggcaatgctgcaactgcgggactcggtggactcggccggtacgagccccacggcggtgctggcggccggcgaggaggtgggggcaggcggcggcccgggcggggggcggccgggggcggggacgccgctgcgccagacactctggcctctcagcatccacgaccccacgcgccgcgcccgcgtcaaggagtacttcgtgttccggcccggcagcatcgagcaggcagtggaggagatccgcgtggtggtgcggcccgtggaggacggcgagatccagggagtgtggctgcttaccgaggtggatcactggaacaatgagaaggagcggctggtgctggtcacggagcagtccctgcttatctgtaaatacgacttcatcagtctccagtgccagcaggtggtgcggatagcgctcaacgcagtagacaccatttcctacggagaattccagtttccccctaaatcgctcaacaagcgagaaggttttgggattcgaattcagtgggacaagcaaagtcgtccttccttcataaacagatggaatccctggtctaccaacgtgccctatgccactttcacagaacacccgatggctggcgcagatgagaagacagcatctctgtgtcagttggaaagcttcaaggctctgttaatccaagctgtcaaaaaagcccaaaaagaaagccctttgccaggacaggcgaatggcgtgctgatcctggagcgccccctgctcatcgagacctacgtgggactcatgtccttcattaacaacgaggcgaaactgggctactccatgaccaggggcaaaataggcttttagccgctgcgttctgggagctcctcccccttctgggagctcctccccctccccagaaggccaagggatgtgggggctgggggactgggaggcctggcagtcttcatgctgccctgctgctgctggaaggatggggatctttcacctttagggatctcagcacaattagaatcgtaaagtgaattctatctatttaattggatattggactctgctcatataagctacagacaaaagccaaaagactctcgctgtccctgtgctgctggtatttcattctctgtaacttcagttctggtgttttccttgagtatctacttggcttctcgtggtttttcccaccccagctgccccagcacgcgggacccatagcacaccccttagcgcttgcctaggttgctgaaaacagggaggcacctggtatctcgagtgcctgcagttgcaagtatgtttacacctggtgtccaattttgtattttaaaatgtaatccatttttacttcagctcatccaaaagcagccagcagaccggttgactgagaccggtctgtggctgtgggccccttggtgacccgctgctcttttggaaatgggtgacctgaagtgacactttttccacaattaacccaagttgtgttaatacttcaggtctgtttcccagacccagaaagctttacagaaaatcattgtaagacaatttattaatttgagaaagtcaccttgacagttctttgcacacaagttttacacctctctggattcgaagtttgtattgtattcatagttaaagggaatcgggtactttgcttgttgaataatgcactttaaaacaaggaaccgtatcaggccagcatggtggctcatgcctgtaatcccagcattttgggaggctcaggcagacaaatcgctctagctcagaagttgcagagcagcctgggcaacatggtgaaacccgtctctaccaaacagacaaaaagcagccaggcgtggtggcacatctgtggtcccagctacttgagaggctgagccaggaggatcgcttgagcccaggaggcggaggttgcagtgagctgagatggcaccacttattgcactccagcccgggcgacagagcgagactccatctaccagatccttatgacgcagctgatgcctgccttggttcctaccactctggtgtagacagaggactttgtccaagtctcacactaaacatgcccgggcttcgatgtgcctggaggatttccccacagggacccacgcacctccctgtatctgcgcagcttgctcgtgtggctggaagcgctgtcgataagcttcacgcactggcttgccagttcttcagctctaggacttgtagctttaagcaaacggtgtggcatgggttgagtgtggccacctgcaggatgtgcagggctgcctcagaagctggctggggactctagcctctgtgttcataaagacattaagaagtggatggatgttgttccttttttgaagttgtcattaaagtaggtgcaacaaccaa

SEQ ID NO: 196531 - DNA, 4854 bp, Homo sapiens
  Payload ID: 18768
  Gene Name: tumor protein p73
  Uniprot ID: O15350
  ENST ID: ENST00000346387
  CDS Start-End: 111-1733
aggggacgcagcgaaaccggggcccgcgccaggccagccgggacggacgccgatgcccggggctgcgacggctgcagagcgagctgccctcggaggccggcgtggggaagatggcccagtccaccgccacctcccctgatgggggcaccacgtttgagcacctctggagctctctggaaccagacagcacctacttcgaccttccccagtcaagccgggggaataatgaggtggtgggcggaacggattccagcatggacgtcttccacctggagggcatgactacatctgtcatggcccagttcaatctgctgagcagcaccatggaccagatgagcagccgcgcggcctcggccagcccctacaccccagagcacgccgccagcgtgcccacccactcgccctacgcacaacccagctccaccttcgacaccatgtcgccggcgcctgtcatcccctccaacaccgactaccccggaccccaccactttgaggtcactttccagcagtccagcacggccaagtcagccacctggacgtactccccgctcttgaagaaactctactgccagatcgccaagacatgccccatccagatcaaggtgtccaccccgccacccccaggcaccgccatccgggccatgcctgtttacaagaaagcggagcacgtgaccgacgtcgtgaaacgctgccccaaccacgagctcgggagggacttcaacgaaggacagtctgctccagccagccacctcatccgcgtggaaggcaataatctctcgcagtatgtggatgaccctgtcaccggcaggcagagcgtcgtggtgccctatgagccaccacaggtggggacggaattcaccaccatcctgtacaacttcatgtgtaacagcagctgtgtagggggcatgaaccggcggcccatcctcatcatcatcaccctggagatgcgggatgggcaggtgctgggccgccggtcctttgagggccgcatctgcgcctgtcctggccgcgaccgaaaagctgatgaggaccactaccgggagcagcaggccctgaacgagagctccgccaagaacggggccgccagcaagcgtgccttcaagcagagcccccctgccgtccccgcccttggtgccggtgtgaagaagcggcggcatggagacgaggacacgtactaccttcaggtgcgaggccgggagaactttgagatcctgatgaagctgaaagagagcctggagctgatggagttggtgccgcagccactggtggactcctatcggcagcagcagcagctcctacagaggccttttttaacaggattggggtgtccaaactgcatcgagtatttcacctcccaagggttacagagcatttaccacctgcagaacctgaccattgaggacctgggggccctgaagatccccgagcagtaccgcatgaccatctggcggggcctgcaggacctgaagcagggccacgactacagcaccgcgcagcagctgctccgctctagcaacgcggccaccatctccatcggcggctcaggggaactgcagcgccagcgggtcatggaggccgtgcacttccgcgtgcgccacaccatcaccatccccaaccgcggcggcccaggcggcggccctgacgagtgggcggacttcggcttcgacctgcccgactgcaaggcccgcaagcagcccatcaaggaggagttcacggaggccgagatccactgagggcctcgcctggctgcagcctgcgccaccgcccagagacccaagctgcctcccctctccttcctgtgtgtccaaaactgcctcaggaggcaggaccttcgggctgtgcccggggaaaggcaaggtccggcccatccccaggcacctcacaggccccaggaaaggcccagccaccgaagccgcctgtggacagcctgagtcacctgcagaaccttctggagctgccctagtgctgggcttgtggggcgggggctggcccactctcagccctgccactgccccggcgtgctccatggcaggcgtgggtggggaccgcagcgtcggctccgacttccaggcttcatcctagagactgtcatctcccaaccaggcgaggtccttccaaaggaaaggatcctctttgctgatggactgccaaaaagtattttgcgacatcttttggttctggatagtagtgagcagccaagtgactgtgtctgaaacaccagtgtattttcagggaatgtccctaactgcgtcttgcccgcgccgggggctggggactctctctgctggacttgggactggcctctgcccccagcacgctgtattctgcaggaccgcctccttcctgcccctaacaacaaccacagtgttgctgaaattggagaaaactggggagggcgcaaccccccccaggcgcggggaagcatgtggtaccgcctcagccagtgcccctcagcctggccacagtcgcctctcctcggggacccctcagcagaaagggacagcctgtccttagaggactggaaattgtcaatatttgataaaatgatacccttttctacatggtgggtcagcttttttttttttttttttaactttctttctcagcattctctttggagttcaacctagcgcccatgagccaggctgaggaagctgagtgagaagccaggtgggcgggacttgttcccaggaaggccgggtggggaggaagcctagagggaaccccaggaagggcaaatccaggcaaatctgcaggaatgctctgccatgggagcagctcctcccttgccacggccaccttctctagcactgcaaggtccacagggcattgctttcctttctaggcggtggcagtcagggaacagactgaggtaggtgtaggggggtctaggccttcgtggagcaccccagggagttagtaggccccggggagacagagtctgcacaggccctttctggggccacctccatccacgaggagcagcctgagccttggtggccgaaccttgaccgtcccggagcacagcttcagggcagggaaccggagcccctggggggcctcacgggtgtgacgaggcccttcattgcaggcaggtgggccaatgggagccctcacccacgcaagccgagacaccacccagagtgcaggctgcctggccccttctggcacggccagctccacaccccctgcctagggtatgtgtggtcctaagggctaggagcttcccctactaacatctcccagaaaaagcagttaagcccctcagggcacagcaaggttagacacagcccccatccccagatcaggactccatcttgctaagtggcatcaccgtcaccagcctccccttatttaaaagcagcgactggtgttgccgcaggtacctggtctacgaagacgcaggcatccctctcccaccgtccacctccccgggggccgctgacagcacagtcgcctgggtgcacgcttgtgggggcagcaggaacggggctgtcggctctcaggggatctggctgcagccagggcgagggcctggcccttccttccagctccttccggctccttccagctgaagggcaggaagctctggccgcttagcttctagggttccatctccctagaaaggtgcccacgcccagggcatcagtcagtagcggcagcagcagcagactcggggctttcccagggtggcgcagccaccccagctgcatgtcacctcagctctccatcttattgccattttgtagatgaggaagctgagaccagaaaggctaagacccatgccccaggcaccacacccatctcttgggggctgggcacctgctacccgaggccacctcctgaagcccccactcttcccccatgttccacttcaggagccgcgggggcccatcctgacacccggggttcctcagcccagcgcagatgtgcttcagttccagagggcttgttgatttgtttcttaggtacgttacctgtccaccctgagtccagtgaggctgtcccaagagcccctgtagtgtgctcctgggaagggctgggggggctgggggggctgggagaggcccaggggcagctgtcactggaaccccagccagatgtccaaggaagccggccagaacacggagcagccagatggccccagctgcacctgtctagggagcccatgcagcctccttgcactggagaagcagctgtgaaagtagacagagttgagacttcgccgtggtcaggagaaaatgcaaattcccaggaacaagaatcctttaagtgatatgtttttataaaactaaacaaatcaacaaataaatcttgaaggcggatggttttcccagcagtgcaggggttggagggaggctgctggcactcctggggccaagggggacaggcagtggtcctgagtctgctcagagaggcaaggcagaaggagctcgccaggcaggtcagctcacatctgtccaagtcgctctggtcagaaacagcgactctcccccattcccccagcgttcccaccaggcctgggctgctgggaagcccttgctgtacccaggagcccgacccgcagtatcctggcacagagccacttgtcactcagaacagtcagtgtctccaacgcacaaacatccactcctctgttaccagttaaagcactttaatgctttaaggtgaaaacgaaatcccatccgtgtttttcgtgtaagatcgtgcttctccgagcagtattaatggacgccctccaatgacataacaactgtttttggtaatgtaatcttgggaaaatgtgttatttttttagctgtgtttcagtggggatttttgtttttgtaacataataaagtgtatgttccaatg

SEQ ID NO: 196532 - DNA, 2140 bp, Homo sapiens
  Payload ID: 18768
  Gene Name: tumor protein p73
  Uniprot ID: O15350
  ENST ID: ENST00000354437
  CDS Start-End: 111-1610
aggggacgcagcgaaaccggggcccgcgccaggccagccgggacggacgccgatgcccggggctgcgacggctgcagagcgagctgccctcggaggccggcgtggggaagatggcccagtccaccgccacctcccctgatgggggcaccacgtttgagcacctctggagctctctggaaccagacagcacctacttcgaccttccccagtcaagccgggggaataatgaggtggtgggcggaacggattccagcatggacgtcttccacctggagggcatgactacatctgtcatggcccagttcaatctgctgagcagcaccatggaccagatgagcagccgcgcggcctcggccagcccctacaccccagagcacgccgccagcgtgcccacccactcgccctacgcacaacccagctccaccttcgacaccatgtcgccggcgcctgtcatcccctccaacaccgactaccccggaccccaccactttgaggtcactttccagcagtccagcacggccaagtcagccacctggacgtactccccgctcttgaagaaactctactgccagatcgccaagacatgccccatccagatcaaggtgtccaccccgccacccccaggcaccgccatccgggccatgcctgtttacaagaaagcggagcacgtgaccgacgtcgtgaaacgctgccccaaccacgagctcgggagggacttcaacgaaggacagtctgctccagccagccacctcatccgcgtggaaggcaataatctctcgcagtatgtggatgaccctgtcaccggcaggcagagcgtcgtggtgccctatgagccaccacaggtggggacggaattcaccaccatcctgtacaacttcatgtgtaacagcagctgtgtagggggcatgaaccggcggcccatcctcatcatcatcaccctggagatgcgggatgggcaggtgctgggccgccggtcctttgagggccgcatctgcgcctgtcctggccgcgaccgaaaagctgatgaggaccactaccgggagcagcaggccctgaacgagagctccgccaagaacggggccgccagcaagcgtgccttcaagcagagcccccctgccgtccccgcccttggtgccggtgtgaagaagcggcggcatggagacgaggacacgtactaccttcaggtgcgaggccgggagaactttgagatcctgatgaagctgaaagagagcctggagctgatggagttggtgccgcagccactggtggactcctatcggcagcagcagcagctcctacagaggccgagtcacctacagcccccgtcctacgggccggtcctctcgcccatgaacaaggtgcacgggggcatgaacaagctgccctccgtcaaccagctggtgggccagcctcccccgcacagttcggcagctacacccaacctggggcccgtgggccccgggatgctcaacaaccatggccacgcagtgccagccaacggcgagatgagcagcagccacagcgcccagtccatggtctcggggtcccactgcactccgccacccccctaccacgccgaccccagcctcgtcaggacctgggggccctgaagatccccgagcagtaccgcatgaccatctggcggggcctgcaggacctgaagcagggccacgactacagcaccgcgcagcagctgctccgctctagcaacgcggccaccatctccatcggcggctcaggggaactgcagcgccagcgggtcatggaggccgtgcacttccgcgtgcgccacaccatcaccatccccaaccgcggcggcccaggcggcggccctgacgagtgggcggacttcggcttcgacctgcccgactgcaaggcccgcaagcagcccatcaaggaggagttcacggaggccgagatccactgagggcctcgcctggctgcagcctgcgccaccgcccagagacccaagctgcctcccctctccttcctgtgtgtccaaaactgcctcaggaggcaggaccttcgggctgtgcccggggaaaggcaaggtccggcccatccccaggcacctcacaggccccaggaaaggcccagccaccgaagccgcctgtggacagcctgagtcacctgcagaacc

SEQ ID NO: 196533 - DNA, 4899 bp, Homo sapiens
  Payload ID: 18768
  Gene Name: tumor protein p73
  Uniprot ID: O15350
  ENST ID: ENST00000357733
  CDS Start-End: 111-1778
aggggacgcagcgaaaccggggcccgcgccaggccagccgggacggacgccgatgcccggggctgcgacggctgcagagcgagctgccctcggaggccggcgtggggaagatggcccagtccaccgccacctcccctgatgggggcaccacgtttgagcacctctggagctctctggaaccagacagcacctacttcgaccttccccagtcaagccgggggaataatgaggtggtgggcggaacggattccagcatggacgtcttccacctggagggcatgactacatctgtcatggcccagttcaatctgctgagcagcaccatggaccagatgagcagccgcgcggcctcggccagcccctacaccccagagcacgccgccagcgtgcccacccactcgccctacgcacaacccagctccaccttcgacaccatgtcgccggcgcctgtcatcccctccaacaccgactaccccggaccccaccactttgaggtcactttccagcagtccagcacggccaagtcagccacctggacgtactccccgctcttgaagaaactctactgccagatcgccaagacatgccccatccagatcaaggtgtccaccccgccacccccaggcaccgccatccgggccatgcctgtttacaagaaagcggagcacgtgaccgacgtcgtgaaacgctgccccaaccacgagctcgggagggacttcaacgaaggacagtctgctccagccagccacctcatccgcgtggaaggcaataatctctcgcagtatgtggatgaccctgtcaccggcaggcagagcgtcgtggtgccctatgagccaccacaggtggggacggaattcaccaccatcctgtacaacttcatgtgtaacagcagctgtgtagggggcatgaaccggcggcccatcctcatcatcatcaccctggagatgcgggatgggcaggtgctgggccgccggtcctttgagggccgcatctgcgcctgtcctggccgcgaccgaaaagctgatgaggaccactaccgggagcagcaggccctgaacgagagctccgccaagaacggggccgccagcaagcgtgccttcaagcagagcccccctgccgtccccgcccttggtgccggtgtgaagaagcggcggcatggagacgaggacacgtactaccttcaggtgcgaggccgggagaactttgagatcctgatgaagctgaaagagagcctggagctgatggagttggtgccgcagccactggtggactcctatcggcagcagcagcagctcctacagaggccgccccgggatgctcaacaaccatggccacgcagtgccagccaacggcgagatgagcagcagccacagcgcccagtccatggtctcggggtcccactgcactccgccacccccctaccacgccgaccccagcctcgtcaggacctgggggccctgaagatccccgagcagtaccgcatgaccatctggcggggcctgcaggacctgaagcagggccacgactacagcaccgcgcagcagctgctccgctctagcaacgcggccaccatctccatcggcggctcaggggaactgcagcgccagcgggtcatggaggccgtgcacttccgcgtgcgccacaccatcaccatccccaaccgcggcggcccaggcggcggccctgacgagtgggcggacttcggcttcgacctgcccgactgcaaggcccgcaagcagcccatcaaggaggagttcacggaggccgagatccactgagggcctcgcctggctgcagcctgcgccaccgcccagagacccaagctgcctcccctctccttcctgtgtgtccaaaactgcctcaggaggcaggaccttcgggctgtgcccggggaaaggcaaggtccggcccatccccaggcacctcacaggccccaggaaaggcccagccaccgaagccgcctgtggacagcctgagtcacctgcagaaccttctggagctgccctagtgctgggcttgtggggcgggggctggcccactctcagccctgccactgccccggcgtgctccatggcaggcgtgggtggggaccgcagcgtcggctccgacttccaggcttcatcctagagactgtcatctcccaaccaggcgaggtccttccaaaggaaaggatcctctttgctgatggactgccaaaaagtattttgcgacatcttttggttctggatagtagtgagcagccaagtgactgtgtctgaaacaccagtgtattttcagggaatgtccctaactgcgtcttgcccgcgccgggggctggggactctctctgctggacttgggactggcctctgcccccagcacgctgtattctgcaggaccgcctccttcctgcccctaacaacaaccacagtgttgctgaaattggagaaaactggggagggcgcaaccccccccaggcgcggggaagcatgtggtaccgcctcagccagtgcccctcagcctggccacagtcgcctctcctcggggacccctcagcagaaagggacagcctgtccttagaggactggaaattgtcaatatttgataaaatgatacccttttctacatggtgggtcagcttttttttttttttttttaactttctttctcagcattctctttggagttcaacctagcgcccatgagccaggctgaggaagctgagtgagaagccaggtgggcgggacttgttcccaggaaggccgggtggggaggaagcctagagggaaccccaggaagggcaaatccaggcaaatctgcaggaatgctctgccatgggagcagctcctcccttgccacggccaccttctctagcactgcaaggtccacagggcattgctttcctttctaggcggtggcagtcagggaacagactgaggtaggtgtaggggggtctaggccttcgtggagcaccccagggagttagtaggccccggggagacagagtctgcacaggccctttctggggccacctccatccacgaggagcagcctgagccttggtggccgaaccttgaccgtcccggagcacagcttcagggcagggaaccggagcccctggggggcctcacgggtgtgacgaggcccttcattgcaggcaggtgggccaatgggagccctcacccacgcaagccgagacaccacccagagtgcaggctgcctggccccttctggcacggccagctccacaccccctgcctagggtatgtgtggtcctaagggctaggagcttcccctactaacatctcccagaaaaagcagttaagcccctcagggcacagcaaggttagacacagcccccatccccagatcaggactccatcttgctaagtggcatcaccgtcaccagcctccccttatttaaaagcagcgactggtgttgccgcaggtacctggtctacgaagacgcaggcatccctctcccaccgtccacctccccgggggccgctgacagcacagtcgcctgggtgcacgcttgtgggggcagcaggaacggggctgtcggctctcaggggatctggctgcagccagggcgagggcctggcccttccttccagctccttccggctccttccagctgaagggcaggaagctctggccgcttagcttctagggttccatctccctagaaaggtgcccacgcccagggcatcagtcagtagcggcagcagcagcagactcggggctttcccagggtggcgcagccaccccagctgcatgtcacctcagctctccatcttattgccattttgtagatgaggaagctgagaccagaaaggctaagacccatgccccaggcaccacacccatctcttgggggctgggcacctgctacccgaggccacctcctgaagcccccactcttcccccatgttccacttcaggagccgcgggggcccatcctgacacccggggttcctcagcccagcgcagatgtgcttcagttccagagggcttgttgatttgtttcttaggtacgttacctgtccaccctgagtccagtgaggctgtcccaagagcccctgtagtgtgctcctgggaagggctgggggggctgggggggctgggagaggcccaggggcagctgtcactggaaccccagccagatgtccaaggaagccggccagaacacggagcagccagatggccccagctgcacctgtctagggagcccatgcagcctccttgcactggagaagcagctgtgaaagtagacagagttgagacttcgccgtggtcaggagaaaatgcaaattcccaggaacaagaatcctttaagtgatatgtttttataaaactaaacaaatcaacaaataaatcttgaaggcggatggttttcccagcagtgcaggggttggagggaggctgctggcactcctggggccaagggggacaggcagtggtcctgagtctgctcagagaggcaaggcagaaggagctcgccaggcaggtcagctcacatctgtccaagtcgctctggtcagaaacagcgactctcccccattcccccagcgttcccaccaggcctgggctgctgggaagcccttgctgtacccaggagcccgacccgcagtatcctggcacagagccacttgtcactcagaacagtcagtgtctccaacgcacaaacatccactcctctgttaccagttaaagcactttaatgctttaaggtgaaaacgaaatcccatccgtgtttttcgtgtaagatcgtgcttctccgagcagtattaatggacgccctccaatgacataacaactgtttttggtaatgtaatcttgggaaaatgtgttatttttttagctgtgtttcagtggggatttttgtttttgtaacataataaagtgtatgttccaatg

SEQ ID NO: 196534 - DNA, 2062 bp, Homo sapiens
  Payload ID: 18768
  Gene Name: tumor protein p73
  ENST ID: ENST00000378280
  CDS Start-End: 235-1515
ggattcagccagttgacagaactaagggagatgggaaaagcgaaaatgccaacaaacggcccgcatgttccccagcatcctcggctcctgcctcactagctgcggagcctctcccgctcggtccacgctgccgggcggccacgaccgtgacccttcccctcgggccgcccagatccatgcctcgtcccacgggacaccagttccctggcgtgtgcagaccccccggcgcctaccatgctgtacgtcggtgaccccgcacggcacctcgccacggcccagttcaatctgctgagcagcaccatggaccagatgagcagccgcgcggcctcggccagcccctacaccccagagcacgccgccagcgtgcccacccactcgccctacgcacaacccagctccaccttcgacaccatgtcgccggcgcctgtcatcccctccaacaccgactaccccggaccccaccactttgaggtcactttccagcagtccagcacggccaagtcagccacctggacgtactccccgctcttgaagaaactctactgccagatcgccaagacatgccccatccagatcaaggtgtccaccccgccacccccaggcaccgccatccgggccatgcctgtttacaagaaagcggagcacgtgaccgacgtcgtgaaacgctgccccaaccacgagctcgggagggacttcaacgaaggacagtctgctccagccagccacctcatccgcgtggaaggcaataatctctcgcagtatgtggatgaccctgtcaccggcaggcagagcgtcgtggtgccctatgagccaccacaggtggggacggaattcaccaccatcctgtacaacttcatgtgtaacagcagctgtgtagggggcatgaaccggcggcccatcctcatcatcatcaccctggagatgcgggatgggcaggtgctgggccgccggtcctttgagggccgcatctgcgcctgtcctggccgcgaccgaaaagctgatgaggaccactaccgggagcagcaggccctgaacgagagctccgccaagaacggggccgccagcaagcgtgccttcaagcagagcccccctgccgtccccgcccttggtgccggtgtgaagaagcggcggcatggagacgaggacacgtactaccttcaggtgcgaggccgggagaactttgagatcctgatgaagctgaaagagagcctggagctgatggagttggtgccgcagccactggtggactcctatcggcagcagcagcagctcctacagaggccgccccgggatgctcaacaaccatggccacgcagtgccagccaacggcgagatgagcagcagccacagcgcccagtccatggtctcggggtcccactgcactccgccacccccctaccacgccgaccccagcctcgtcagttttttaacaggattggggtgtccaaactgcatcgagtatttcacctcccaagggttacagagcatttaccacctgcagaacctgaccattgaggacctgggggccctgaagatccccgagcagtaccgcatgaccatctggcggggcctgcaggacctgaagcagggccacgactacagcaccgcgcagcagctgctccgctctagcaacgcggccaccatctccatcggcggctcaggggaactgcagcgccagcgggtcatggaggccgtgcacttccgcgtgcgccacaccatcaccatccccaaccgcggcggcccaggcggcggccctgacgagtgggcggacttcggcttcgacctgcccgactgcaaggcccgcaagcagcccatcaaggaggagttcacggaggccgagatccactgagggcctcgcctggctgcagcctgcgccaccgcccagagacccaagctgcctcccctctccttcctgtgtgtccaaaactgcctcaggaggcaggaccttcgggctgtgcccggggaaaggcaaggtccggcccatccccaggcacctcacaggccccaggaaaggcccagccaccgaagccgcctgtggacagcctgagtcacctgcagaacc

SEQ ID NO: 196535 - DNA, 2117 bp, Homo sapiens
  Payload ID: 18768
  Gene Name: tumor protein p73
  Uniprot ID: O15350
  ENST ID: ENST00000378285
  CDS Start-End: 235-1587
ggattcagccagttgacagaactaagggagatgggaaaagcgaaaatgccaacaaacggcccgcatgttccccagcatcctcggctcctgcctcactagctgcggagcctctcccgctcggtccacgctgccgggcggccacgaccgtgacccttcccctcgggccgcccagatccatgcctcgtcccacgggacaccagttccctggcgtgtgcagaccccccggcgcctaccatgctgtacgtcggtgaccccgcacggcacctcgccacggcccagttcaatctgctgagcagcaccatggaccagatgagcagccgcgcggcctcggccagcccctacaccccagagcacgccgccagcgtgcccacccactcgccctacgcacaacccagctccaccttcgacaccatgtcgccggcgcctgtcatcccctccaacaccgactaccccggaccccaccactttgaggtcactttccagcagtccagcacggccaagtcagccacctggacgtactccccgctcttgaagaaactctactgccagatcgccaagacatgccccatccagatcaaggtgtccaccccgccacccccaggcaccgccatccgggccatgcctgtttacaagaaagcggagcacgtgaccgacgtcgtgaaacgctgccccaaccacgagctcgggagggacttcaacgaaggacagtctgctccagccagccacctcatccgcgtggaaggcaataatctctcgcagtatgtggatgaccctgtcaccggcaggcagagcgtcgtggtgccctatgagccaccacaggtggggacggaattcaccaccatcctgtacaacttcatgtgtaacagcagctgtgtagggggcatgaaccggcggcccatcctcatcatcatcaccctggagatgcgggatgggcaggtgctgggccgccggtcctttgagggccgcatctgcgcctgtcctggccgcgaccgaaaagctgatgaggaccactaccgggagcagcaggccctgaacgagagctccgccaagaacggggccgccagcaagcgtgccttcaagcagagcccccctgccgtccccgcccttggtgccggtgtgaagaagcggcggcatggagacgaggacacgtactaccttcaggtgcgaggccgggagaactttgagatcctgatgaagctgaaagagagcctggagctgatggagttggtgccgcagccactggtggactcctatcggcagcagcagcagctcctacagaggccgagtcacctacagcccccgtcctacgggccggtcctctcgcccatgaacaaggtgcacgggggcatgaacaagctgccctccgtcaaccagctggtgggccagcctcccccgcacagttcggcagctacacccaacctggggcccgtgggccccgggatgctcaacaaccatggccacgcagtgccagccaacggcgagatgagcagcagccacagcgcccagtccatggtctcggggtcccactgcactccgccacccccctaccacgccgaccccagcctcgtcaggacctgggggccctgaagatccccgagcagtaccgcatgaccatctggcggggcctgcaggacctgaagcagggccacgactacagcaccgcgcagcagctgctccgctctagcaacgcggccaccatctccatcggcggctcaggggaactgcagcgccagcgggtcatggaggccgtgcacttccgcgtgcgccacaccatcaccatccccaaccgcggcggcccaggcggcggccctgacgagtgggcggacttcggcttcgacctgcccgactgcaaggcccgcaagcagcccatcaaggaggagttcacggaggccgagatccactgagggcctcgcctggctgcagcctgcgccaccgcccagagacccaagctgcctcccctctccttcctgtgtgtccaaaactgcctcaggaggcaggaccttcgggctgtgcccggggaaaggcaaggtccggcccatccccaggcacctcacaggccccaggaaaggcccagccaccgaagccgcctgtggacagcctgagtcacctgcagaacc

SEQ ID NO: 196536 - DNA, 5120 bp, Homo sapiens
  Payload ID: 18768
  Gene Name: tumor protein p73
  Uniprot ID: O15350
  ENST ID: ENST00000378288
  CDS Start-End: 235-1998
ggattcagccagttgacagaactaagggagatgggaaaagcgaaaatgccaacaaacggcccgcatgttccccagcatcctcggctcctgcctcactagctgcggagcctctcccgctcggtccacgctgccgggcggccacgaccgtgacccttcccctcgggccgcccagatccatgcctcgtcccacgggacaccagttccctggcgtgtgcagaccccccggcgcctaccatgctgtacgtcggtgaccccgcacggcacctcgccacggcccagttcaatctgctgagcagcaccatggaccagatgagcagccgcgcggcctcggccagcccctacaccccagagcacgccgccagcgtgcccacccactcgccctacgcacaacccagctccaccttcgacaccatgtcgccggcgcctgtcatcccctccaacaccgactaccccggaccccaccactttgaggtcactttccagcagtccagcacggccaagtcagccacctggacgtactccccgctcttgaagaaactctactgccagatcgccaagacatgccccatccagatcaaggtgtccaccccgccacccccaggcaccgccatccgggccatgcctgtttacaagaaagcggagcacgtgaccgacgtcgtgaaacgctgccccaaccacgagctcgggagggacttcaacgaaggacagtctgctccagccagccacctcatccgcgtggaaggcaataatctctcgcagtatgtggatgaccctgtcaccggcaggcagagcgtcgtggtgccctatgagccaccacaggtggggacggaattcaccaccatcctgtacaacttcatgtgtaacagcagctgtgtagggggcatgaaccggcggcccatcctcatcatcatcaccctggagatgcgggatgggcaggtgctgggccgccggtcctttgagggccgcatctgcgcctgtcctggccgcgaccgaaaagctgatgaggaccactaccgggagcagcaggccctgaacgagagctccgccaagaacggggccgccagcaagcgtgccttcaagcagagcccccctgccgtccccgcccttggtgccggtgtgaagaagcggcggcatggagacgaggacacgtactaccttcaggtgcgaggccgggagaactttgagatcctgatgaagctgaaagagagcctggagctgatggagttggtgccgcagccactggtggactcctatcggcagcagcagcagctcctacagaggccgagtcacctacagcccccgtcctacgggccggtcctctcgcccatgaacaaggtgcacgggggcatgaacaagctgccctccgtcaaccagctggtgggccagcctcccccgcacagttcggcagctacacccaacctggggcccgtgggccccgggatgctcaacaaccatggccacgcagtgccagccaacggcgagatgagcagcagccacagcgcccagtccatggtctcggggtcccactgcactccgccacccccctaccacgccgaccccagcctcgtcagttttttaacaggattggggtgtccaaactgcatcgagtatttcacctcccaagggttacagagcatttaccacctgcagaacctgaccattgaggacctgggggccctgaagatccccgagcagtaccgcatgaccatctggcggggcctgcaggacctgaagcagggccacgactacagcaccgcgcagcagctgctccgctctagcaacgcggccaccatctccatcggcggctcaggggaactgcagcgccagcgggtcatggaggccgtgcacttccgcgtgcgccacaccatcaccatccccaaccgcggcggcccaggcggcggccctgacgagtgggcggacttcggcttcgacctgcccgactgcaaggcccgcaagcagcccatcaaggaggagttcacggaggccgagatccactgagggcctcgcctggctgcagcctgcgccaccgcccagagacccaagctgcctcccctctccttcctgtgtgtccaaaactgcctcaggaggcaggaccttcgggctgtgcccggggaaaggcaaggtccggcccatccccaggcacctcacaggccccaggaaaggcccagccaccgaagccgcctgtggacagcctgagtcacctgcagaaccttctggagctgccctagtgctgggcttgtggggcgggggctggcccactctcagccctgccactgccccggcgtgctccatggcaggcgtgggtggggaccgcagcgtcggctccgacttccaggcttcatcctagagactgtcatctcccaaccaggcgaggtccttccaaaggaaaggatcctctttgctgatggactgccaaaaagtattttgcgacatcttttggttctggatagtagtgagcagccaagtgactgtgtctgaaacaccagtgtattttcagggaatgtccctaactgcgtcttgcccgcgccgggggctggggactctctctgctggacttgggactggcctctgcccccagcacgctgtattctgcaggaccgcctccttcctgcccctaacaacaaccacagtgttgctgaaattggagaaaactggggagggcgcaaccccccccaggcgcggggaagcatgtggtaccgcctcagccagtgcccctcagcctggccacagtcgcctctcctcggggacccctcagcagaaagggacagcctgtccttagaggactggaaattgtcaatatttgataaaatgatacccttttctacatggtgggtcagcttttttttttttttttttaactttctttctcagcattctctttggagttcaacctagcgcccatgagccaggctgaggaagctgagtgagaagccaggtgggcgggacttgttcccaggaaggccgggtggggaggaagcctagagggaaccccaggaagggcaaatccaggcaaatctgcaggaatgctctgccatgggagcagctcctcccttgccacggccaccttctctagcactgcaaggtccacagggcattgctttcctttctaggcggtggcagtcagggaacagactgaggtaggtgtaggggggtctaggccttcgtggagcaccccagggagttagtaggccccggggagacagagtctgcacaggccctttctggggccacctccatccacgaggagcagcctgagccttggtggccgaaccttgaccgtcccggagcacagcttcagggcagggaaccggagcccctggggggcctcacgggtgtgacgaggcccttcattgcaggcaggtgggccaatgggagccctcacccacgcaagccgagacaccacccagagtgcaggctgcctggccccttctggcacggccagctccacaccccctgcctagggtatgtgtggtcctaagggctaggagcttcccctactaacatctcccagaaaaagcagttaagcccctcagggcacagcaaggttagacacagcccccatccccagatcaggactccatcttgctaagtggcatcaccgtcaccagcctccccttatttaaaagcagcgactggtgttgccgcaggtacctggtctacgaagacgcaggcatccctctcccaccgtccacctccccgggggccgctgacagcacagtcgcctgggtgcacgcttgtgggggcagcaggaacggggctgtcggctctcaggggatctggctgcagccagggcgagggcctggcccttccttccagctccttccggctccttccagctgaagggcaggaagctctggccgcttagcttctagggttccatctccctagaaaggtgcccacgcccagggcatcagtcagtagcggcagcagcagcagactcggggctttcccagggtggcgcagccaccccagctgcatgtcacctcagctctccatcttattgccattttgtagatgaggaagctgagaccagaaaggctaagacccatgccccaggcaccacacccatctcttgggggctgggcacctgctacccgaggccacctcctgaagcccccactcttcccccatgttccacttcaggagccgcgggggcccatcctgacacccggggttcctcagcccagcgcagatgtgcttcagttccagagggcttgttgatttgtttcttaggtacgttacctgtccaccctgagtccagtgaggctgtcccaagagcccctgtagtgtgctcctgggaagggctgggggggctgggggggctgggagaggcccaggggcagctgtcactggaaccccagccagatgtccaaggaagccggccagaacacggagcagccagatggccccagctgcacctgtctagggagcccatgcagcctccttgcactggagaagcagctgtgaaagtagacagagttgagacttcgccgtggtcaggagaaaatgcaaattcccaggaacaagaatcctttaagtgatatgtttttataaaactaaacaaatcaacaaataaatcttgaaggcggatggttttcccagcagtgcaggggttggagggaggctgctggcactcctggggccaagggggacaggcagtggtcctgagtctgctcagagaggcaaggcagaaggagctcgccaggcaggtcagctcacatctgtccaagtcgctctggtcagaaacagcgactctcccccattcccccagcgttcccaccaggcctgggctgctgggaagcccttgctgtacccaggagcccgacccgcagtatcctggcacagagccacttgtcactcagaacagtcagtgtctccaacgcacaaacatccactcctctgttaccagttaaagcactttaatgctttaaggtgaaaacgaaatcccatccgtgtttttcgtgtaagatcgtgcttctccgagcagtattaatggacgccctccaatgacataacaactgtttttggtaatgtaatcttgggaaaatgtgttatttttttagctgtgtttcagtggggatttttgtttttgtaacataataaagtgtatgttccaatga

SEQ ID NO: 196537 - DNA, 1831 bp, Homo sapiens
  Payload ID: 18768
  Gene Name: tumor protein p73
  Uniprot ID: O15350
  ENST ID: ENST00000378290
  CDS Start-End: 122-1819
aaggtgtccaggaagccctgctaagcatctgtcagtgtctccagcacagcaggaggctgttacaggtggcgcctgattcacatctgcaggacaggcccagttcaatctgctgagcagcaccatggaccagatgagcagccgcgcggcctcggccagcccctacaccccagagcacgccgccagcgtgcccacccactcgccctacgcacaacccagctccaccttcgacaccatgtcgccggcgcctgtcatcccctccaacaccgactaccccggaccccaccactttgaggtcactttccagcagtccagcacggccaagtcagccacctggacgtactccccgctcttgaagaaactctactgccagatcgccaagacatgccccatccagatcaaggtgtccaccccgccacccccaggcaccgccatccgggccatgcctgtttacaagaaagcggagcacgtgaccgacgtcgtgaaacgctgccccaaccacgagctcgggagggacttcaacgaaggacagtctgctccagccagccacctcatccgcgtggaaggcaataatctctcgcagtatgtggatgaccctgtcaccggcaggcagagcgtcgtggtgccctatgagccaccacaggtggggacggaattcaccaccatcctgtacaacttcatgtgtaacagcagctgtgtagggggcatgaaccggcggcccatcctcatcatcatcaccctggagatgcgggatgggcaggtgctgggccgccggtcctttgagggccgcatctgcgcctgtcctggccgcgaccgaaaagctgatgaggaccactaccgggagcagcaggccctgaacgagagctccgccaagaacggggccgccagcaagcgtgccttcaagcagagcccccctgccgtccccgcccttggtgccggtgtgaagaagcggcggcatggagacgaggacacgtactaccttcaggtgcgaggccgggagaactttgagatcctgatgaagctgaaagagagcctggagctgatggagttggtgccgcagccactggtggactcctatcggcagcagcagcagctcctacagaggccgagtcacctacagcccccgtcctacgggccggtcctctcgcccatgaacaaggtgcacgggggcatgaacaagctgccctccgtcaaccagctggtgggccagcctcccccgcacagttcggcagctacacccaacctggggcccgtgggccccgggatgctcaacaaccatggccacgcagtgccagccaacggcgagatgagcagcagccacagcgcccagtccatggtctcggggtcccactgcactccgccacccccctaccacgccgaccccagcctcgtcagttttttaacaggattggggtgtccaaactgcatcgagtatttcacctcccaagggttacagagcatttaccacctgcagaacctgaccattgaggacctgggggccctgaagatccccgagcagtaccgcatgaccatctggcggggcctgcaggacctgaagcagggccacgactacagcaccgcgcagcagctgctccgctctagcaacgcggccaccatctccatcggcggctcaggggaactgcagcgccagcgggtcatggaggccgtgcacttccgcgtgcgccacaccatcaccatccccaaccgcggcggcccaggcggcggccctgacgagtgggcggacttcggcttcgacctgcccgactgcaaggcccgcaagcagcccatcaaggaggagttcacggaggccgagatccactgagggcctcgcctg

SEQ ID NO: 196538 - DNA, 5188 bp, Homo sapiens
  Payload ID: 18768
  Gene Name: tumor protein p73
  Uniprot ID: O15350
  ENST ID: ENST00000378295
  CDS Start-End: 156-2066
tgcctccccgcccgcgcacccgcccggaggctcgcgcgcccgcgaaggggacgcagcgaaaccggggcccgcgccaggccagccgggacggacgccgatgcccggggctgcgacggctgcagagcgagctgccctcggaggccggcgtggggaagatggcccagtccaccgccacctcccctgatgggggcaccacgtttgagcacctctggagctctctggaaccagacagcacctacttcgaccttccccagtcaagccgggggaataatgaggtggtgggcggaacggattccagcatggacgtcttccacctggagggcatgactacatctgtcatggcccagttcaatctgctgagcagcaccatggaccagatgagcagccgcgcggcctcggccagcccctacaccccagagcacgccgccagcgtgcccacccactcgccctacgcacaacccagctccaccttcgacaccatgtcgccggcgcctgtcatcccctccaacaccgactaccccggaccccaccactttgaggtcactttccagcagtccagcacggccaagtcagccacctggacgtactccccgctcttgaagaaactctactgccagatcgccaagacatgccccatccagatcaaggtgtccaccccgccacccccaggcaccgccatccgggccatgcctgtttacaagaaagcggagcacgtgaccgacgtcgtgaaacgctgccccaaccacgagctcgggagggacttcaacgaaggacagtctgctccagccagccacctcatccgcgtggaaggcaataatctctcgcagtatgtggatgaccctgtcaccggcaggcagagcgtcgtggtgccctatgagccaccacaggtggggacggaattcaccaccatcctgtacaacttcatgtgtaacagcagctgtgtagggggcatgaaccggcggcccatcctcatcatcatcaccctggagatgcgggatgggcaggtgctgggccgccggtcctttgagggccgcatctgcgcctgtcctggccgcgaccgaaaagctgatgaggaccactaccgggagcagcaggccctgaacgagagctccgccaagaacggggccgccagcaagcgtgccttcaagcagagcccccctgccgtccccgcccttggtgccggtgtgaagaagcggcggcatggagacgaggacacgtactaccttcaggtgcgaggccgggagaactttgagatcctgatgaagctgaaagagagcctggagctgatggagttggtgccgcagccactggtggactcctatcggcagcagcagcagctcctacagaggccgagtcacctacagcccccgtcctacgggccggtcctctcgcccatgaacaaggtgcacgggggcatgaacaagctgccctccgtcaaccagctggtgggccagcctcccccgcacagttcggcagctacacccaacctggggcccgtgggccccgggatgctcaacaaccatggccacgcagtgccagccaacggcgagatgagcagcagccacagcgcccagtccatggtctcggggtcccactgcactccgccacccccctaccacgccgaccccagcctcgtcagttttttaacaggattggggtgtccaaactgcatcgagtatttcacctcccaagggttacagagcatttaccacctgcagaacctgaccattgaggacctgggggccctgaagatccccgagcagtaccgcatgaccatctggcggggcctgcaggacctgaagcagggccacgactacagcaccgcgcagcagctgctccgctctagcaacgcggccaccatctccatcggcggctcaggggaactgcagcgccagcgggtcatggaggccgtgcacttccgcgtgcgccacaccatcaccatccccaaccgcggcggcccaggcggcggccctgacgagtgggcggacttcggcttcgacctgcccgactgcaaggcccgcaagcagcccatcaaggaggagttcacggaggccgagatccactgagggcctcgcctggctgcagcctgcgccaccgcccagagacccaagctgcctcccctctccttcctgtgtgtccaaaactgcctcaggaggcaggaccttcgggctgtgcccggggaaaggcaaggtccggcccatccccaggcacctcacaggccccaggaaaggcccagccaccgaagccgcctgtggacagcctgagtcacctgcagaaccttctggagctgccctagtgctgggcttgtggggcgggggctggcccactctcagccctgccactgccccggcgtgctccatggcaggcgtgggtggggaccgcagcgtcggctccgacttccaggcttcatcctagagactgtcatctcccaaccaggcgaggtccttccaaaggaaaggatcctctttgctgatggactgccaaaaagtattttgcgacatcttttggttctggatagtagtgagcagccaagtgactgtgtctgaaacaccagtgtattttcagggaatgtccctaactgcgtcttgcccgcgccgggggctggggactctctctgctggacttgggactggcctctgcccccagcacgctgtattctgcaggaccgcctccttcctgcccctaacaacaaccacagtgttgctgaaattggagaaaactggggagggcgcaaccccccccaggcgcggggaagcatgtggtaccgcctcagccagtgcccctcagcctggccacagtcgcctctcctcggggacccctcagcagaaagggacagcctgtccttagaggactggaaattgtcaatatttgataaaatgatacccttttctacatggtgggtcagcttttttttttttttttttaactttctttctcagcattctctttggagttcaacctagcgcccatgagccaggctgaggaagctgagtgagaagccaggtgggcgggacttgttcccaggaaggccgggtggggaggaagcctagagggaaccccaggaagggcaaatccaggcaaatctgcaggaatgctctgccatgggagcagctcctcccttgccacggccaccttctctagcactgcaaggtccacagggcattgctttcctttctaggcggtggcagtcagggaacagactgaggtaggtgtaggggggtctaggccttcgtggagcaccccagggagttagtaggccccggggagacagagtctgcacaggccctttctggggccacctccatccacgaggagcagcctgagccttggtggccgaaccttgaccgtcccggagcacagcttcagggcagggaaccggagcccctggggggcctcacgggtgtgacgaggcccttcattgcaggcaggtgggccaatgggagccctcacccacgcaagccgagacaccacccagagtgcaggctgcctggccccttctggcacggccagctccacaccccctgcctagggtatgtgtggtcctaagggctaggagcttcccctactaacatctcccagaaaaagcagttaagcccctcagggcacagcaaggttagacacagcccccatccccagatcaggactccatcttgctaagtggcatcaccgtcaccagcctccccttatttaaaagcagcgactggtgttgccgcaggtacctggtctacgaagacgcaggcatccctctcccaccgtccacctccccgggggccgctgacagcacagtcgcctgggtgcacgcttgtgggggcagcaggaacggggctgtcggctctcaggggatctggctgcagccagggcgagggcctggcccttccttccagctccttccggctccttccagctgaagggcaggaagctctggccgcttagcttctagggttccatctccctagaaaggtgcccacgcccagggcatcagtcagtagcggcagcagcagcagactcggggctttcccagggtggcgcagccaccccagctgcatgtcacctcagctctccatcttattgccattttgtagatgaggaagctgagaccagaaaggctaagacccatgccccaggcaccacacccatctcttgggggctgggcacctgctacccgaggccacctcctgaagcccccactcttcccccatgttccacttcaggagccgcgggggcccatcctgacacccggggttcctcagcccagcgcagatgtgcttcagttccagagggcttgttgatttgtttcttaggtacgttacctgtccaccctgagtccagtgaggctgtcccaagagcccctgtagtgtgctcctgggaagggctgggggggctgggggggctgggagaggcccaggggcagctgtcactggaaccccagccagatgtccaaggaagccggccagaacacggagcagccagatggccccagctgcacctgtctagggagcccatgcagcctccttgcactggagaagcagctgtgaaagtagacagagttgagacttcgccgtggtcaggagaaaatgcaaattcccaggaacaagaatcctttaagtgatatgtttttataaaactaaacaaatcaacaaataaatcttgaaggcggatggttttcccagcagtgcaggggttggagggaggctgctggcactcctggggccaagggggacaggcagtggtcctgagtctgctcagagaggcaaggcagaaggagctcgccaggcaggtcagctcacatctgtccaagtcgctctggtcagaaacagcgactctcccccattcccccagcgttcccaccaggcctgggctgctgggaagcccttgctgtacccaggagcccgacccgcagtatcctggcacagagccacttgtcactcagaacagtcagtgtctccaacgcacaaacatccactcctctgttaccagttaaagcactttaatgctttaaggtgaaaacgaaatcccatccgtgtttttcgtgtaagatcgtgcttctccgagcagtattaatggacgccctccaatgacataacaactgtttttggtaatgtaatcttgggaaaatgtgttatttttttagctgtgtttcagtggggatttttgtttttgtaacataataaagtgtatgttccaatga

SEQ ID NO: 196539 - DNA, 1623 bp, Homo sapiens
  Payload ID: 18768
  Gene Name: tumor protein p73
  Uniprot ID: O15350
  ENST ID: ENST00000604479
  CDS Start-End: 1-1623
atggcccagtccaccgccacctcccctgatgggggcaccacgtttgagcacctctggagctctctggaaccagacagcacctacttcgaccttccccagtcaagccgggggaataatgaggtggtgggcggaacggattccagcatggacgtcttccacctggagggcatgactacatctgtcatggcccagttcaatctgctgagcagcaccatggaccagatgagcagccgcgcggcctcggccagcccctacaccccagagcacgccgccagcgtgcccacccactcgccctacgcacaacccagctccaccttcgacaccatgtcgccggcgcctgtcatcccctccaacaccgactaccccggaccccaccactttgaggtcactttccagcagtccagcacggccaagtcagccacctggacgtactccccgctcttgaagaaactctactgccagatcgccaagacatgccccatccagatcaaggtgtccaccccgccacccccaggcaccgccatccgggccatgcctgtttacaagaaagcggagcacgtgaccgacgtcgtgaaacgctgccccaaccacgagctcgggagggacttcaacgaaggacagtctgctccagccagccacctcatccgcgtggaaggcaataatctctcgcagtatgtggatgaccctgtcaccggcaggcagagcgtcgtggtgccctatgagccaccacaggtggggacggaattcaccaccatcctgtacaacttcatgtgtaacagcagctgtgtagggggcatgaaccggcggcccatcctcatcatcatcaccctggagatgcgggatgggcaggtgctgggccgccggtcctttgagggccgcatctgcgcctgtcctggccgcgaccgaaaagctgatgaggaccactaccgggagcagcaggccctgaacgagagctccgccaagaacggggccgccagcaagcgtgccttcaagcagagcccccctgccgtccccgcccttggtgccggtgtgaagaagcggcggcatggagacgaggacacgtactaccttcaggtgcgaggccgggagaactttgagatcctgatgaagctgaaagagagcctggagctgatggagttggtgccgcagccactggtggactcctatcggcagcagcagcagctcctacagaggccttttttaacaggattggggtgtccaaactgcatcgagtatttcacctcccaagggttacagagcatttaccacctgcagaacctgaccattgaggacctgggggccctgaagatccccgagcagtaccgcatgaccatctggcggggcctgcaggacctgaagcagggccacgactacagcaccgcgcagcagctgctccgctctagcaacgcggccaccatctccatcggcggctcaggggaactgcagcgccagcgggtcatggaggccgtgcacttccgcgtgcgccacaccatcaccatccccaaccgcggcggcccaggcggcggccctgacgagtgggcggacttcggcttcgacctgcccgactgcaaggcccgcaagcagcccatcaaggaggagttcacggaggccgagatccactga

SEQ ID NO: 196540 - DNA, 1668 bp, Homo sapiens
  Payload ID: 18768
  Gene Name: tumor protein p73
  Uniprot ID: O15350
  ENST ID: ENST00000603362
  CDS Start-End: 1-1668
atggcccagtccaccgccacctcccctgatgggggcaccacgtttgagcacctctggagctctctggaaccagacagcacctacttcgaccttccccagtcaagccgggggaataatgaggtggtgggcggaacggattccagcatggacgtcttccacctggagggcatgactacatctgtcatggcccagttcaatctgctgagcagcaccatggaccagatgagcagccgcgcggcctcggccagcccctacaccccagagcacgccgccagcgtgcccacccactcgccctacgcacaacccagctccaccttcgacaccatgtcgccggcgcctgtcatcccctccaacaccgactaccccggaccccaccactttgaggtcactttccagcagtccagcacggccaagtcagccacctggacgtactccccgctcttgaagaaactctactgccagatcgccaagacatgccccatccagatcaaggtgtccaccccgccacccccaggcaccgccatccgggccatgcctgtttacaagaaagcggagcacgtgaccgacgtcgtgaaacgctgccccaaccacgagctcgggagggacttcaacgaaggacagtctgctccagccagccacctcatccgcgtggaaggcaataatctctcgcagtatgtggatgaccctgtcaccggcaggcagagcgtcgtggtgccctatgagccaccacaggtggggacggaattcaccaccatcctgtacaacttcatgtgtaacagcagctgtgtagggggcatgaaccggcggcccatcctcatcatcatcaccctggagatgcgggatgggcaggtgctgggccgccggtcctttgagggccgcatctgcgcctgtcctggccgcgaccgaaaagctgatgaggaccactaccgggagcagcaggccctgaacgagagctccgccaagaacggggccgccagcaagcgtgccttcaagcagagcccccctgccgtccccgcccttggtgccggtgtgaagaagcggcggcatggagacgaggacacgtactaccttcaggtgcgaggccgggagaactttgagatcctgatgaagctgaaagagagcctggagctgatggagttggtgccgcagccactggtggactcctatcggcagcagcagcagctcctacagaggccgccccgggatgctcaacaaccatggccacgcagtgccagccaacggcgagatgagcagcagccacagcgcccagtccatggtctcggggtcccactgcactccgccacccccctaccacgccgaccccagcctcgtcaggacctgggggccctgaagatccccgagcagtaccgcatgaccatctggcggggcctgcaggacctgaagcagggccacgactacagcaccgcgcagcagctgctccgctctagcaacgcggccaccatctccatcggcggctcaggggaactgcagcgccagcgggtcatggaggccgtgcacttccgcgtgcgccacaccatcaccatccccaaccgcggcggcccaggcggcggccctgacgagtgggcggacttcggcttcgacctgcccgactgcaaggcccgcaagcagcccatcaaggaggagttcacggaggccgagatccactga

SEQ ID NO: 196541 - DNA, 4806 bp, Homo sapiens
  Payload ID: 18768
  Gene Name: tumor protein p73
  Uniprot ID: O15350
  ENST ID: ENST00000604074
  CDS Start-End: 156-1367
tgcctccccgcccgcgcacccgcccggaggctcgcgcgcccgcgaaggggacgcagcgaaaccggggcccgcgccaggccagccgggacggacgccgatgcccggggctgcgacggctgcagagcgagctgccctcggaggccggcgtggggaagatggcccagtccaccgccacctcccctgatgggggcaccacgtttgagcacctctggagctctctggaaccagacagcacctacttcgaccttccccagtcaagccgggggaataatgaggtggtgggcggaacggattccagcatggacgtcttccacctggagggcatgactacatctgtcatggcccagttcaatctgctgagcagcaccatggaccagatgagcagccgcgcggcctcggccagcccctacaccccagagcacgccgccagcgtgcccacccactcgccctacgcacaacccagctccaccttcgacaccatgtcgccggcgcctgtcatcccctccaacaccgactaccccggaccccaccactttgaggtcactttccagcagtccagcacggccaagtcagccacctggacgtactccccgctcttgaagaaactctactgccagatcgccaagacatgccccatccagatcaaggtgtccaccccgccacccccaggcaccgccatccgggccatgcctgtttacaagaaagcggagcacgtgaccgacgtcgtgaaacgctgccccaaccacgagctcgggagggacttcaacgaaggacagtctgctccagccagccacctcatccgcgtggaaggcaataatctctcgcagtatgtggatgaccctgtcaccggcaggcagagcgtcgtggtgccctatgagccaccacaggtggggacggaattcaccaccatcctgtacaacttcatgtgtaacagcagctgtgtagggggcatgaaccggcggcccatcctcatcatcatcaccctggagatgcgggatgggcaggtgctgggccgccggtcctttgagggccgcatctgcgcctgtcctggccgcgaccgaaaagctgatgaggaccactaccgggagcagcaggccctgaacgagagctccgccaagaacggggccgccagcaagcgtgccttcaagcagagcccccctgccgtccccgcccttggtgccggtgtgaagaagcggcggcatggagacgaggacacgtactaccttcaggtgcgaggccgggagaactttgagatcctgatgaagctgaaagagagcctggagctgatggagttggtgccgcagccactggtggactcctatcggcagcagcagcagctcctacagaggccgacctgggggccctgaagatccccgagcagtaccgcatgaccatctggcggggcctgcaggacctgaagcagggccacgactacagcaccgcgcagcagctgctccgctctagcaacgcggccaccatctccatcggcggctcaggggaactgcagcgccagcgggtcatggaggccgtgcacttccgcgtgcgccacaccatcaccatccccaaccgcggcggcccaggcggcggccctgacgagtgggcggacttcggcttcgacctgcccgactgcaaggcccgcaagcagcccatcaaggaggagttcacggaggccgagatccactgagggcctcgcctggctgcagcctgcgccaccgcccagagacccaagctgcctcccctctccttcctgtgtgtccaaaactgcctcaggaggcaggaccttcgggctgtgcccggggaaaggcaaggtccggcccatccccaggcacctcacaggccccaggaaaggcccagccaccgaagccgcctgtggacagcctgagtcacctgcagaaccttctggagctgccctagtgctgggcttgtggggcgggggctggcccactctcagccctgccactgccccggcgtgctccatggcaggcgtgggtggggaccgcagcgtcggctccgacttccaggcttcatcctagagactgtcatctcccaaccaggcgaggtccttccaaaggaaaggatcctctttgctgatggactgccaaaaagtattttgcgacatcttttggttctggatagtagtgagcagccaagtgactgtgtctgaaacaccagtgtattttcagggaatgtccctaactgcgtcttgcccgcgccgggggctggggactctctctgctggacttgggactggcctctgcccccagcacgctgtattctgcaggaccgcctccttcctgcccctaacaacaaccacagtgttgctgaaattggagaaaactggggagggcgcaaccccccccaggcgcggggaagcatgtggtaccgcctcagccagtgcccctcagcctggccacagtcgcctctcctcggggacccctcagcagaaagggacagcctgtccttagaggactggaaattgtcaatatttgataaaatgatacccttttctacatggtgggtcagcttttttttttttttttttaactttctttctcagcattctctttggagttcaacctagcgcccatgagccaggctgaggaagctgagtgagaagccaggtgggcgggacttgttcccaggaaggccgggtggggaggaagcctagagggaaccccaggaagggcaaatccaggcaaatctgcaggaatgctctgccatgggagcagctcctcccttgccacggccaccttctctagcactgcaaggtccacagggcattgctttcctttctaggcggtggcagtcagggaacagactgaggtaggtgtaggggggtctaggccttcgtggagcaccccagggagttagtaggccccggggagacagagtctgcacaggccctttctggggccacctccatccacgaggagcagcctgagccttggtggccgaaccttgaccgtcccggagcacagcttcagggcagggaaccggagcccctggggggcctcacgggtgtgacgaggcccttcattgcaggcaggtgggccaatgggagccctcacccacgcaagccgagacaccacccagagtgcaggctgcctggccccttctggcacggccagctccacaccccctgcctagggtatgtgtggtcctaagggctaggagcttcccctactaacatctcccagaaaaagcagttaagcccctcagggcacagcaaggttagacacagcccccatccccagatcaggactccatcttgctaagtggcatcaccgtcaccagcctccccttatttaaaagcagcgactggtgttgccgcaggtacctggtctacgaagacgcaggcatccctctcccaccgtccacctccccgggggccgctgacagcacagtcgcctgggtgcacgcttgtgggggcagcaggaacggggctgtcggctctcaggggatctggctgcagccagggcgagggcctggcccttccttccagctccttccggctccttccagctgaagggcaggaagctctggccgcttagcttctagggttccatctccctagaaaggtgcccacgcccagggcatcagtcagtagcggcagcagcagcagactcggggctttcccagggtggcgcagccaccccagctgcatgtcacctcagctctccatcttattgccattttgtagatgaggaagctgagaccagaaaggctaagacccatgccccaggcaccacacccatctcttgggggctgggcacctgctacccgaggccacctcctgaagcccccactcttcccccatgttccacttcaggagccgcgggggcccatcctgacacccggggttcctcagcccagcgcagatgtgcttcagttccagagggcttgttgatttgtttcttaggtacgttacctgtccaccctgagtccagtgaggctgtcccaagagcccctgtagtgtgctcctgggaagggctgggggggctgggggggctgggagaggcccaggggcagctgtcactggaaccccagccagatgtccaaggaagccggccagaacacggagcagccagatggccccagctgcacctgtctagggagcccatgcagcctccttgcactggagaagcagctgtgaaagtagacagagttgagacttcgccgtggtcaggagaaaatgcaaattcccaggaacaagaatcctttaagtgatatgtttttataaaactaaacaaatcaacaaataaatcttgaaggcggatggttttcccagcagtgcaggggttggagggaggctgctggcactcctggggccaagggggacaggcagtggtcctgagtctgctcagagaggcaaggcagaaggagctcgccaggcaggtcagctcacatctgtccaagtcgctctggtcagaaacagcgactctcccccattcccccagcgttcccaccaggcctgggctgctgggaagcccttgctgtacccaggagcccgacccgcagtatcctggcacagagccacttgtcactcagaacagtcagtgtctccaacgcacaaacatccactcctctgttaccagttaaagcactttaatgctttaaggtgaaaacgaaatcccatccgtgtttttcgtgtaagatcgtgcttctccgagcagtattaatggacgccctccaatgacataacaactgtttttggtaatgtaatcttgggaaaatgtgttatttttttagctgtgtttcagtggggatttttgtttttgtaacataataaagtgtatgttccaatga

SEQ ID NO: 196542 - DNA, 1008 bp, Homo sapiens
  Payload ID: 18769
  Gene Name: tumor protein, translationally-controlled 1
  ENST ID: ENST00000309246
  CDS Start-End: 18-584
tcccttcagtcgccatcatgattatctaccgggacctcatcagccacgatgagatgttctccgacatctacaagatccgggagatcgcggacgggttgtgcctggaggtggaggggaagatggtcagtaggacagaaggtaacattgatgactcgctcattggtggaaatgcctccgctgaaggccccgagggcgaaggtaccgaaagcacagtaatcactggtgtcgatattgtcatgaaccatcacctgcaggaaacaagtttcacaaaagaagcctacaagaagtacatcaaagattacatgaaatcaatcaaagggaaacttgaagaacagagaccagaaagagtaaaaccttttatgacaggggctgcagaacaaatcaagcacatccttgctaatttcaaaaactaccagttctttattggtgaaaacatgaatccagatggcatggttgctctattggactaccgtgaggatggtgtgaccccatatatgattttctttaaggatggtttagaaatggaaaaatgtgtaagtacaaggaagtgggttaaaataaataatgtaaaaaagacattttagatgtgatttgcaattgttttgtgacactgagaatgagttttacagcgttctgaaacatggttttagttttctctttggggatcaagagaattgtgtttcatatgtaaaaaattcttagggtataaaaaggcttagaatcttatttgtggaaaacgttgagtgcagatggggcataataaagtacagtttaggctgggtgtggtggctcacacctgtaatttcagcacttgggacgccgaggtgggtgcatcacctgaggttgggagttcgagaccagcctggccaacatggcgaaaccctatctctgctaaaaatacaaaaattagccaggcatggcagcgggcacctgtaatcccagctaatcgagagcctgaggcaggaaaatcacttaaacctgggaggggggttgcagtgagcagagatc

SEQ ID NO: 196543 - DNA, 948 bp, Homo sapiens
  Payload ID: 18769
  Gene Name: tumor protein, translationally-controlled 1
  Uniprot ID: P13693
  ENST ID: ENST00000379055
  CDS Start-End: 448-864
ccgagcgccgctccggctgcaccgcgctcgctccgagtttcaggctcgtgctaagctagcgccgtcgtcgtctcccttcagtcgccatcatgattatctaccgggacctcatcagccgtgagtcctcactgcactatccttactgccgcacacgggggtctggggtgcgggtgggggcggggaaggcgcagccgtcgcgggcctaggggacgccggcggtcttagccgagcgcggaggggtcggtgcccggggctcgcgcccagctctggtgtgctacggaggggcagatcccgcgtgcggccgccggcgcgggaaatgcgggaaatggcggcgccaggcgcacggtgatgggcggctctgtgtatccggcagacgatgagatgttctccgacatctacaagatccgggagatcgcggacgggttgtgcctggaggtggaggggaagatggtcagtaggacagaaggtaacattgatgactcgctcattggtggaaatgcctccgctgaaggccccgagggcgaaggtaccgaaagcacagtaatcactggtgtcgatattgtcatgaaccatcacctgcaggaaacaagtttcacaaaagaagcctacaagaagtacatcaaagattacatgaaatcaatcaaagggaaacttgaagaacagagaccagaaagagtaaaaccttttatgacaggggctgcagaacaaatcaagcacatccttgctaatttcaaaaactaccagttctttattggtgaaaacatgaatccagatggcatggttgctctattggactaccgtgaggatggtgtgaccccatatatgattttctttaaggatggtttagaaatggaaaaatgttaacaaatgtggcaattattttggatctatcacctgtcatcataactggcttctgcttgtcatccacacaacaccaggacttaagac

SEQ ID NO: 196544 - DNA, 1101 bp, Homo sapiens
  Payload ID: 18769
  Gene Name: tumor protein, translationally-controlled 1
  Uniprot ID: P13693
  ENST ID: ENST00000379056
  CDS Start-End: 172-588
atatgaggttggggagcggctgagtcggccttttccgcccgctcccccctccccccgagcgccgctccggctgcaccgcgctcgctccgagtttcaggctcgtgctaagctagcgccgtcgtcgtctcccttcagtcgccatcatgattatctaccgggacctcatcagccatggtcagtaggacagaaggtaacattgatgactcgctcattggtggaaatgcctccgctgaaggccccgagggcgaaggtaccgaaagcacagtaatcactggtgtcgatattgtcatgaaccatcacctgcaggaaacaagtttcacaaaagaagcctacaagaagtacatcaaagattacatgaaatcaatcaaagggaaacttgaagaacagagaccagaaagagtaaaaccttttatgacaggggctgcagaacaaatcaagcacatccttgctaatttcaaaaactaccagttctttattggtgaaaacatgaatccagatggcatggttgctctattggactaccgtgaggatggtgtgaccccatatatgattttctttaaggatggtttagaaatggaaaaatgttaacaaatgtggcaattattttggatctatcacctgtcatcataactggcttctgcttgtcatccacacaacaccaggacttaagacaaatgggactgatgtcatcttgagctcttcatttattttgactgtgatttatttggagtggaggcattgtttttaagaaaaacatgtcatgtaggttgtctaaaaataaaatgcatttaaactcatttgagagaatgccttttagtttaatgcatatttaaactaaattgatcctgtagtgttcctggagaagctagagcctgattgtaggctactactcatcaattaacttctacagtggagactacttctgggactggaatataaaaaagaatcaaaggttctgattttgagttgcaataaagggaaagaccatgctcatagcagtgccaacatctgaagtgtggagccttacccatttcatcacctacaacggaagtagttaactggaagagattaccaagagaataaaaagagactcattcagtg

SEQ ID NO: 196545 - DNA, 764 bp, Homo sapiens
  Payload ID: 18769
  Gene Name: tumor protein, translationally-controlled 1
  ENST ID: ENST00000379060
  CDS Start-End: 94-576
gtttcaggctcgtgctaagctagcgccgtcgtcgtctcccttcagtcgccatcatgattatctaccgggacctcatcagccgtgaacgatgagatgttctccgacatctacaagatccgggagatcgcggacgggttgtgcctggaggtggaggggaagatggtcagtaggacagaaggtaacattgatgactcgctcattggtggaaatgcctccgctgaaggccccgagggcgaaggtaccgaaagcacagtaatcactggtgtcgatattgtcatgaaccatcacctgcaggaaacaagtttcacaaaagaagcctacaagaagtacatcaaagattacatgaaatcaatcaaagggaaacttgaagaacagagaccagaaagagtaaaaccttttatgacaggggctgcagaacaaatcaagcacatccttgctaatttcaaaaactaccagttctttattggtgaaaacatgaatccagatggcatggttgctctattggactaccgtgaggatggtgtgaccccatatatgattttctttaaggatggtttagaaatggaaaaatgttaacaaatgtggcaattattttggatctatcacctgtcatcataactggcttctgcttgtcatccacacaacaccaggacttaagacaaatgggactgatgtcatcttgagctcttcatttattttgactgtgatttatttggagtggaggcattgtttttaagaaaaacatgtcatgtaggttgtctaaa

SEQ ID NO: 196546 - DNA, 4735 bp, Homo sapiens
  Payload ID: 18769
  Gene Name: tumor protein, translationally-controlled 1
  Uniprot ID: P13693
  ENST ID: ENST00000530705
  CDS Start-End: 302-820
ggaacggagccttgtgtctccgcctcaagtccccggatgctcacctccccgactcgcccccgctgtggccccgcccccgcgcggctcttcgtgccacgtcaccgcctgcgtcgcttccggaggcgcagcgggcgatgacgtagagggacgtgccctctatatgaggttggggagcggctgagtcggccttttccgcccgctcccccctccccccgagcgccgctccggctgcaccgcgctcgctccgagtttcaggctcgtgctaagctagcgccgtcgtcgtctcccttcagtcgccatcatgattatctaccgggacctcatcagccacgatgagatgttctccgacatctacaagatccgggagatcgcggacgggttgtgcctggaggtggaggggaagatggtcagtaggacagaaggtaacattgatgactcgctcattggtggaaatgcctccgctgaaggccccgagggcgaaggtaccgaaagcacagtaatcactggtgtcgatattgtcatgaaccatcacctgcaggaaacaagtttcacaaaagaagcctacaagaagtacatcaaagattacatgaaatcaatcaaagggaaacttgaagaacagagaccagaaagagtaaaaccttttatgacaggggctgcagaacaaatcaagcacatccttgctaatttcaaaaactaccagttctttattggtgaaaacatgaatccagatggcatggttgctctattggactaccgtgaggatggtgtgaccccatatatgattttctttaaggatggtttagaaatggaaaaatgttaacaaatgtggcaattattttggatctatcacctgtcatcataactggcttctgcttgtcatccacacaacaccaggacttaagacaaatgggactgatgtcatcttgagctcttcatttattttgactgtgatttatttggagtggaggcattgtttttaagaaaaacatgtcatgtaggttgtctaaaaataaaatgcatttaaactcatttgagagaatgccttttagtttaatgcatatttaaactaaattgatcctgtagtgttcctggagaagctagagcctgattgtaggctactactcatcaattaacttctacagtggagactacttctgggactggaatataaaaaagaatcaaaggttctgattttgagttgcaataaagggaaagaccatgctcatagcagtgccaacatctgaagtgtggagccttacccatttcatcacctacaacggaagtagttaactggaagagattaccaagagaataaaaagagactcattcagtggaagcaactttgtctcagcttatttcacataaagagagcgaagtcttttgggatgaatgttaattaaactccctggtaactagaacagggactggcaaactagcctatctgaccacctgttttgtacactttaaggtggttggttgcctttttaaatggttgaggggaaaagaataccttgtgggatatggaatttaagttcgagtccagttttattggaacgtggctatgcttattcatttatggattgactgtggctgttgtcagtgcatgagcagagttgtgtctaacagactagagcctgcaagtttgccagcccctgatttaaaagatgaaggtacacagaatgtgggctggctggtgggcaaaggggtaaaaatgttctctatattgtatctgaaaagatggggtgtctgaataagaaaatgcatctatttgacagacctggagcagttgctatctgctgctatggtttccaccacagatgcaagaagaacatgtccttgcgctttccgtctgtctaattgtggcagctgagattgaatagaggaatacaggaggaaaaaaagcgggaagagtttttgaggcaggtcggtcacccaggcttgtagtgcagtggcacaagcaactcactgcattctctgcatcctgtgctcaagccattttcccacctcagtctcactagttgctgggactgcaggcatgcacccctatgcccagctaatttttgtagagaccgagtatcgcttagttgcccagggtggtctcaactcctgggctcaaggagatctgcccacctcagcctcccaaagtgcaggcctagcctgggaggggaattttcaaaacgtgagttttgggaaatagtctatcagccttacctggttgattacacttgtaaaagaaagattaaaagcaggccagtgactctggtctgcttgaacatgtgaatgtagtggtttgagcaatctggagtttgccctagtgtcaaattccagactgtccatagtgtccaaaacctgaggcagatactaatgttaacccccagcaccccgtgattggaaacaaacctaaatacgtattgggaacttaatagcaattttaagcattctgatagattttttgtagggatggggtcatgccatgtggcccaggctggtctgaaaactctggcctcaagtgatctcaagctttggccttctaaagtgttgggattacaggtgtgaggcattgcacctggcttagcgttctgatttgacattgtaatgaaaagtgtgagtctcatctacagggccttttgtcctctgaaatgatagcaggaagggaattttcaggcagtggtcaaagctggggaaaccaggatagtgaagaaggccttgaggtgagagatggaagctaattggtgaactagccttggaagcctgaaacagacaagtagcaattcagagactttgtgggctccactgctccaacttgttttgaagattttcagttctgcagaagaggtatttccccagttgtcctttcagtgctcttagctgttttcccaacatccagatccaatcaaggctgggacatagcattttatcatgtctatttaagtcagaagtgatgaaccccagctgtttacctcatggtaaacctttgaagattccaggtagaatcttctcagactttgaagactgtctcattttatatctttttctcgttattcctagggtcaagacgttttgggcaagaataaggatgtgaacatcagaaagctcataacattttgtttttgatgctaagtttaacaaaggcatgctttagtagcctgtgggccctagggtttgttaaagtgtggagaacaactgagtggagcaagaggacttttctaggaaggtccttgtaatgtgacatttgaaaacaaatgaaggtgtggaagtaggccatgtggatatcaggacaaaccattccaggccaagacaacagcagttagtctggagtgtgatgtgttctgggaaaaaagtggccactttgctaacccaagaagacaggaagggttgtaaagcagtgggagtgtgcaaggaaggaagaccagacctcaaggaaaccacaggcgctctgagcagaagagttacatgatatgactcaaatttttaaaggatcactttggctgccaggtggcagggtaaaagcatagaataattgtgtataatgtgtttttaaggcaaagatagtggcttagtctagggtagtagactgaggtggtaggaaatgaagatagagacaacaggatatgctggtgggtgaggatggatttaatgttgatacaagtattttggtctgagcgtttggaagaaagttggcactgaggtgggaagtcgagtttagttttgttagttttggatgtgttaagtttgagatgctgattcttcagagaagtctaagctggagaactatatagagagtggaaagataacaatagacattgaaagccatgatacaggataaggtcatttggagagaggatagactgcattccaacatgagattggttgacaaagagaaaccaacaaaggtaattaagaggtgctcccactgcacttgtactcagaaggctgaggtaggattgttagaggccagcctgggcaccacagggagaccccatctctaaaatttagccaggaaccatggctcatgcctgtagccccaggaatttgggaggctgagtggggaggatcgcttgaggtcaggagtttgagaccagcctgggcaacatagggagacctaaaaaaattaattgggcatctgtagtcccagctactcaggcggctgagctgagaggatggcttgagtccgagagattgagggtgcagtgagctgtgatcataccactgcactccagcctgggcggcagtgagacactatctgaaaaaagtttaaaaattttaaaaaagaaggaactgcccctgaggtaagaaccaagggagggcctcccagaggtcaggtggaaaaagttttaggaaggaggaagtagtcaacagggttacctgttgcaaagtacttaagtaatatgaggcctgatagtggtaaacttgactaccgttggatttcactagtgggaaaggaagtctaattaaaatgcactcaagagactaacagtcgcaggcatgaaatacaatacaggtacatggttttttattatgtgtgcatctgcttcagtaataggtgtgaattactcatttggatcattaggagtttcaaaatctagttaaatgactagatttttgttgatgtaaattctgtcattctgaactgcagggattgtcagtaacttaactgcaaactaaactggtgataattatggtaaaattgcaagacgagcaataaatctcaaccaacttgagagaacactgataa

SEQ ID NO: 196547 - DNA, 530 bp, Homo sapiens
  Payload ID: 18769
  Gene Name: tumor protein, translationally-controlled 1
  ENST ID: ENST00000530245
  CDS Start-End: 1-232
aatcaagcacatccttgctaatttcaaaaactaccagttctttattggtgaaaacatgaatccagatggcatggttgctctattggactaccgtgaggatggtgtgaccccatatatgattttctttaaggatggtttagaaatggaaaaatgtgatgcaaaagaaagaaatccctgcgctttctgtctgtctttgtggcggcccagattgaattggggaatacatctttagcctggaaatgtaggctgcatgttaatggtaatgtaacttttgcagtgtaatgtttgaaaaatattaatgtagtttttgcttttacagtaacaaatgtggcaattattttggatctatcacctgtcatcataactggcttctgcttgtcatccacacaacaccaggacttaagacaaatgggactgatgtcatcttgagctcttcatttattttgactgtgatttatttggagtggaggcattgtttttaagaaaaacatgtcatgtaggttgtctaaaaataaaatgcatttaaactc

SEQ ID NO: 196548 - DNA, 731 bp, Homo sapiens
  Payload ID: 18769
  Gene Name: tumor protein, translationally-controlled 1
  ENST ID: ENST00000528619
  CDS Start-End: 1-232
aatcaagcacatccttgctaatttcaaaaactaccagttctttattggtgaaaacatgaatccagatggcatggttgctctattggactaccgtgaggatggtgtgaccccatatatgattttctttaaggatggtttagaaatggaaaaatgtgatgcaaaagaaagaaatccctgcgctttctgtctgtctttgtggcggcccagattgaattggggaatacatctttagcctggaaattaacaaatgtggcaattattttggatctatcacctgtcatcataactggcttctgcttgtcatccacacaacaccaggacttaagacaaatgggactgatgtcatcttgagctcttcatttattttgactgtgatttatttggagtggaggcattgtttttaagaaaaacatgtcatgtaggttgtctaaaaataaaatgcatttaaactcatttgagagaatgccttttagtttaatgcatatttaaactaaattgatcctgtagtgttcctggagaagctagagcctgattgtaggctactactcatcaattaacttctacagtggagactacttctgggactggaatataaaaaagaatcaaaggttctgattttgagttgcaataaagggaaagaccatgctcatagcagtgccaacatctgaagtgtggagccttacccatttcatcacctacaacggaagtagttaactggaagagattaccaa

SEQ ID NO: 196549 - DNA, 613 bp, Homo sapiens
  Payload ID: 18769
  Gene Name: tumor protein, translationally-controlled 1
  ENST ID: ENST00000527226
  CDS Start-End: 128-613
ccgagcgccgctccggctgcaccgcgctcgctccgagtttcaggctcgtgctaagctagcgccgtcgtcgtctcccttcagtcgccatcatgattatctaccgggacctcatcagccgcgcacggtgatgggcggctctgtgtatccggcagacgatgagatgttctccgacatctacaagatccgggagatcgcggacgggttgtgcctggaggtggaggggaagatggtcagtaggacagaaggtaacattgatgactcgctcattggtggaaatgcctccgctgaaggccccgagggcgaaggtaccgaaagcacagtaatcactggtgtcgatattgtcatgaaccatcacctgcaggaaacaagtttcacaaaagaagcctacaagaagtacatcaaagattacatgaaatcaatcaaagggaaacttgaagaacagagaccagaaagagtaaaaccttttatgacaggggctgcagaacaaatcaagcacatccttgctaatttcaaaaactaccagttctttattggtgaaaacatgaatccagatggcatggttgctctattggactaccgtgaggatggtgtgaccccatatatgattttcttt

SEQ ID NO: 196550 - DNA, 4814 bp, Homo sapiens
  Payload ID: 18769
  Gene Name: tumor protein, translationally-controlled 1
  ENST ID: ENST00000616577
  CDS Start-End: 216-809
cttcgtgccacgtcaccgcctgcgtcgcttccggaggcgcagcgggcgatgacgtagagggacgtgccctctatatgaggttggggagcggctgagtcggccttttccgcccgctcccccctccccccgagcgccgctccggctgcaccgcgctcgctccgagtttcaggctcgtgctaagctagcgccgtcgtcgtctcccttcagtcgccatcatgattatctaccgggacctcatcagccacgatgagatgttctccgacatctacaagatccgggagatcgcggacgggttgtgcctggaggtggaggggaagatggtcagtaggacagaaggtaacattgatgactcgctcattggtggaaatgcctccgctgaaggccccgagggcgaaggtaccgaaagcacagtaatcactggtgtcgatattgtcatgaaccatcacctgcaggaaacaagtttcacaaaagaagcctacaagaagtacatcaaagattacatgaaatcaatcaaagggaaacttgaagaacagagaccagaaagagtaaaaccttttatgacaggggctgcagaacaaatcaagcacatccttgctaatttcaaaaactaccagttctttattggtgaaaacatgaatccagatggcatggttgctctattggactaccgtgaggatggtgtgaccccatatatgattttctttaaggatggtttagaaatggaaaaatgtgatgcaaaagaaagaaatccctgcgctttctgtctgtctttgtggcggcccagattgaattggggaatacatctttagcctggaaatgtaggctgcatgttaatggtaatgtaacttttgcagtgtaatgtttgaaaaatattaatgtagtttttgcttttacagtaacaaatgtggcaattattttggatctatcacctgtcatcataactggcttctgcttgtcatccacacaacaccaggacttaagacaaatgggactgatgtcatcttgagctcttcatttattttgactgtgatttatttggagtggaggcattgtttttaagaaaaacatgtcatgtaggttgtctaaaaataaaatgcatttaaactcatttgagagaatgccttttagtttaatgcatatttaaactaaattgatcctgtagtgttcctggagaagctagagcctgattgtaggctactactcatcaattaacttctacagtggagactacttctgggactggaatataaaaaagaatcaaaggttctgattttgagttgcaataaagggaaagaccatgctcatagcagtgccaacatctgaagtgtggagccttacccatttcatcacctacaacggaagtagttaactggaagagattaccaagagaataaaaagagactcattcagtggaagcaactttgtctcagcttatttcacataaagagagcgaagtcttttgggatgaatgttaattaaactccctggtaactagaacagggactggcaaactagcctatctgaccacctgttttgtacactttaaggtggttggttgcctttttaaatggttgaggggaaaagaataccttgtgggatatggaatttaagttcgagtccagttttattggaacgtggctatgcttattcatttatggattgactgtggctgttgtcagtgcatgagcagagttgtgtctaacagactagagcctgcaagtttgccagcccctgatttaaaagatgaaggtacacagaatgtgggctggctggtgggcaaaggggtaaaaatgttctctatattgtatctgaaaagatggggtgtctgaataagaaaatgcatctatttgacagacctggagcagttgctatctgctgctatggtttccaccacagatgcaagaagaacatgtccttgcgctttccgtctgtctaattgtggcagctgagattgaatagaggaatacaggaggaaaaaaagcgggaagagtttttgaggcaggtcggtcacccaggcttgtagtgcagtggcacaagcaactcactgcattctctgcatcctgtgctcaagccattttcccacctcagtctcactagttgctgggactgcaggcatgcacccctatgcccagctaatttttgtagagaccgagtatcgcttagttgcccagggtggtctcaactcctgggctcaaggagatctgcccacctcagcctcccaaagtgcaggcctagcctgggaggggaattttcaaaacgtgagttttgggaaatagtctatcagccttacctggttgattacacttgtaaaagaaagattaaaagcaggccagtgactctggtctgcttgaacatgtgaatgtagtggtttgagcaatctggagtttgccctagtgtcaaattccagactgtccatagtgtccaaaacctgaggcagatactaatgttaacccccagcaccccgtgattggaaacaaacctaaatacgtattgggaacttaatagcaattttaagcattctgatagattttttgtagggatggggtcatgccatgtggcccaggctggtctgaaaactctggcctcaagtgatctcaagctttggccttctaaagtgttgggattacaggtgtgaggcattgcacctggcttagcgttctgatttgacattgtaatgaaaagtgtgagtctcatctacagggccttttgtcctctgaaatgatagcaggaagggaattttcaggcagtggtcaaagctggggaaaccaggatagtgaagaaggccttgaggtgagagatggaagctaattggtgaactagccttggaagcctgaaacagacaagtagcaattcagagactttgtgggctccactgctccaacttgttttgaagattttcagttctgcagaagaggtatttccccagttgtcctttcagtgctcttagctgttttcccaacatccagatccaatcaaggctgggacatagcattttatcatgtctatttaagtcagaagtgatgaaccccagctgtttacctcatggtaaacctttgaagattccaggtagaatcttctcagactttgaagactgtctcattttatatctttttctcgttattcctagggtcaagacgttttgggcaagaataaggatgtgaacatcagaaagctcataacattttgtttttgatgctaagtttaacaaaggcatgctttagtagcctgtgggccctagggtttgttaaagtgtggagaacaactgagtggagcaagaggacttttctaggaaggtccttgtaatgtgacatttgaaaacaaatgaaggtgtggaagtaggccatgtggatatcaggacaaaccattccaggccaagacaacagcagttagtctggagtgtgatgtgttctgggaaaaaagtggccactttgctaacccaagaagacaggaagggttgtaaagcagtgggagtgtgcaaggaaggaagaccagacctcaaggaaaccacaggcgctctgagcagaagagttacatgatatgactcaaatttttaaaggatcactttggctgccaggtggcagggtaaaagcatagaataattgtgtataatgtgtttttaaggcaaagatagtggcttagtctagggtagtagactgaggtggtaggaaatgaagatagagacaacaggatatgctggtgggtgaggatggatttaatgttgatacaagtattttggtctgagcgtttggaagaaagttggcactgaggtgggaagtcgagtttagttttgttagttttggatgtgttaagtttgagatgctgattcttcagagaagtctaagctggagaactatatagagagtggaaagataacaatagacattgaaagccatgatacaggataaggtcatttggagagaggatagactgcattccaacatgagattggttgacaaagagaaaccaacaaaggtaattaagaggtgctcccactgcacttgtactcagaaggctgaggtaggattgttagaggccagcctgggcaccacagggagaccccatctctaaaatttagccaggaaccatggctcatgcctgtagccccaggaatttgggaggctgagtggggaggatcgcttgaggtcaggagtttgagaccagcctgggcaacatagggagacctaaaaaaattaattgggcatctgtagtcccagctactcaggcggctgagctgagaggatggcttgagtccgagagattgagggtgcagtgagctgtgatcataccactgcactccagcctgggcggcagtgagacactatctgaaaaaagtttaaaaattttaaaaaagaaggaactgcccctgaggtaagaaccaagggagggcctcccagaggtcaggtggaaaaagttttaggaaggaggaagtagtcaacagggttacctgttgcaaagtacttaagtaatatgaggcctgatagtggtaaacttgactaccgttggatttcactagtgggaaaggaagtctaattaaaatgcactcaagagactaacagtcgcaggcatgaaatacaatacaggtacatggttttttattatgtgtgcatctgcttcagtaataggtgtgaattactcatttggatcattaggagtttcaaaatctagttaaatgactagatttttgttgatgtaaattctgtcattctgaactgcagggattgtcagtaacttaactgcaaactaaactggtgataattatggtaaaattgcaagacgagcaataaatctcaaccaacttgagagaacactgataa

SEQ ID NO: 196551 - DNA, 1766 bp, Homo sapiens
  Payload ID: 18770
  Gene Name: tumor suppressing subtransferable candidate 1
  Uniprot ID: Q53HC9
  ENST ID: ENST00000382125
  CDS Start-End: 194-1357
gatgacacatccgaaaaataggaagtggccactacggaagctgttctgggccagaaagacttccagtttggagtcgtttgctgcggggagggaatgaatgggcgctgggaacacgcccgcgaggtggggacgcgccggccgtagcgaggtccttagcgtgtgagtggccggggtcgggtcgcttccccgcagcatggaggacgatgcaccagtgatctacgggctggagttccaggcacgtgccttaacacctcaaactgcagaaacagatgccattcggtttttggttgggacgcagtctcttaaatatgataatcagatccatatcatagattttgacgatgaaaacaacattataaataaaaatgtcctcctccatcaagcgggtgaaatctggcatattagcgctagccctgcagacagaggtgtgctgacgacctgctacaacagaacttcagacagcaaagtcctgacatgtgcagccgtgtggaggatgccgaaggaattggaatcaggcagccacgagtcccctgatgattcatccagcactgcacagaccctggagctgctctgtcaccttgacaacacagcccatggcaacatggcctgtgtcgtgtgggagccaatgggagatgggaagaaaatcatttccttggctgataaccatatcctgctgtgggatttacaggaaagctcgagccaggctgtgctggccagctcagcgtccctggaagggaagggacaactgaagttcacctcaggacggtggagcccacatcataactgcacccaggtggccacagcgaacgacaccaccctccgtggctgggacacccggagcatgagccagatctactgcatagagaatgcccacggacagctggtgcgggaccttgactttaatcccaataagcagtactacttggccagctgcggagacgactgtaaggtgaagttctgggacacccgaaatgtcaccgaacccgtgaagaccctggaggagcactcccactgggtgtggaacgtccgctacaaccactctcatgaccagctggtcctcacgggcagcagtgacagcagagtcatcctttccaacatggtgtccatctcgtcggagcccttcggccacttggtagacgacgatgacatcagtgaccaggaggaccaccgttctgaagagaagagcaaggagcccctgcaggacaacgtgatcgccacctacgaggagcacgaggacagcgtctatgccgtggactggtcctcggctgacccgtggctgtttgcctccctgagctatgacgggaggctcgtgatcaacagggtgcccagggccctgaagtaccacatcctgctatgactcccgggcctgggttatccaggtcccattgagtggttttcctcttggcagattctcaaacagtcgcagctctttggaggtgactcgtgttccaggtggatccctctctgggagagccgctgttcccttcctgtagcagcagcatttatgaatggggtgaatggggctattgtcgacggcacagctaatgcccgaacccagcccctgtcggcagagacagagccccacattattatgtgaataacaatgttttctgttttaagggtgtcaggagtttcgctttttaaaaaaatgtctgttcctgcaatagtaactcttctttctcttgagagtaaaaaatgaaataaaataaatccacgctgcacaggtgctcggctcattctttcaggagctctgccctgtgacccca

SEQ ID NO: 196552 - DNA, 1795 bp, Homo sapiens
  Payload ID: 18770
  Gene Name: tumor suppressing subtransferable candidate 1
  ENST ID: ENST00000398659
  CDS Start-End: 142-1386
agaaagacttccagtttggagtcgtttgctgcggggagggaatgaatgggcgctgggaacacgcccgcgaggtggggacgcgccggccgtagcgaggtccttagcgtgtgagtggccggggtcgggtcgcttccccgcagcatggaggacgatgcaccagtgatctacgggctggagttccaggcacgtgccttaacacctcaaactgcagaaacagatgccattcggtttttggttgggacgcagtctcttaaatatgataatcagatccatatcatagattttgacgatgaaaacaacattataaataaaaatgtcctcctccatcaagcgggtgaaatctggcatattagcgctagccctgcagacagaggtgtgctgacgacctgctacaacagaacattttgttgtgtgctgtctctggattcctttggtgctcttgggaagtcagctgcccaactgttcatagcactggcaacctcttcagacagcaaagtcctgacatgtgcagccgtgtggaggatgccgaaggaattggaatcaggcagccacgagtcccctgatgattcatccagcactgcacagaccctggagctgctctgtcaccttgacaacacagcccatggcaacatggcctgtgtcgtgtgggagccaatgggagatgggaagaaaatcatttccttggctgataaccatatcctgctgtgggatttacaggaaagctcgagccaggctgtgctggccagctcagcgtccctggaagggaagggacaactgaagttcacctcaggacggtggagcccacatcataactgcacccaggtggccacagcgaacgacaccaccctccgtggctgggacacccggagcatgagccagatctactgcatagagaatgcccacggacagctggtgcgggaccttgactttaatcccaataagcagtactacttggccagctgcggagacgactgtaaggtgaagttctgggacacccgaaatgtcaccgaacccgtgaagaccctggaggagcactcccactgggtgtggaacgtccgctacaaccactctcatgaccagctggtcctcacgggcagcagtgacagcagagtcatcctttccaacatggtgtccatctcgtcggagcccttcggccacttggtagacgacgatgacatcagtgaccaggaggaccaccgttctgaagagaagagcaaggagcccctgcaggacaacgtgatcgccacctacgaggagcacgaggacagcgtctatgccgtggactggtcctcggctgacccgtggctgtttgcctccctgagctatgacgggaggctcgtgatcaacagggtgcccagggccctgaagtaccacatcctgctatgactcccgggcctgggttatccaggtcccattgagtggttttcctcttggcagattctcaaacagtcgcagctctttggaggtgactcgtgttccaggtggatccctctctgggagagccgctgttcccttcctgtagcagcagcatttatgaatggggtgaatggggctattgtcgacggcacagctaatgcccgaacccagcccctgtcggcagagacagagccccacattattatgtgaataacaatgttttctgttttaagggtgtcaggagtttcgctttttaaaaaaatgtctgttcctgcaatagtaactcttctttctcttgagagtaaaaaatgaaataaaataaatccacgctgcacaggtgctcggctcattctttcaggagctctgccctgtgacccca

SEQ ID NO: 196553 - DNA, 738 bp, Homo sapiens
  Payload ID: 18770
  Gene Name: tumor suppressing subtransferable candidate 1
  ENST ID: ENST00000406835
  CDS Start-End: 105-368
gggaatgaatgggcgctgggaacacgcccgcgaggtggggacgcgccggccgtagcgaggtccttagcgtgtgagtggccggggtcgggtcgcttccccgcagcatggaggacgatgcaccagtgatctacgggctggagttccaggcacgtgccttaacacctcaaactgcagaaacagatgccattcggtttttggttgggacgcagtctcttaaatatgataatcagaataaagactggaaggaaataggccaaaaaggactaaaaattgagccaagggttatcttcagatgcttttcacaggggatgtgttccaagaccacccagcggatgccaggaaaccttgatccatatcatagattttgacgatgaaaacaacattataaataaaaatgtcctcctccatcaagcgggtgaaatctggcatattagcgctagccctgcagacagaggtgtgctgacgacctgctacaacagaacttcagacagcaaagtcctgacatgtgcagccgtgtggaggatgccgaaggaattggaatcaggcagccacgagtcccctgatgattcatccagcactgcacagaccctggagctgctctgtcaccttgacaacacagcccatggcaacatggcctgtgtcgtgtgggagccaatgggagatgggaagaaaatcatttccttggctgataaccatatcctgctgtgggatttacaggaaagctcgagccaggctgtg

SEQ ID NO: 196554 - DNA, 1771 bp, Homo sapiens
  Payload ID: 18770
  Gene Name: tumor suppressing subtransferable candidate 1
  ENST ID: ENST00000443925
  CDS Start-End: 102-1046
aatgaatgggcgctgggaacacgcccgcgaggtggggacgcgccggccgtagcgaggtccttagcgtgtgagtggccggggtcgggtcgcttccccgcagcatggaggacgatgcaccagtgatctacgggctggagttccaggcacgtgccttaacacctcaaactgcagaaacagatgccattcggtttttggttgggacgcagtctcttaaatatgataatcagatccatatcatagattttgacgatgaaaacaacattataaataaaaatgtcctcctccatcaagcgggtgaaatctggcatattagcgctagccctgcagacagaggtgtgctgacgacctgctacaacagaacttcagacagcaaagtcctgacatgtgcagccgtgtggaggatgccgaaggaattggaatcaggcagccacgagtcccctgatgattcatccagcactgcacagaccctggagctgctctgtcaccttgacaacacagcccatggcaacatggcctgtgtcgtgtgggagccaatgggagatgggaagaaaatcatttccttggctgataaccatatcctgctgtgggatttacaggaaagctcgagccaggctgtgagggaagaatctgaacattctgaaggagcgtgcacggaccctgtgtgtgccatcattcccaggctggaggccttgtggggaagaggaacactggagtcggggaacagggatggccccagacacctgcacctgccacgggcctcactcacagaaggaggacctgccacgagcctcactcaaggaagaaggactcgccacgggcctcactcacagaaggacccgccacgagcctcacgcatggaagaaggacccgccgagtgtttcctgggggaattggggttgagttatgactgcaagaagtcagccatatgccaagcataccagaatgccatggccaaattcattcaacagacactcagtgagctcactttggagagggtaataaggacttttcccaacaaatggtcatttctcactatttttaagtagtccttttaatcagacacagacctcctcatcatataattgggccccctcccaactgacagatgagaagaggaaagctaacgacggaagcagaggaagtgtctgaaggtgacgtggtctgagtgccagatctggggctgtgggtcaggtctgatgccctataaatgagtcccacccgggcacagaggtgctcacggtggctcctgcctgcccagacctctcctgtcctccttcaggtctgtgaggttctcagataacttgctcttatttgagtatcttgaatgatcaataacattttgtcctatgagcatgaatttgatttttggaaaaagttaattggaacaaaatctggtaaataaaataggtcagcaagctttgcaaaagctgattagtggaaaacgggttaaaaccacatgaaaactgatttccttgtaagactcataaaaagacattctgaaatattttgagcagagactgcatcattaaaataaatgtcagctttatagccagggatttcagacaatggccagtgaaatttatgttttggatatttgttttgaaaaagccattatctttaagaaaatatgtagtcagtgatttactaagttgcatattttaatatcatagtataatttaccaagttgcatagttttaatatcataaaactacatgtatagtttgattttgtaaatattggagctcactagcattttcttattagtcttcca

SEQ ID NO: 196555 - DNA, 847 bp, Homo sapiens
  Payload ID: 18770
  Gene Name: tumor suppressing subtransferable candidate 1
  ENST ID: ENST00000455162
  CDS Start-End: 100-276
tgaatgggcgctgggaacacgcccgcgaggtggggacgcgccggccgtagcgaggtccttagcgtgtgagtggccggggtcgggtcgcttccccgcagcatggaggacgatgcaccagtgatctacgggctggagttccaggcacgtgccttaacacctcaaactgcagaaacagatgccattcggtttttggttgggacgcagtctcttaaatatgataatcagtgtcgtgtgggagccaatgggagatgggaagaaaatcatttccttggctgataaccatatcctgctgtgggatttacaggaaagctcgagccaggctgtgctggccagctcagcgtccctggaagggaagggacaactgaagttcacctcaggacggtggagcccacatcataactgcacccaggtggccacagcgaacgacaccaccctccgtggctgggacacccggagcatgagccagatctactgcatagagaatgcccacggacagctggtgcgggaccttgactttaatcccaataagcagtactacttggccagctgcggagacgactgtaaggtgaagttctgggacacccgaaatgtcaccgaacccgtgaagaccctggaggagcactcccactgggtgtggaacgtccgctacaaccactctcatgaccagctggtcctcacgggcagcagtgacagcagagtcatcctttccaacatggtgtccatctcgtcggagcccttcggccacttggtagacgacgatgacatcagtgaccaggaggaccaccgttctgaagagaagagcaaggagcccctgcaggacaacgtgatcgccacctacgaggagcac

SEQ ID NO: 196556 - DNA, 647 bp, Homo sapiens
  Payload ID: 18770
  Gene Name: tumor suppressing subtransferable candidate 1
  ENST ID: ENST00000441271
  CDS Start-End: 112-647
gcggggagggaatgaatgggcgctgggaacacgcccgcgaggtggggacgcgccggccgtagcgaggtccttagcgtgtgagtggccggggtcgggtcgcttccccgcagcatggaggacgatgcaccagtgatctacgggctggagttccaggaaagctcgagccaggctgtgctggccagctcagcgtccctggaagggaagggacaactgaagttcacctcaggacggtggagcccacatcataactgcacccaggtggccacagcgaacgacaccaccctccgtggctgggacacccggagcatgagccagatctactgcatagagaatgcccacggacagctggtgcgggaccttgactttaatcccaataagcagtactacttggccagctgcggagacgactgtaaggtgaagttctgggacacccgaaatgtcaccgaacccgtgaagaccctggaggagcactcccactgggtgtggaacgtccgctacaaccactctcatgaccagctggtcctcacgggcagcagtgacagcagagtcatcctttccaacatggtgtccatctcgtcggagcccttcggccacttggtagacgacgatgacatcagtgaccaggaggaccaccgttctgaagagaa

SEQ ID NO: 196557 - DNA, 594 bp, Homo sapiens
  Payload ID: 18770
  Gene Name: tumor suppressing subtransferable candidate 1
  ENST ID: ENST00000444776
  CDS Start-End: 129-594
gtttggagtcgtttgctgcggggagggaatgaatgggcgctgggaacacgcccgcgaggtggggacgcgccggccgtagcgaggtccttagcgtgtgagtggccggggtcgggtcgcttccccgcagcatggaggacgatgcaccagtgatctacgggctggagttccaggcacgtgccttaacacctcaaactgcagaaacagatgccattcggtttttggttgggacgcagtctcttaaatatgataatcagatccatatcatagattttgacgatgaaaacaacattataaataaaaatgtcctcctccatcaagcgggtgaaatctggcatattagcgctagccctgcagacagaggtgtgctgacgacctgctacaacagaagagacatcatagaatcgtttggcattcttcctgtagctcagagtcccacgattgtctttgtaaacacgttgcaccaggtcttcttcaggggacaggtcgcagcttcagacagcaaagtcctgacatgtgcagccgtgtggaggatgccgaaggaattggaatcaggcagccacgagtcccctgatgattcatccagcactgcacaga

SEQ ID NO: 196558 - DNA, 672 bp, Homo sapiens
  Payload ID: 18770
  Gene Name: tumor suppressing subtransferable candidate 1
  ENST ID: ENST00000435721
  CDS Start-End: 93-491
gcgctgggaacacgcccgcgaggtggggacgcgccggccgtagcgaggtccttagcgtgtgagtggccggggtcgggtcgcttccccgcagcatggaggacgatgcaccagtgatctacgggctggagttccaggcacgtgccttaacacctcaaactgcagaaacagatgccattcggtttttggttgggacgcagtctcttaaatatgataatcagatccatatcatagattttgacgatgaaaacaacattataaataaaaatgtcctcctccatcaagcgggtgaaatctggcatattagcgctagccctgcagacagaggtgtgctgacgacctgctacaacagaatgtcgtgtgggagccaatgggagatgggaagaaaatcatttccttggctgataaccatatcctgctgtgggatttacaggaaagctcgagccaggctgtgctggccagctcagcgtccctggaagggaagggacaactgaagttcacctcaggacggtggagcccacatcataactgcacccaggtggccacagcgaacgacaccaccctccgtggctgggacacccggagcatgagccagatctactgcatagagaatgcccacggacagctggtgcgggaccttgactttaatcccaataagcagtactacttggccag

SEQ ID NO: 196559 - DNA, 1686 bp, Homo sapiens
  Payload ID: 18771
  Gene Name: tumor suppressing subtransferable candidate 4
  Uniprot ID: Q9Y5U2
  ENST ID: ENST00000333256
  CDS Start-End: 444-1433
atgccgtcgtttccggggctgcttccgagccggacccaagggccggggcgtggaggagtagaggggcgagcgcatgcgcacaggactacacgtcccgacaggcgtcgggagcggcggcccagttccttgtgggagctgtagttctgcaggcgcggaagccgtggtgctcggccggcagagcactcggtttcccagagggctgagcgcgccgcacggaggtgcggcgccgaccaagatggagactgccgagcagccttgagccgttgagcagctgaacagaggccatgccggggcactccgaggcctgagacgaccacgcctgtgccgctgaggaccttcatcagggctccgtccacttggcccgcttggctgtccaatcacactccagtgtcaaccactggcacccagcagccaagagaggtgtggcgtggccctggggacgcatggctgaggcaggaacaggtgagccgtcccccagcgtggagggcgaacacgggacggagtatgacacgctgccttccgacacagtctccctcagtgactcggactctgacctcagcttgcccggtggtgctgaagtggaagcactgtccccgatggggctgcctggggaggaggattcaggtcctgatgagccgccctcacccccgtcaggcctcctcccagccacggtgcagccattccatctgagaggcatgagctccaccttctcccagcgcagccgtgacatctttgactgcctggagggggcggccagacgggctccatcctctgtggcccacaccagcatgagtgacaacggaggcttcaagcggcccctagcgccctcaggccggtctccagtggaaggcctgggcagggcccatcggagccctgcctcaccaagggtgcctccggtccccgactacgtggcacaccccgagcgctggaccaagtacagcctggaagatgtgaccgaggtcagcgagcagagcaatcaggccaccgccctggccttcctgggctcccagagcctggctgcccccactgactgcgtgtcctccttcaaccaggatccctccagctgtggggaggggagggtcatcttcaccaaaccagtccgaggggtcgaagccagacacgagaggaagagggtcctggggaaggtgggagagccaggcaggggcggccttgggaatcctgccacagacaggggcgagggccctgtggagctggcccatctggccgggcccgggagcccagaggctgaggagtggggcagccaccatggaggcctgcaggaggtggaggcactgtcagggtctgtccacagtgggtctgtgccaggtctcccgccggtggaaactgttggcttccatggcagcaggaagcggagtcgagaccacttccggaacaagagcagcagccccgaggacccaggtgctgaggtctgagagggagatggcccagcctgaccccactggccactgccatcctgctgccttcccagtggggctggtcagggggcagcctggccactgcctagctggaatgggaggaagcctgcaggtggcaccggtggccctggctgcagttctgggcagcatcctcccaagcagagaccttgctgaagctcctggggtgtggggtgtgggctggaagcactggctccctggtagggacaataaaggttttgggtctttctga

SEQ ID NO: 196560 - DNA, 992 bp, Homo sapiens
  Payload ID: 18771
  Gene Name: tumor suppressing subtransferable candidate 4
  ENST ID: ENST00000380992
  CDS Start-End: 524-907
tcccgacaggcgtcgggagcggcggcccagttccttgtgggagctgtagttctgcaggcgcggaagccgtggtgctcggccggcagagcactcggtttcccagagggctgagcgcgccgcacggaggtgcggcgccgaccaagatggagactgccgagcagccttgagccggaaggtgcacgctctttgtggaatacgactgctcaccccgcacagcaagcagcttataagtggccctcctgcctgatttcagccctgggttcaagccctgggtggctgcttactaccaaaatcgctcagtagctccaagcctgcctgcagagggttggcaccattaaatgagttgagcagctgaacagaggccatgccggggcactccgaggcctgagacgaccacgcctgtgccgctgaggaccttcatcagggctccgtccacttggcccgcttggctgtccaatcacactccagtgtcaaccactggcacccagcagccaagagaggtgtggcgtggccctggggacgcatggctgaggcaggaacaggcctcctcccagccacggtgcagccattccatctgagaggcatgagctccaccttctcccagcgcagccgtgacatctttgactgcctggagggggcggccagacgggctccatcctctgtggcccacaccagcatgagtgacaacggaggcttcaagcggcccctagcgccctcaggccggtctccagtggaaggcctgggcagggcccatcggagccctgcctcaccaagggtgcctccggtccccgactacgtggcacaccccgagcgctggaccaagtacagcctggaagatgtgaccgaggaagcggagtcgagaccacttccggaacaagagcagcagccccgaggacccaggtgctgaggtctgagagggagatggcccagcctgaccccactggccactgccatcctgctgccttcccagtggggctggtcagggggcagcc

SEQ ID NO: 196561 - DNA, 1544 bp, Homo sapiens
  Payload ID: 18771
  Gene Name: tumor suppressing subtransferable candidate 4
  Uniprot ID: Q9Y5U2
  ENST ID: ENST00000380996
  CDS Start-End: 492-1289
ccctcctcttcctgttcttggtcaattccggtcttgtttccccaacaaatgccgtcgtttccggggctgcttccgagccggacccaagggccggggcgtggaggagtagaggggcgagcgcatgcgcacaggactacacgtcccgacaggcgtcgggagcggcggcccagttccttgtgggagctgtagttctgcaggcgcggaagccgtggtgctcggccggcagagcactcggtttcccagagggctgagcgcgccgcacggaggtgcggcgccgaccaagatggagactgccgagcagccttgagccgttgagcagctgaacagaggccatgccggggcactccgaggcctgagacgaccacgcctgtgccgctgaggaccttcatcagggctccgtccacttggcccgcttggctgtccaatcacactccagtgtcaaccactggcacccagcagccaagagaggtgtggcgtggccctggggacgcatggctgaggcaggaacaggcctcctcccagccacggtgcagccattccatctgagaggcatgagctccaccttctcccagcgcagccgtgacatctttgactgcctggagggggcggccagacgggctccatcctctgtggcccacaccagcatgagtgacaacggaggcttcaagcggcccctagcgccctcaggccggtctccagtggaaggcctgggcagggcccatcggagccctgcctcaccaagggtgcctccggtccccgactacgtggcacaccccgagcgctggaccaagtacagcctggaagatgtgaccgaggtcagcgagcagagcaatcaggccaccgccctggccttcctgggctcccagagcctggctgcccccactgactgcgtgtcctccttcaaccaggatccctccagctgtggggaggggagggtcatcttcaccaaaccagtccgaggggtcgaagccagacacgagaggaagagggtcctggggaaggtgggagagccaggcaggggcggccttgggaatcctgccacagacaggggcgagggccctgtggagctggcccatctggccgggcccgggagcccagaggctgaggagtggggcagccaccatggaggcctgcaggaggtggaggcactgtcagggtctgtccacagtgggtctgtgccaggtctcccgccggtggaaactgttggcttccatggcagcaggaagcggagtcgagaccacttccggaacaagagcagcagccccgaggacccaggtgctgaggtctgagagggagatggcccagcctgaccccactggccactgccatcctgctgccttcccagtggggctggtcagggggcagcctggccactgcctagctggaatgggaggaagcctgcaggtggcaccggtggccctggctgcagttctgggcagcatcctcccaagcagagaccttgctgaagctcctggggtgtggggtgtgggctggaagcactggctccctggtagggacaataaaggttttgggtctttctgaga

SEQ ID NO: 196562 - DNA, 974 bp, Homo sapiens
  Payload ID: 18771
  Gene Name: tumor suppressing subtransferable candidate 4
  ENST ID: ENST00000437110
  CDS Start-End: 365-974
gcggcgccgaccaagatggagactgccgagcagccttgagccgggctgctcaaggtgatggtcgacaccccactttcctgagagcttgaccctcagatgccagggccttggctgcagattccttgggagctcccggggatcttccagcaaataggagcaaatcttttccccgtggatcaggaagttgagcagctgaacagaggccatgccggggcactccgaggcctgagacgaccacgcctgtgccgctgaggaccttcatcagggctccgtccacttggcccgcttggctgtccaatcacactccagtgtcaaccactggcacccagcagccaagagaggtgtggcgtggccctggggacgcatggctgaggcaggaacaggtgagccgtcccccagcgtggagggcgaacacgggacggagtatgacacgctgccttccgacacagtctccctcagtgactcggactctgacctcagcttgcccggtggtgctgaagtggaagcactgtccccgatggggctgcctggggaggaggattcaggtcctgatgagccgccctcacccccgtcaggcctcctcccagccacggtgcagccattccatctgagaggcatgagctccaccttctcccagcgcagccgtgacatctttgactgcctggagggggcggccagacgggctccatcctctgtggcccacaccagcatgagtgacaacggaggcttcaagcggcccctagcgccctcaggccggtctccagtggaaggcctgggcagggcccatcggagccctgcctcaccaagggtgcctccggtccccgactacgtggcacaccccgagcgctggaccaagtacagcctggaagatgtgaccgaggtcagcgagcagagcaatcaggccaccgccctggccttcctgggctcccagagcctggctgcccccactgactgcgtgtcctccttcaaccagg

SEQ ID NO: 196563 - DNA, 863 bp, Homo sapiens
  Payload ID: 18771
  Gene Name: tumor suppressing subtransferable candidate 4
  ENST ID: ENST00000435795
  CDS Start-End: 526-863
cgaccaagatggagactgccgagcagccttgagccgggctgctcaaggtgatggtcgacaccccactttcctgagagcttgaccctcagatgccagggccttggctgcagattccttgggagctcccggggatcttccagcaaataggagcaaatcttttccccgtggatcaggaaggtgcacgctctttgtggaatacgactgctcaccccgcacagcaagcagcttataagtggccctcctgcctgatttcagccctgggttcaagccctgggtggctgcttactaccaaaatcgctcagtagctccaagcctgcctgcagagggttggcaccattaaatgagttgagcagctgaacagaggccatgccggggcactccgaggcctgagacgaccacgcctgtgccgctgaggaccttcatcagggctccgtccacttggcccgcttggctgtccaatcacactccagtgtcaaccactggcacccagcagccaagagaggtgtggcgtggccctggggacgcatggctgaggcaggaacaggtgagccgtcccccagcgtggagggcgaacacgggacggagtatgacacgctgccttccgacacagtctccctcagtgactcggactctgacctcagcttgcccggtggtgctgaagtggaagcactgtccccgatggggctgcctggggaggaggattcaggtcctgatgagccgccctcacccccgtcaggcctcctcccagccacggtgcagccattccatctgagaggcatgagctccaccttctcccagcgcagccgtgacatctttgactgcctggagggggcggccagacgggctccatcctctgtggccca

SEQ ID NO: 196564 - DNA, 1423 bp, Homo sapiens
  Payload ID: 18771
  Gene Name: tumor suppressing subtransferable candidate 4
  Uniprot ID: Q9Y5U2
  ENST ID: ENST00000451491
  CDS Start-End: 182-1171
gttgagcagctgaacagaggccatgccggggcactccgaggcctgagacgaccacgcctgtgccgctgaggaccttcatcagggctccgtccacttggcccgcttggctgtccaatcacactccagtgtcaaccactggcacccagcagccaagagaggtgtggcgtggccctggggacgcatggctgaggcaggaacaggtgagccgtcccccagcgtggagggcgaacacgggacggagtatgacacgctgccttccgacacagtctccctcagtgactcggactctgacctcagcttgcccggtggtgctgaagtggaagcactgtccccgatggggctgcctggggaggaggattcaggtcctgatgagccgccctcacccccgtcaggcctcctcccagccacggtgcagccattccatctgagaggcatgagctccaccttctcccagcgcagccgtgacatctttgactgcctggagggggcggccagacgggctccatcctctgtggcccacaccagcatgagtgacaacggaggcttcaagcggcccctagcgccctcaggccggtctccagtggaaggcctgggcagggcccatcggagccctgcctcaccaagggtgcctccggtccccgactacgtggcacaccccgagcgctggaccaagtacagcctggaagatgtgaccgaggtcagcgagcagagcaatcaggccaccgccctggccttcctgggctcccagagcctggctgcccccactgactgcgtgtcctccttcaaccaggatccctccagctgtggggaggggagggtcatcttcaccaaaccagtccgaggggtcgaagccagacacgagaggaagagggtcctggggaaggtgggagagccaggcaggggcggccttgggaatcctgccacagacaggggcgagggccctgtggagctggcccatctggccgggcccgggagcccagaggctgaggagtggggcagccaccatggaggcctgcaggaggtggaggcactgtcagggtctgtccacagtgggtctgtgccaggtctcccgccggtggaaactgttggcttccatggcagcaggaagcggagtcgagaccacttccggaacaagagcagcagccccgaggacccaggtgctgaggtctgagagggagatggcccagcctgaccccactggccactgccatcctgctgccttcccagtggggctggtcagggggcagcctggccactgcctagctggaatgggaggaagcctgcaggtggcaccggtggccctggctgcagttctgggcagcatcctcccaagcagagaccttgctgaagctcctggggtgtggggtgtgggctggaagcactggctccctggtagggacaataaaggttttgggtctttctg

SEQ ID NO: 196565 - DNA, 851 bp, Homo sapiens
  Payload ID: 18771
  Gene Name: tumor suppressing subtransferable candidate 4
  ENST ID: ENST00000440813
  CDS Start-End: 229-851
ctcagtagctccaagcctgcctgcagagggttggcaccattaaatgagttgagcagctgaacagaggccatgccggggcactccgaggcctgagacgaccacgcctgtgccgctgaggaccttcatcagggctccgtccacttggcccgcttggctgtccaatcacactccagtgtcaaccactggcacccagcagccaagagaggtgtggcgtggccctggggacgcatggctgaggcaggaacaggcctcctcccagccacggtgcagccattccatctgagaggcatgagctccaccttctcccagcgcagccgtgacatctttgactgcctggagggggcggccagacgggctccatcctctgtggcccacaccagcatgagtgacaacggaggcttcaagcggcccctagcgccctcaggccggtctccagtggaaggcctgggcagggcccatcggagccctgcctcaccaagggtgcctccggtccccgactacgtggcacaccccgagcgctggaccaagtacagcctggaagatgtgaccgaggtcagcgagcagagcaatcaggccaccgccctggccttcctgggctcccagagcctggctgcccccactgactgcgtgtcctccttcaaccaggatccctccagctgtggggaggggagggtcatcttcaccaaaccagtccgaggggtcgaagccagacacgagaggaagagggtcctggggaaggtgggagagccaggcaggggcggccttgggaatcctgccacagacaggggcgagggccctgtggagctggcccatctggccgggcccgggagcccagaggctgaggagtgggg

SEQ ID NO: 196566 - DNA, 979 bp, Homo sapiens
  Payload ID: 18771
  Gene Name: tumor suppressing subtransferable candidate 4
  ENST ID: ENST00000485682
  CDS Start-End: 649-979
cgagagttcgtttgttctctggcggggaggtcttgctggcacatatagtggagaaaggccgggctctgcgttcatgtggagaaagagacggcttccttcagcctacggacatgaaggagtcaactctaccttccactcgttgccggctttcgccgagaaccccgagaaacggactaccggagtccctatcttgcagcccgatccccgctacccgtcggagtgccccgctgaccaggctgcttctggccgcggcggcgttccgctgcagaggacgggagtgcgaatctgggaagcagggttctggttgaactccagcttcgtctgcaacatactgtgtgacttgggcaaattatttcccccgccccgttcctgccagctttaaaacggtcatcagtggggggtgctgcgtatcccctttcactggggtggcttcttcactgaggagagtcgcgcctcagaggaactgagttgagcagctgaacagaggccatgccggggcactccgaggcctgagacgaccacgcctgtgccgctgaggaccttcatcagggctccgtccacttggcccgcttggctgtccaatcacactccagtgtcaaccactggcacccagcagccaagagaggtgtggcgtggccctggggacgcatggctgaggcaggaacaggtgagccgtcccccagcgtggagggcgaacacgggacggagtatgacacgctgccttccgacacagtctccctcagtgactcggactctgacctcagcttgcccggtggtgctgaagtggaagcactgtccccgatggggctgcctggggaggaggattcaggtcctgatgagccgccctcacccccgtcaggcctcctcccagccacggtgcagccattccatctgagaggcatgagctccaccttctcccagcgcagccgtgacatctttgactgcctggagggggcggccagacgggctccatcctctg

SEQ ID NO: 196567 - DNA, 912 bp, Homo sapiens
  Payload ID: 18771
  Gene Name: tumor suppressing subtransferable candidate 4
  ENST ID: ENST00000496468
  CDS Start-End: 339-912
ccattaaatgaggtaacgagtcaaaagtccctaccctgggtcctagcctgtcaggggctccgaaaacccaggctcaggtcggtcctgcccggcacctgtttcacacatgtacactccggtctgaggttggtcctctcccccaccccacccacctgcagttgagcagctgaacagaggccatgccggggcactccgaggcctgagacgaccacgcctgtgccgctgaggaccttcatcagggctccgtccacttggcccgcttggctgtccaatcacactccagtgtcaaccactggcacccagcagccaagagaggtgtggcgtggccctggggacgcatggctgaggcaggaacaggtgagccgtcccccagcgtggagggcgaacacgggacggagtatgacacgctgccttccgacacagtctccctcagtgactcggactctgacctcagcttgcccggtggtgctgaagtggaagcactgtccccgatggggctgcctggggaggaggattcaggtcctgatgagccgccctcacccccgtcaggcctcctcccagccacggtgcagccattccatctgagaggcatgagctccaccttctcccagcgcagccgtgacatctttgactgcctggagggggcggccagacgggctccatcctctgtggcccacaccagcatgagtgacaacggaggcttcaagcggcccctagcgccctcaggccggtctccagtggaaggcctgggcagggcccatcggagccctgcctcaccaagggtgcctccggtccccgactacgtggcacaccccgagcgctggaccaagtacagcctggaagatgtgaccgaggtcagcgagcagagcaatcaggccaccgccctggccttcctgggctcccagagcctgg

SEQ ID NO: 196568 - DNA, 2052 bp, Homo sapiens
  Payload ID: 18772
  Gene Name: tumor suppressor candidate 1
  Uniprot ID: Q2TAM9
  ENST ID: ENST00000358022
  CDS Start-End: 120-758
gccgccgcccgcgacctcctctcctcctccgtcgtcaccccggccgccctgccagccccgaacttgcccgcgcctggccgcgcggcccctcagcccacggggctggcggcgcggttgggatgggaccgatgtggcgcatgcgtggtggcgccactaggcgcgggagttgctgcggcggggacggtgctgcggacggccgagggccaggccgctccggccgggctcgtggtgggggcagccccagcggcggcggcggcggcgtgggctggcgaggccgcgcggacggcgcccgacagcagctggaggagcggtttgccgacctggcggcgagccacttggaggccatccgtgcgcgggacgagtgggaccggcagaacgcgcggctgcgtcaggagaacgcccggctgcggctcgagaaccggcggctgaagcgcgagaaccgcagcctcttccgtcaggctttgcggctccccggcgaaggcggcaacgggacgcccgcggaggcacgccgggtccctgaagaggccagcacgaaccggagggctagagacagcggccgagaggacgagccgggcagccccagggccctgagggcccgacttgagaagctggaagccatgtaccgccgggccctgctgcagctgcacctcgagcagcggggaccacgtccgagcggggacaaggaggagcagcctctacaggaacccgactccggcctccgctcccgggactcggagccctctgggccctggctgtagccgaggccgcagccggtgagaggcggagcctcgagcgggcccctcctcctccgttcccagctacccccgacctcgcgcacgccctggcccgctccctgcccgcggataccttggactacggtgccttcccgcccccaccagtggacacttccgggtggcgcttggccatccgcttggtggaggtcgagtgggtgcaagggccctcaggacctcccacatgtacagttcccctgcctcttgccccggctagtttccctggagagaggcctagccaacaacgaagggacggattttaaaacagcgagaactgggtgccaagaaacacttcatattccctgaacttttctggatgttgtgcgaacctgttgtatttttttttttcctgtattttggttctgagggatgagtaatgtgtttttagttggttgagtttatccattcttcaatcccctaaagccttcagctattctttcatatgtggccaacattttaagtacagtgtttgcttttataagtcggtgttacttggatgtcctataaaatacccactttttataaagatgatatttataacctaggaactcatgcctgtcttggctgcagtccctgtacatctaatatatactgatttgtttgcccccagagaatttttaaggtatctgcctatatcgtgatcttttgaaatggtaaataaatctggtgcattaaaaattatctgaaaggttgcggcgagtattatttgaagtgtgttacatttttatatttttaaaaagatacctttatgaatatactaatttaaatctggttttagttgtccttagtaaactatcatgttcttttagcttcatgtaacagtgatcttttaaaataatctaaagattaggtagtctaaaagttattttaatctttaatgttcaattagcttaattagtacgtagataatttgccttattttgactaaggacttttaagaaattataaattacttgtatatcaaaagttcccctaacaaagtaatttaagtctcagttgttatttcaatggcacaaaaaagtgactagtttagcaataaatgtcctaaaattacttttattgcgcttcgttaataacacttttgccaactaagtaatgaagaggataccattgtgcctgataaaaaaatcataggtccaagagtgtttcaatgatggaaaacatttcaggggaaaaaatcatgaatagaattgtcaagggaataaaatatactagttatggcatagtccaaaagtattaaatattatatattacaaaacaa

SEQ ID NO: 196569 - DNA, 1691 bp, Homo sapiens
  Payload ID: 18773
  Gene Name: tumor suppressor candidate 2
  Uniprot ID: O75896
  ENST ID: ENST00000232496
  CDS Start-End: 145-477
agtgaggtttccgtggagacagccgagcctgcggaaggcggcggcggcggcacctgcgatcagcggctggggcaggttatggtagtgcggactgcggtgtgagcagagcggccacggggcccgccatgcgccggcggccctgacatgggcgccagcgggtccaaagctcggggcctgtggcccttcgcctcggcggccggaggcggcggctcagaggcagcaggagctgagcaagctttggtgcggcctcggggccgagctgtgccccccttcgtattcacgcgccgcggctctatgttctatgatgaggatggggatctggctcacgagttctatgaggagacaatcgtcaccaagaacgggcagaagcgggccaagctgaggcgagtgcataagaatctgattcctcagggcatcgtgaagctggatcacccccgcatccacgtggatttccctgtgatcctctatgaggtgtgaccctgggaggtggcagacagaagcaccccctgccccggcaagaaactcccaggctcaatcaaggtgtggcttccattgaggagcccaggctggggccacaaccctgaataaactctgttggcccataaccttcagctgtgagcgggtcggtcccacagtattggttgggtgttggtttgtgtgtggacaagaggtggttggtgggtggtgaaggctaatggcagagttagcaccccactctcccaagccacccctgcaagcagcacagcagggcatataccagtcaggaatgcccgttacctggttccttgcctggtctgctttcttccaagtttgcctggggcctagccctgctagaggctacagcactttacaagcaaggtatgctttcttccagcccctaggctgtgggcactgtatacaagtaggaacttcctttccttcacttcccttttaacccctagtcagagcatttcagccgtttgctacctcgattcctcctgtgttggacagaggctgggggcagtgccagcctgattcttccgacctacctgccatttgttcccgccttcagatggatggacagtttgctggctattgataggagtggggactgggtgggggcttctccctctacccagggctgggctgatccccctactgcaactaactgttgccccccaaccccgaacccccagttgaggagttgagagagtgcaggctggggtcaggacaggctgcggatgcttgtgcctatggggagttactccaacccacctattctgtctaatctccatggctttgcaccaaatcctccacccctccaattgggaggggactgttcaccaccttgtggtaagggacaacaccctaaggctggtgccagtagttatgagtagcctaccaccccctcccttacagtaacccccaccccttcaggatcagtcaagggaaagcactagaacccctgggtagggaaagaaaggagggaaaaaccataaaaggaatacttataatgtgaaggtttgtaaatagtccatgatgatgtcgtggcagagtctgatttctatatagaggtgactttttttttaagtactgtgcaagctctgtgcttctataatgtgggaaatggcttggggaggatggcccctagcttaggaagactgttgtgttatttgttcaatttcaataaaatgatttgtagatcctgcaca

SEQ ID NO: 196570 - DNA, 561 bp, Homo sapiens
  Payload ID: 18773
  Gene Name: tumor suppressor candidate 2
  ENST ID: ENST00000417867
  CDS Start-End: 97-270
ggcacctgcgatcagcggctggggcaggttatggtagtgcggactgcggtgtgagcagagcggccacggggcccgccatgcgccggcggccctgacatgggcgccagcgggtccaaagctcggggcctgtggcccttcgcctcggcggccggaggcggcggctcagaggcagcaggagctgagcaagctttggtgcggcctcggggccgagctgtgccccccttcgtattcacgcgccgcggcttaggcttctgctatttcagtctttgacactgggccagcagcatcttctggagtgagaccaacatgcccaggccaccaccctgcccactctagaagtcctgggtgaaggcaaagtcctgatattagaatggctgcccttgctgaacaaatcaaggatgagaactggccttggtggctgcctggatggtgtgctctgctctatgttctatgatgaggatggggatctggctcacgagttctatgaggagacaatcgtcaccaagaacgggcagaagcgggccaagctgaggcgagtgcataagaatctgattcctcagg

SEQ ID NO: 196571 - DNA, 735 bp, Homo sapiens
  Payload ID: 18773
  Gene Name: tumor suppressor candidate 2
  ENST ID: ENST00000454201
  CDS Start-End: 108-305
gcggcggcggcggcacctgcgatcagcggctggggcaggttatggtagtgcggactgcggtgtgagcagagcggccacggggcccgccatgcgccggcggccctgacatgggcgccagcgggtccaaagctcggggcctgtggcccttcgcctcggcggccggaggcggcggctcagaggcagcaggagctgagcaagctttggtgcggcctcggggccgagctgtgccccccttcgtattcacgcgccgcgggcttctgctatttcagtctttgacactgggccagcagcatcttctggagtgagaccaacatgcccaggccaccaccctgcccactctagaagtcctgggtgaaggcaaagtcctgatattagaatggctgcccttgctgaacaaatcaaggatgagaactggccttggtggctgcctggatgctctatgttctatgatgaggatggggatctggctcacgagttctatgaggagacaatcgtcaccaagaacgggcagaagcgggccaagctgaggcgagtgcataagaatctgattcctcagggcatcgtgaagctggatcacccccgcatccacgtggatttccctgtgatcctctatgaggtgtgaccctgggaggtggcagacagaagcaccccctgccccggcaagaaactcccaggctcaatcaaggtgtggcttccattgaggagcccaggctggggccacaaccctgaataaac

SEQ ID NO: 196572 - DNA, 790 bp, Homo sapiens
  Payload ID: 18773
  Gene Name: tumor suppressor candidate 2
  ENST ID: ENST00000421918
  CDS Start-End: 153-350
gaagcggaagtgaggtttccgtggagacagccgagcctgcggaaggcggcggcggcggcacctgcgatcagcggctggggcaggttatggtagtgcggactgcggtgtgagcagagcggccacggggcccgccatgcgccggcggccctgacatgggcgccagcgggtccaaagctcggggcctgtggcccttcgcctcggcggccggaggcggcggctcagaggcagcaggagctgagcaagctttggtgcggcctcggggccgagctgtgccccccttcgtattcacgcgccgcgggcttctgctatttcagtctttgacactgggccagcagcatcttctggagtgagaccaacatgcccaggccaccaccctgcccactctagaagtcctgggtgaaggcaaagtcctgatattagaatggctgcccttgctgaacaaatcaaggatgagaactggccttggtggctgcctggatggtgtgctctgctctatgttctatgatgaggatggggatctggctcacgagttctatgaggagacaatcgtcaccaagaacgggcagaagcgggccaagctgaggcgagtgcataagaatctgattcctcagggcatcgtgaagctggatcacccccgcatccacgtggatttccctgtgatcctctatgaggtgtgaccctgggaggtggcagacagaagcaccccctgccccggcaagaaactcccaggctcaatcaaggtgtggcttccattgaggagcccaggctggggccacaaccctgaataaac

SEQ ID NO: 196573 - DNA, 3683 bp, Homo sapiens
  Payload ID: 18774
  Gene Name: tumor suppressor candidate 3
  Uniprot ID: Q13454
  ENST ID: ENST00000382020
  CDS Start-End: 209-1252
gcctttccaggtcttctcccggtgaaccggatgctctgtcagtctcctcctctgcgtcctcggccgcggcccgggtccctcgcaaagccgctgccatcccggagggcccagccagcgggctcccggaggctggccgggcaggcgtggtgcgcggtaggagctgggcgcgcacggctaccgcgcgtggaggagacactgccctgccgcgatgggggcccggggcgctccttcacgccgtaggcaagcggggcggcggctgcggtacctgcccaccgggagctttcccttccttctcctgctgctgctgctctgcatccagctcgggggaggacagaagaaaaaggagaatcttttagctgaaaaagtagagcagctgatggaatggagttccagacgctcaatcttccgaatgaatggtgataaattccgaaaatttataaaggcaccacctcgaaactattccatgattgttatgttcactgctcttcagcctcagcggcagtgttctgtgtgcaggcaagctaatgaagaatatcaaatactggcgaactcctggcgctattcatctgctttttgtaacaagctcttcttcagtatggtggactatgatgaggggacagacgtttttcagcagctcaacatgaactctgctcctacattcatgcattttcctccaaaaggcagacctaagagagctgatacttttgacctccaaagaattggatttgcagctgagcaactagcaaagtggattgctgacagaacggatgttcatattcgggttttcagaccacccaactactctggtaccattgctttggccctgttagtgtcgcttgttggaggtttgctttatttgagaaggaacaacttggagttcatctataacaagactggttgggccatggtgtctctgtgtatagtctttgctatgacttctggccagatgtggaaccatatccgtggacctccatatgctcataagaacccacacaatggacaagtgagctacattcatgggagcagccaggctcagtttgtggcagaatcacacattattctggtactgaatgccgctatcaccatggggatggttcttctaaatgaagcagcaacttcgaaaggcgatgttggaaaaagacggataatttgcctagtgggattgggcctggtggtcttcttcttcagttttctactttcaatatttcgttccaagtaccacggctatccttatagctttttaattaaatgaagccaagtgggatttgcataaagtgaatgtttaccatgaagataaactgttcctgactttatactattttgaattcattcatttcattgtgatcagctagcttattcttgtgtactttttttaaactgtgggttttcctagtaaatttaatttacagaaatcaatggtagcatttagtaatctacaaaggaaatatcaaagtgtttttcaagcctgttatattcagtgtgtgccacaggattgaaataaatgacaatgtaattatgaattcatgttttagagctgtttactcattagtaaaggaccgcaatgttagtaaagaaaacctatgaaatgtatgttaaagattcttagtattgtacagggataaagcaaatgcatgaaaatatgtcatgtactgaaaattaaacttacttcagtttcagttataaaggacgtgcactgttacgaatagtgttttgttattaattataactagataaaggtatataggacagggaactggatgaatggtacctacaatttggatgcctaaccaaggactagagctccttcttgagatctaaatctaaagtaaatgtgcattaaagcagtgtgcttcaaaggcatcagacgatgaaagcaacataccacaactaggagttatttctcaaacttaaatgtcctctgggaatccagacttaaaaataagagcaaacttaacacactatccattttcgagcaaacctaacccactatatccattttgctcatgtgttttatgcaaccagctttccatcaaatcctcaatctttgaatccaggtaaaaggttaattatcctaggattagtgaatgattcaatgaagctttcttgaaaacaaacataggagtgtaatgtactattatgtttgtatcctgttttagtttataaagcactttcacatacattatggtatttcttcctcacaataaccttgtaaattagtcaggaaatgtaaattttatctgactcatagaactaatggaagctgaaagccaaaaataaagtttataaccaggccttcaaactctcaaacatggatttttatattctgtggagttatccaaattaattagggtttaggaaagcagttcttcttgagtcagttcaataagtgtttgctttttgtttttaaggtttgttatctaattttcattaagatttgagtaacagaccatggagaattgttttcattgggagttccagctatatagcctcaaacaagaaacgggtgtacaaccattgagtttacttacttaaatctgtgaatttcaatgaagaatgggaatataaaggcctactggggcatgtttatcaagttatatcccagggcaatgtgtatgctagcaggatgaatgctatcttttcaaaacataatattcagtgaaaattacgtaataattgtaagtttataatcatactcccaaatctgttactaaaaataacataaattctcctagttcatgtacttagatgaataaatttagttttggaatgacgtttatggaaaagcaatagatgaacttaatcatttgatcactgcctatcactaggcagaacttgacctgtaattcttaatccattgtagattttttacattttactcaaaacttcatacatagagactctcaggtcaaattttacaagtattaaacatttgttaattataatcacttttgtttgtatccttaaatctcagaattatcttgcagttaatatgcagctgattaaatgatattacaaattatctctaatctcactgtaaatcttttaatcatatcaaagtcaggtcatcctcagacactataactaagatagataaggagtactttactataccatattagtaaaggttttctagctcttattttctaatttcctctgagcatttaaaattacatccagtgataaaaacaatatttttttttcagaatttcatgctttaaaaagctgtggcttctctatagacaactgttacattagggaagtgattctagagcaaaatatactgcctcaacataagtcgttactgactggaaaatgctataggcagaattgcaaagagtggctcaaacatatagtttgcttgcagaatgtaacgtgcaaaatcacatacatgcgatgtatttacctttgctagacaatgagaattgaataattgatttgtacctggtatgttatatcctccagtgtcactttttaaccagattcactgtgcgttccaaactgtcataaaaattgattatatgtttaacaattgtttttctactacagtggagagaaaaatcccaattataaaattccacctaaaggagtttcattttgtaataacatctgattaataacttgttgcattttgcttaacatactgttcctggcattagatattcacatgagtaagcccagtagca

SEQ ID NO: 196574 - DNA, 1627 bp, Homo sapiens
  Payload ID: 18774
  Gene Name: tumor suppressor candidate 3
  ENST ID: ENST00000515859
  CDS Start-End: 205-1035
ttccaggtcttctcccggtgaaccggatgctctgtcagtctcctcctctgcgtcctcggccgcggcccgggtccctcgcaaagccgctgccatcccggagggcccagccagcgggctcccggaggctggccgggcaggcgtggtgcgcggtaggagctgggcgcgcacggctaccgcgcgtggaggagacactgccctgccgcgatgggggcccggggcgctccttcacgccgtaggcaagcggggcggcggctgcggtacctgcccaccgggagctttcccttccttctcctgctgctgctgctctgcatccagctcgggggaggacagaagaaaaaggagaatcttttagctgaaaaagtagagcagctgatggaatggagttccagacgctcaatcttccgaatgaatggtgataaattccgaaaatttataaaggcaccacctcgaaactattccatgattgttatgttcactgctcttcagcctcagcggcagtgttctgtgtgcaggcaagctaatgaagaatatcaaatactggcgaactcctggcgctattcatctgctttttgtaacaagctcttcttcagtatggtggactatgatgaggggacagacgtttttcagcagctcaacatgaactctgctcctacattcatgcattttcctccaaaaggcagacctaagagagctgatacttttgacctccaaagaattggatttgcagctgagcaactagcaaagtggattgctgacagaacggatgttcatattcgggttttcagaccacccaactactctggtaccattgctttggccctgttagtgtcgcttgttggaggtttgctttatttgagaaggaacaacttggagttcatctataacaagactggttgggccatggtgtctctgtgtatagtctttgctatgacttctggccagatgtggaaccatatccgtggacctccatatgctcataagaacccacacaatggacaagtgatgccgctatcaccatggggatggttcttctaaatgaagcagcaacttcgaaaggcgatgttggaaaaagacggataatttgcctagtgggattgggcctggtggtcttcttcttcagttttctactttcaatatttcgttccaagtaccacggctatccttatagctttttaattaaatgaagccaagtgggatttgcataaagtgaatgtttaccatgaagataaactgttcctgactttatactattttgaattcattcatttcattgtgatcagctagcttattcttgtgtactttttttaaactgtgggttttcctagtaaatttaatttacagaaatcaatggtagcatttagtaatctacaaaggaaatatcaaagtgtttttcaagcctgttatattcagtgtgtgccacaggattgaaataaatgacaatgtaattatgaattcatgttttagagctgtttactcattagtaaaggaccgcaatgttagtaaagaaaacctatgaaatgtatgttaaagattcttagtattgtacagggataaagcaaatgcatgaaaatatgtcatgtactgaaaattaaacttacttcagtttcagttataaaggacgtgcact

SEQ ID NO: 196575 - DNA, 1266 bp, Homo sapiens
  Payload ID: 18774
  Gene Name: tumor suppressor candidate 3
  ENST ID: ENST00000509380
  CDS Start-End: 151-1020
ctcggccgcggcccgggtccctcgcaaagccgctgccatcccggagggcccagccagcgggctcccggaggctggccgggcaggcgtggtgcgcggtaggagctgggcgcgcacggctaccgcgcgtggaggagacactgccctgccgcgatgggggcccggggcgctccttcacgccgtaggcaagcggggcggcggctgcggtacctgcccaccgggagctttcccttccttctcctgctgctgctgctctgcatccagctcgggggaggacagaagaaaaaggagaatcttttagctgaaaaagtagagcagctgatggaatggagttccagacgctcaatcttccgaatgaatggtgataaattccgaaaatttataaaggcaccacctcgaaactattccatgattgttatgttcactgctcttcagcctcagcggcagtgttctgtgtgcaggcaagctaatgaagaatatcaaatactggcgaactcctggcgctattcatctgctttttgtaacaagctcttcttcagtatggtggactatgatgaggggacagacgtttttcagcagctcaacatgaactctgctcctacattcatgcattttcctccaaaaggcagacctaagagagctgatacttttgacctccaaagaattggatttgcagctgagcaactagcaaagtggattgctgacagaacggatgttcatattcgggttttcagaccacccaactactctggtaccattgctttggccctgttagtgtcgcttgttggaggtttgctttatttgagaaggaacaacttggagttcatctataacaagactggttgggccatggtgtctctgtgtatagtctttgctatgacttctggccagatgtggaaccatatccgtggacctccatatgctcataagaacccacacaatggacaagtgagctacattcatgggagcagccaggctcagtttgtggcagaatcacacattattctggtactgacatcttagcagtatactttatctggataaagtgatgactatcgaaacacatcaggaataccgagctgaaggatgaaaagctgtgttgagatcatccttttattgtatggcaggaattctccaaggtttaatttcatggatcattgacatcaagctgagatttaggattcaaataaatttcacaagcagtgtgaatgttttcatatagatcttagcagtgatacataaaagaattaaaagtctgtattctcttta

SEQ ID NO: 196576 - DNA, 1498 bp, Homo sapiens
  Payload ID: 18774
  Gene Name: tumor suppressor candidate 3
  Uniprot ID: Q13454
  ENST ID: ENST00000503731
  CDS Start-End: 149-1195
cggccgcggcccgggtccctcgcaaagccgctgccatcccggagggcccagccagcgggctcccggaggctggccgggcaggcgtggtgcgcggtaggagctgggcgcgcacggctaccgcgcgtggaggagacactgccctgccgcgatgggggcccggggcgctccttcacgccgtaggcaagcggggcggcggctgcggtacctgcccaccgggagctttcccttccttctcctgctgctgctgctctgcatccagctcgggggaggacagaagaaaaaggagaatcttttagctgaaaaagtagagcagctgatggaatggagttccagacgctcaatcttccgaatgaatggtgataaattccgaaaatttataaaggcaccacctcgaaactattccatgattgttatgttcactgctcttcagcctcagcggcagtgttctgtgtgcaggcaagctaatgaagaatatcaaatactggcgaactcctggcgctattcatctgctttttgtaacaagctcttcttcagtatggtggactatgatgaggggacagacgtttttcagcagctcaacatgaactctgctcctacattcatgcattttcctccaaaaggcagacctaagagagctgatacttttgacctccaaagaattggatttgcagctgagcaactagcaaagtggattgctgacagaacggatgttcatattcgggttttcagaccacccaactactctggtaccattgctttggccctgttagtgtcgcttgttggaggtttgctttatttgagaaggaacaacttggagttcatctataacaagactggttgggccatggtgtctctgtgtatagtctttgctatgacttctggccagatgtggaaccatatccgtggacctccatatgctcataagaacccacacaatggacaagtgagctacattcatgggagcagccaggctcagtttgtggcagaatcacacattattctggtactgaatgccgctatcaccatggggatggttcttctaaatgaagcagcaacttcgaaaggcgatgttggaaaaagacggataatttgcctagtgggattgggcctggtggtcttcttcttcagttttctactttcaatatttcgttccaagtaccacggctatccttatagtgatctggactttgagtgagaagatgtgatttggaccatggcacttaaaaactctataacctcagctttttaattaaatgaagccaagtgggatttgcataaagtgaatgtttaccatgaagataaactgttcctgactttatactattttgaattcattcatttcattgtgatcagctagcttattcttgtgtactttttttaaactgtgggttttcctagtaaatttaatttacagaaatcaatggtagcatttagtaatctacaaaggaaatatcaaagtgtttttcaagcctgttatattcagtgtgtgccacaggat

SEQ ID NO: 196577 - DNA, 1546 bp, Homo sapiens
  Payload ID: 18774
  Gene Name: tumor suppressor candidate 3
  ENST ID: ENST00000506802
  CDS Start-End: 199-1143
gtcttctcccggtgaaccggatgctctgtcagtctcctcctctgcgtcctcggccgcggcccgggtccctcgcaaagccgctgccatcccggagggcccagccagcgggctcccggaggctggccgggcaggcgtggtgcgcggtaggagctgggcgcgcacggctaccgcgcgtggaggagacactgccctgccgcgatgggggcccggggcgctccttcacgccgtaggcaagcggggcggcggctgcggtacctgcccaccgggagctttcccttccttctcctgctgctgctgctctgcatccagctcgggggaggacagaagaaaaaggagaatcttttagctgaaaaagtagagcagctgatggaatggagttccagacgctcaatcttccgaatgaatggtgataaattccgaaaatttataaaggcaccacctcgaaactattccatgattgttatgttcactgctcttcagcctcagcggcagtgttctgtgtgcaggcaagctaatgaagaatatcaaatactggcgaactcctggcgctattcatctgctttttgtaacaagctcttcttcagtatggtggactatgatgaggggacagacgtttttcagcagctcaacatgaactctgctcctacattcatgcattttcctccaaaaggcagacctaagagagctgatacttttgacctccaaagaattggatttgcagctgagcaactagcaaagtggattgctgacagaacggatgttcatattcgggttttcagaccacccaactactctggtaccattgctttggccctgttagtgtcgcttgttggaggtttgctttatttgagaaggaacaacttggagttcatctataacaagactggttgggccatggtgtctctgtgtatagtctttgctatgacttctggccagatgtggaaccatatccgtggacctccatatgctcataagaacccacacaatggacaagtgagctacattcatgggagcagccaggctcagtttgtggcagaatcacacattattctggtactgaatgccgctatcaccatggggatggttcttctaaatgaagcagcaacttcgaaaggcgatgttggaaaaagacggactttttaattaaatgaagccaagtgggatttgcataaagtgaatgtttaccatgaagataaactgttcctgactttatactattttgaattcattcatttcattgtgatcagctagcttattcttgtgtactttttttaaactgtgggttttcctagtaaatttaatttacagaaatcaatggtagcatttagtaatctacaaaggaaatatcaaagtgtttttcaagcctgttatattcagtgtgtgccacaggattgaaataaatgacaatgtaattatgaattcatgttttagagctgtttactcattagtaaaggaccgcaatgttagtaaagaaaacctatgaaatgtatgttaaagattcttagtattgtacagggataaagcaaatgcatgaaaatatgtcatg

SEQ ID NO: 196578 - DNA, 1203 bp, Homo sapiens
  Payload ID: 18774
  Gene Name: tumor suppressor candidate 3
  ENST ID: ENST00000511783
  CDS Start-End: 1-909
aatcttttagctgaaaaagtagagcagctgatggaatggagttccagacgctcaatcttccgaatgaatggtgataaattccgaaaatttataaaggcaccacctcgaaactattccatgattgttatgttcactgctcttcagcctcagcggcagtgttctgtgtgcaggcaagctaatgaagaatatcaaatactggcgaactcctggcgctattcatctgctttttgtaacaagctcttcttcagtatggtggactatgatgaggggacagacgtttttcagcagctcaacatgaactctgctcctacattcatgcattttcctccaaaaggcagacctaagagagctgatacttttgacctccaaagaattggatttgcagctgagcaactagcaaagtggattgctgacagaacggatgttcatattcgggttttcagaccacccaactactctggtaccattgctttggccctgttagtgtcgcttgttggaggtttgctttatttgagaaggaacaacttggagttcatctataacaagactggttgggccatggtgtctctgtgtatagtctttgctatgacttctggccagatgtggaaccatatccgtggacctccatatgctcataagaacccacacaatggacaagtgagctacattcatgggagcagccaggctcagtttgtggcagaatcacacattattctggtactgaatgccgctatcaccatggggatggttcttctaaatgaagcagcaacttcgaaaggcgatgttggaaaaagacggataatttgcctagtgggattgggcctggtggtcttcttcttcagttttctactttcaatatttcgttccaagtaccacggctatccttatagtgatctggactttgagtgagaagatgtgatttggaccatggcacttaaaaactctataacctcaggcaaaagtcctcagataaaaatgtctaccaaaagactgacacgtggagttaatcatttgacagatgcaatgcttccacccccaacaaatatactttcttaacttctgtttgttatcacttagggaaaaaaggcagtcaacaaatatatttcattctatctaggaaaaatgtagccaaatcttttttcccattaacaaataatgtaagccttaatattcaagggtaataaaaaatacaagtcttccaaa

SEQ ID NO: 196579 - DNA, 1452 bp, Homo sapiens
  Payload ID: 18774
  Gene Name: tumor suppressor candidate 3
  ENST ID: ENST00000510836
  CDS Start-End: 153-983
tcctcggccgcggcccgggtccctcgcaaagccgctgccatcccggagggcccagccagcgggctcccggaggctggccgggcaggcgtggtgcgcggtaggagctgggcgcgcacggctaccgcgcgtggaggagacactgccctgccgcgatgggggcccggggcgctccttcacgccgtaggcaagcggggcggcggctgcggtacctgcccaccgggagctttcccttccttctcctgctgctgctgctctgcatccagctcgggggaggacagaagaaaaaggagaatcttttagctgaaaaagtagagcagctgatggaatggagttccagacgctcaatcttccgaatgaatggtgataaattccgaaaatttataaaggcaccacctcgaaactattccatgattgttatgttcactgctcttcagcctcagcggcagtgttctgtgtgcaggcaagctaatgaagaatatcaaatactggcgaactcctggcgctattcatctgctttttgtaacaagctcttcttcagtatggtggactatgatgaggggacagacgtttttcagcagctcaacatgaactctgctcctacattcatgcattttcctccaaaaggcagacctaagagagctgatacttttgacctccaaagaattggatttgcagctgagcaactagcaaagtggattgctgacagaacggatgttcatattcgggttttcagaccacccaactactctggtaccattgctttggccctgttagtgtcgcttgttggaggtttgctttatttgagaaggaacaacttggagttcatctataacaagactggttgggccatggtgtctctgtgtatagtctttgctatgacttctggccagatgtggaaccatatccgtggacctccatatgctcataagaacccacacaatggacaagtgatgccgctatcaccatggggatggttcttctaaatgaagcagcaacttcgaaaggcgatgttggaaaaagacggactttttaattaaatgaagccaagtgggatttgcataaagtgaatgtttaccatgaagataaactgttcctgactttatactattttgaattcattcatttcattgtgatcagctagcttattcttgtgtactttttttaaactgtgggttttcctagtaaatttaatttacagaaatcaatggtagcatttagtaatctacaaaggaaatatcaaagtgtttttcaagcctgttatattcagtgtgtgccacaggattgaaataaatgacaatgtaattatgaattcatgttttagagctgtttactcattagtaaaggaccgcaatgttagtaaagaaaacctatgaaatgtatgttaaagattcttagtattgtacagggataaagcaaatgcatgaaaatatgtcatgtactgaaaattaaact

SEQ ID NO: 196580 - DNA, 3596 bp, Homo sapiens
  Payload ID: 18775
  Gene Name: tumor suppressor candidate 5
  Uniprot ID: Q8IXB3
  ENST ID: ENST00000333813
  CDS Start-End: 340-873
cattcttctctctgctctctgagctttccgttgcttccctgcccatctgtgctctcagcagcaccagcaaagttggcctcaaacttgaacaaagctgcaggctccagcgtctttctgggagctccgcgggggcagcaggcaggccccagcctctgaactcagctggcttgagaagctcagcccaacccttccagcacccagccggccctccgtctcctgagggacgcccctgcccccgacctggaggccctcagtctgggctggggaatggcgcgctgaggtccctccagagccccttgtcccagcctggagctgcagccgcgcaaggcccaggcccccatggcccacccggtgcagtccgagtttccttcagcacaggagccaggctccgccgcattcctggacctgccggagatggagatactcctcaccaaggcagagaacaaggatgacaagaccctgaatctgtccaagaccctctcggggcctctggatctggagcagaacagccagggcctacccttcaaggccatctccgaggggcacctggaggccccactgcctcggtccccctcccgggccagctcaaggagggcgtcctccatcgccaccacctcctatgcccaagaccaagaagcccccagagattacctcatcctggccgtcgtcgcctgcttctgccccgtctggcccctcaacctcatccccctcatcatttccatcatgtctcgaagcagcatgcaacagggcaacgtggacggcgcccggaggctgggccgcctggctcggctgctcagcattaccctcatcatcatgggcatcgtcattatcatggtggccgtgaccgtcaacttcacagttcagaagaaataaacttaagcagggagctgggctagcagaggccggccctggccatcgggagagctctgacctgcacaccgcgggaggccagggtgctgactgtcaagcatcccctgtccccaagttccaaaagcacagactcaaagggaaaccccccagtcacccactgtcagcccccatctgacaagaaagcctggagcgaggaaggaaagcacagcgaacccaatgggtaacgtggtttactctcccggacgcgtcctgggatctcaaccccagcagtctggcttgtttctcattcccacaatttcctgggttccaccaagcagcgaaaactgccaggatgaatgaggaaaaaacccagccccacaaacgagacacacgctggcggggagagacgcagcagagctccttcctgtctgtggactcggagcaaagacgtggggccccatcttttgtgttttcctcaagcggggaaagaatggactgtttgcatgcttcgtgccacacgcccgcggtgatcccagccagggccccgagcgcagaggcggagctgtgctcagcacaggcctgggacctcccccggcaggcacctgtggggggtgcagctcccgggaaggaggcaactgcctcacttaacatcctccgctgcaaggtggtggcgccgagaggcgtgtctgtgaagacaggtaccaggatggcaggacccgcacgcctcttcccacacctgtcagcttcggaagcatctctcgaggactctggtcccaggatgtctcccaggacaagccagtctgcctcttcctcctacttctgctgtagcctgggaccagacctggccaaggtcagccagcggggagggccgaggtctgagctctcgtcctgccgtggcccccgcgatggcctggggtgcaagcttggggctccgtctggtgctgcttaggtagtttcaggcttccagcccagccctatgctctgtgcttggccctgggcccctggccatccacaaacagcagaggccttccctggaggaggctttgggaccacccctggggggacttcccaaagggtcccaggctgtcaggggcgtttgcgccacctgcaagggcgtgggtcagagagtttttatgggggtctgttgtttgaccgtcctgagaccgagggaagggctcagctgaaggaccccgtctgcaggagagtcgggggaccaggtttgggaatacacttgcatgtacagagcctggggcctggacgccacggcctctcatcttaggacctaatgggacccccgaaaggagccaagtggggccctcggcctcttccttcgttccaggcccatgattttccctacacttctccctggcccaggctccagccacaggcacctctcctgcccccgcccaccctcctgaccgcagctcccaggccctggagacctccaggctttcctgccctgggcagccccacctcacagccagagtcaatgccttcatgggaagggctcccagccacacccagagtggcccaaagctgttgaagtcagcatcctttgtcccatcaggaccctcctgcctcctctccaggcccttgttcgcctccccaccctcctcagaggcccggggaagggaagagcaggtcagtacagaggttctgtctacagggaggggccctgggtctatgcacagctggagctctgagccttccacagcccgtgtgactgctagagggcaggggtgcagggctcagggggcccgggctggtcctttggggctggtgttcctacgtcagtccccacctggggaataaactccagcctctcctgctcatacagaagggactggttgggtttgctttatgggatctttgagaccaaaacagatgctcctgtttgctgggggagggtgtgagcacggagtatttctgtccctcgtgaagtcacgtcacacaggggagaggcgaggtcgatggaactggccacgcacaggctctggctctggaaggagggatgatgagtgggcgttttcccggcaggcccccggggtcctcagcctcagcaacccagggagaggacagaaacgaaccgatggttgagggattgtcacgggaggaacatgacacccgaagggactctaggtgccctcggagtgccacacatgcccagaccttctcacacccacacaaataggctctgccgtgcactcctacacacacacacacacacacacacgcttgttcacactcagaacccaggacagccacagccaccgcttaggggaagccactgcagatgcccctggaatgggcacagcacagccagggcgctcttccaggcaggcgaggataacttgagagtttcctagggcaccagggacagagctcagaggcccccgaggtgtgtgtaggaggcggaggcccgcagagcacagagcaggagaagggcttgggccctggaggagaaagccattctggacaccaggggacctggacggagggtccccacagcccgtgccccacgccgcctggaggccagaggggtcagtggccctgctgtcccggctccatcttggttctagccgccacctgcatgaacacagtggcccggcttaacgcactaacccagcctctccctgtgtcccacagggagtagcaagacccaccccacactgccttcaccatctacaccagtgacgccgctgtgtgtcttagcatggaaataaataaacctgaatgtacgtgctcgc

SEQ ID NO: 196581 - DNA, 2737 bp, Homo sapiens
  Payload ID: 18775
  Gene Name: tumor suppressor candidate 5
  ENST ID: ENST00000626647
  CDS Start-End: 1-14
ttcagaagaaataaacttaagcagggagctgggctagcagaggccggccctggccatcgggagagctctgacctgcacaccgcgggaggccagggtgctgactgtcaagcatcccctgtccccaagttccaaaagcacagactcaaagggaaaccccccagtcacccactgtcagctcccatctgacaagaaagcctggagcgaggaaggaaagcacagcgaacccaatgggtaacgtggtttactctcccggacgcgtcctgggatctcaaccccagcagtctggcttgtttctcattcccacaatttcctgggttccaccaagcagcgaaaactgccaggatgaatgaggaaaaaacccagccccacaaacgagacacacgctggcggggagagacgcagcagagctccttcctgtctgtggactcggagcaaagacgtggggccccatcttttgtgttttcctcaagcggggaaagaatggactgtttgcatgcttcgtgccacacgcccgcggtgatcccagccagggccccgagcgcagaggcggagctgtgctcagcacaggcctgggacctcccccggcaggcacctgtggggggtgcagctcccgggaaggaggcaactgcctcacttaacatcctccgctgcaaggtggtggcgccgagaggcgtgtctgtgaagacaggtaccaggatggcaggacccgcacgcctcttcccacacctgtcagcttcggaagcatctctcgaggactctggtcccaggatgtctcccaggacaagccagtctgcctcttcctcctacttctgctgtagcctgggaccagacctggccaaggtcagccagcggggagggccgaggtctgagctctcgtcctgccgtggcccccgcgatggcctggggtgcaagcttggggctccgtctggtgctgcttaggtagtttcaggcttccagcccagccctatgctctgtgcttggccctgggcccctggccatccacaaacagcagaggccttccctggaggaggctttgggaccacccctggggggacttcccaaagggtcccaggctgtcaggggcgtttgcgccacctgcaagggcgtgggtcagagagtttttatgggggtctgttgtttgaccgtcctgagaccgagggaagggctcagctgaaggaccccgtctgcaggagagtcgggggaccaggtttgggaatacacttgcatgtacagagcctggggcctggacgccacggcctctcatcttaggacctaatgggacccccgaaaggagccaagtggggccctcggcctcttccttcgttccaggcccatgattttccctacacttctccctggcccaggctccagccacaggcacctctcctgcccccgcccaccctcctgaccgcagctcccaggccctggagacctccaggctttcctgccctgggcagccccacctcacagccagagtcaatgccttcatgggaagggctcccagccacacccagagtggcccaaagctgttgaagtcagcatcctttgtcccatcaggaccctcctgcctcctctccaggcccttgttcgcctccccaccctcctcagaggcccggggaagggaagagcaggtcagtacagaggttctgtctacagggaggggccctgggtctatgcacagctggagctctgagccttccacagcccgtgtgactgctagagggcaggggtgcagggctcagggggcccgggctggtcctttggggctggtgttcctacgtcagtccccacctggggaataaactccagcctctcctgctcatacagaagggactggttgggtttgctttatgggatctttgagaccaaaacagatgctcctgtttgctgggggagggtgtgagcacggagtatttctgtccctcgtgaagtcacgtcacacaggggagaggcgaggtcgatggaactggccacgcacaggctctggctctggaaggagggatgatgagtgggcgttttcccggcaggcccccggggtcctcagcctcagcaacccagggagaggacagaaacgaaccgatggttgagggattgtcacgggaggaacatgacacccgaagggactctaggtgccctcggagtgccacacatgcccagaccttctcacacccacacaaataggctctgccgtgcactcctacacacacacacacacacacacacgcttgttcacactcagaacccaggacagccacagccaccgcttaggggaagccactgcagatgcccctggaatgggcacagcacagccagggcgctcttccaggcaggcgaggataacttgagagtttcctagggcaccagggacagagctcagaggcccccgaggtgtgtgtaggaggcggaggcccgcagagcacagagcaggagaagggcttgggccctggaggagaaagccattctggacaccaggggacctggacggagggtccccacagcccgtgccccacgccgcctggaggccagaggggtcagtggccctgctgtcccggctccatcttggttctagccgccacctgcatgaacacagtggcccggcttaacgcactaacccagcctctccctgtgtcccacagggagtagcaagacccaccccacactgccttcaccatctacaccagtgacgccgctgtgtgtcttagcatggaaataaataaacctgaatgtacgtgctcgc

SEQ ID NO: 196582 - DNA, 1824 bp, Homo sapiens
  Payload ID: 18776
  Gene Name: tumor susceptibility 101
  Uniprot ID: Q99816
  ENST ID: ENST00000251968
  CDS Start-End: 417-1589
aatcagtcattaaggctcactggcaagcccttcgtacttcttccctctccggcactagcttccttaagtcgactctgtgaaatacctgctaatcttatcctgaaccagagtttcgaccctcggaacagtcttgcccacatctttgggacccgattcgtcctgctgattccggcactcgaggggcgggttggttggaacccaccccaccaggcccctctcaatcccacacggtgtccacccttgcccgcaggacggcggcccggaagtgacgtagtggaagcggaagtggtgtagtggtgccgacttcctgttgtttgaggccgggttgggggtgtgcgattgtgtgggacggtctggggcagcccagcagcggctgaccctctgcctgcggggaagggagtcgccaggcggccgtcatggcggtgtcggagagccagctcaagaaaatggtgtccaagtacaaatacagagacctaactgtacgtgaaactgtcaatgttattactctatacaaagatctcaaacctgttttggattcatatgtttttaacgatggcagttccagggaactaatgaacctcactggaacaatccctgtgccttatagaggtaatacatacaatattccaatatgcctatggctactggacacatacccatataatccccctatctgttttgttaagcctactagttcaatgactattaaaacaggaaagcatgttgatgcaaatgggaagatatatcttccttatctacatgaatggaaacacccacagtcagacttgttggggcttattcaggtcatgattgtggtatttggagatgaacctccagtcttctctcgtcctatttcggcatcctatccgccataccaggcaacggggccaccaaatacttcctacatgccaggcatgccaggtggaatctctccatacccatccggataccctcccaatcccagtggttacccaggctgtccttacccacctggtggtccatatcctgccacaacaagttctcagtacccttctcagcctcctgtgaccactgttggtcccagtagggatggcacaatcagcgaggacaccatccgagcctctctcatctctgcggtcagtgacaaactgagatggcggatgaaggaggaaatggatcgtgcccaggcagagctcaatgccttgaaacgaacagaagaagacctgaaaaagggtcaccagaaactggaagagatggttacccgtttagatcaagaagtagccgaggttgataaaaacatagaacttttgaaaaagaaggatgaagaactcagttctgctctggaaaaaatggaaaatcagtctgaaaacaatgatatcgatgaagttatcattcccacagctcccttatacaaacagatcctgaatctgtatgcagaagaaaacgctattgaagacactatcttttacttgggagaagccttgagaaggggcgtgatagacctggatgtcttcctgaagcatgtacgtcttctgtcccgtaaacagttccagctgagggcactaatgcaaaaagcaagaaagactgccggtctcagtgacctctactgacttctctgataccagctggaggttgagctcttcttaaagtattcttctcttccttttatcagtaggtgcccagaataagttattgcagtttatcattcaagtgtaaaatattttgaatcaataatatattttctgttttcttttggtaaagactggcttttattaatgcactttctatcctctgtaaactttttgtgctgaatgttgggactgctaaataaaatttgttgcataa

SEQ ID NO: 196583 - DNA, 2101 bp, Homo sapiens
  Payload ID: 18776
  Gene Name: tumor susceptibility 101
  ENST ID: ENST00000536719
  CDS Start-End: 136-1233
ggaagtggtgtagtggtgccgacttcctgttgtttgaggccgggttgggggtgtgcgattgtgtgggacggtctggggcagcccagcagcggctgaccctctgcctgcggggaagggagtcgccaggcggccgtcatggcggtgtcggagagccagctcaagaaaatggtgtccaagtacaaatacagagacctaactgtacgtgaaactgtcaatgttattactctatacaaagatctcaaacctgttttggattcatatgtttttaacgatggcagttccagggaactaatgaacctcactggaacaatccctgtgccttatagaggtaatacatacaatattccaatatgcctatggctactggacacatacccatataatccccctatctgttttgttaagcctactagttcaatgactattaaaacaggaaagcatgttgatgcaaatgggaagatatatcttccttatctacatgaatggaaacacccacagtcagacttgttggggcttattcaggtcatgattgtggtatttggagatgaacctccagtcttctctcgtcctatttcggcatcctatccgccataccaggcaacggggccaccaaatacttcctacatgccaggcatgccaggtggaatctctccatacccatccggataccctcccaatcccagtggttacccaggctgtccttacccacctggtggtccatatcctgccacaacaagttctcagtacccttctcagcctcctgtgaccactgttggtcccagtagggatggcacaatcagcgaggacaccatccgagcctctctcatctctgcggtcagtgacaaactgagatggcggatgaaggaggaaatggatcgtgcccaggcagagctcaatgccttgaaacgaacagaagaagacctgaaaaagggtcaccagaaactggaagagatggttacccgtttagatcaagaagtagccgaggttgataaaaacatagaacttttgaaaaagaaggatgaagaactcagttctgctctggaaaaaatggaaaatcagtctgaaaacaatgatatcgatgaagttatcattcccacagctcccttatacaaacagatcctgaatctgtatgcagaagaaaacgctattgaagacactatcttttacttgggagaagccttgagaaggggcgtgatagacctggatgtcttcctgaagacttcagtgccctgaacggttagagaaattaatgaaggagctccaccaggtgccttcacaactctgagtcatatcagaatctctccacagctctcctttcaaaaatgacaccgtgacatttcaggatgtgaaaaaacttactggaaagtgtgtaagaaaatataaaatactattgtacaatgtgataatgtatcatcagcttgttattttcagtgtgcttccttgtagcgccggactaccatttctgaattttggatttggtattttttttaaagaatcaaactcttaaaagaggaaatgcttataccaatagcctgtatgaagcaaaatttatgtgaaagctaaagatatgcatgcagttaaatatataaataaatctcaatgccatacaaaaagaacttttgataatctatgaactattttaaaaaagaaaaaacagcctcaaacttatgggataccgttaaacacaccaacatatatatgcatgtatggtaggaccagaaggaagggagaggagcagaaaattattcaaagaagtaacagctgaaacttcccaaatagaaaaacattatacatccaagccgggtgcagtggctcatgcctgtagtcccagcactttgggaggctgaggtgggcagatcagttcgggtcaggagttcaagaccagcctggccaacatggagaaaccccgtctctactaaaaatacaaaaagttagccaggagtggtggtgggtgcccataatcccagctactcaggaggctgaggcacaagaatcacttgaatccaggaggcggaggttgcaatgagccgagatcatgccactgcactccagtctgggccacagggcaagactccatctcaaaaaaagaaaaaaaaaaaaa

SEQ ID NO: 196584 - DNA, 912 bp, Homo sapiens
  Payload ID: 18776
  Gene Name: tumor susceptibility 101
  ENST ID: ENST00000584526
  CDS Start-End: 1-232
cgatgaagttatcattcccacagctcccttatacaaacagatcctgaatctgtatgcagaagaaaacgctattgaagacactatcttttacttgggagaagccttgagaaggggcgtgatagacctggatgtcttcctgaagcatgtacgtcttctgtcccgtaaacagttccagctgagggcactaatgcaaaaagcaagaaagactgccggtctcagtgacctctactgacttctctgataccagctggaggttgagctcttcttaaagcctcactgaaccataagtgttttcatcaaaaaggagcagagtggcaggtccaaactatatacctgataactttaggattaaagggaaagatagtgtaccattgcctccctgcttttattgtcatttaaagtttcgtcttcatggagctactttacattaaatgtctgtatgattgataggaaatagatatttcagaggctcaatcgtgcctcaggcttaccacttgagtcgccatgctctccaaggatcagcccatgacagctttcagagtggatgccaagcctttgcccaataaagtaacgaaaacgagcagagtccagattacaaccacttccaataacacggtttttgggaaatccactcaacttccaggctacataagttaagatatccactaagaagaaaaagttcatatcaagaaatgtcctcatctacaaggatatgttttttagatttacctaacttaaaactagtaaatctgatgttttgtggaggaggcaagaaacatggttctctatccaaccccagctatacgccaactcttaagaatatctaccaaatagaagtaatgaaaaaccttttcgttgatactttgcacagcttggtatgcagaaacacagaatgttcactccacagaaaat

SEQ ID NO: 196585 - DNA, 441 bp, Homo sapiens
  Payload ID: 18776
  Gene Name: tumor susceptibility 101
  ENST ID: ENST00000580814
  CDS Start-End: 1-192
atcctgaatctgtatgcagaagaaaacgctattgaagacactatcttttacttgggagaagccttgagaaggggcgtgatagacctggatgtcttcctgaagcatgtacgtcttctgtcccgtaaacagttccagctgagggcactaatgcaaaaagcaagaaagactgccggtctcagtgacctctactgacttctctgataccagctggaggttgagctcttcttaaagtattcttctcttccttttatcaacttcagtgccctgaacggttagagaaattaatgaaggagctccaccaggtgccttcacaactctgagtcatatcagaatctctccacagctctcctttcaaaaatgacaccgtgacatttcaggatgtgaaaaaacttactggaaagtgtgtaagaaaatataaaatactattgtacaatgtgataa

SEQ ID NO: 196586 - DNA, 2351 bp, Homo sapiens
  Payload ID: 18777
  Gene Name: tumor-associated calcium signal transducer 2
  Uniprot ID: P09758
  ENST ID: ENST00000371225
  CDS Start-End: 618-1589
cgggtctgatagtccctacctgtcaggactggtgttaggatgagataatgtttgtgaactgtaaactatataaacgtgtgctactgtgagaactggacaaagaagagagggagtgagagaaattaagggagggctggggctgggaaagaacgaaaagggagtcgcgtatagaggagagcgcgacagtcgcgagccacactttgcaatgaaactctttagactttctgccgggagagcggcccagacgcgccaggtctgtagcaggaggccgcgccgagggcgggtccccagaagcctacaggtgagtatcggttctccccttcccggctttcggtccggaggaggcgggagcagcttccctgttctgatcctatcgcgggcggcgcagggccggcttggccttccgtgggacggggaggggggcgggatgtgtcacccaaataccagtggggacggtcggtggtggaaccagccgggcaggtcgggtagagtataagagccggagggagcggccgggcggcagacgcctgcagaccatcccagacgccggagcccgagccccgacgagtccccgcgcctcatccgcccgcgtccggtccgcgttcctccgccccaccatggctcggggccccggcctcgcgccgccaccgctgcggctgccgctgctgctgctggtgctggcggcggtgaccggccacacggccgcgcaggacaactgcacgtgtcccaccaacaagatgaccgtgtgcagccccgacggccccggcggccgctgccagtgccgcgcgctgggctcgggcatggcggtcgactgctccacgctgacctccaagtgtctgctgctcaaggcgcgcatgagcgcccccaagaacgcccgcacgctggtgcggccgagtgagcacgcgctcgtggacaacgatggcctctacgaccccgactgcgaccccgagggccgcttcaaggcgcgccagtgcaaccagacgtcggtgtgctggtgcgtgaactcggtgggcgtgcgccgcacggacaagggcgacctgagcctacgctgcgatgagctggtgcgcacccaccacatcctcattgacctgcgccaccgccccaccgccggcgccttcaaccactcagacctggacgccgagctgaggcggctcttccgcgagcgctatcggctgcaccccaagttcgtggcggccgtgcactacgagcagcccaccatccagatcgagctgcggcagaacacgtctcagaaggccgccggtgacgtggatatcggcgatgccgcctactacttcgagagggacatcaagggcgagtctctattccagggccgcggcggcctggacttgcgcgtgcgcggagaacccctgcaggtggagcgcacgctcatctattacctggacgagattcccccgaagttctccatgaagcgcctcaccgccggcctcatcgccgtcatcgtggtggtcgtggtggccctcgtcgccggcatggccgtcctggtgatcaccaaccggagaaagtcggggaagtacaagaaggtggagatcaaggaactgggggagttgagaaaggaaccgagcttgtaggtacccggcggggcaggggatggggtggggtaccggatttcggtatcgtcccagacccaagtgagtcacgcttcctgattcctcggcgcaaaggagacgtttatcctttcaaattcctgccttccccctcccttttgcgcacacaccaggtttaatagatcctggcctcagggtctcctttctttctcacttctgtcttgaaggaagcatttctaaaatgtatcccctttcggtccaacaacaggaaacctgactggggcagtgaaggaagggatggcatagcgttatgtgtaaaaaacaagtatctgtatgacaacccgggatcgtttgcaagtaactgaatccattgcgacattgtgaaggcttaaatgagtttagatgggaaatagcgttgttatcgccttgggtttaaattatttgatgagttccacttgtatcatggcctacccgaggagaagaggagtttgttaactgggcctatgtagtagcctcatttaccatcgtttgtattactgaccacatatgcttgtcactgggaaagaagcctgtttcagctgcctgaacgcagtttggatgtctttgaggacagacattgcccggaaactcagtctatttattcttcagcttgcccttactgccactgatattggtaatgttcttttttgtaaaatgtttgtacatatgttgtctttgataatgttgctgtaattttttaaaataaaacacgaatttaataaaatatgggaaaggcacaaaccagaa

SEQ ID NO: 196587 - DNA, 556 bp, Homo sapiens
  Payload ID: 18778
  Gene Name: TVP23C-CDRT4 readthrough
  ENST ID: ENST00000481756
  CDS Start-End: 25-138
aagcagggctggcgtagggccgccatgttgcagcaggatagtaatgatgacactgaagatgtttcactgtttgatgcggaagaggagacgactaatagaccaagaaaagccaaaatcagaatgtcacaggtagactaatggttggcctacgttggtggaatcacattgatgaagatggaaagagccattgggtgtttgaatctagaaaggagtcctctcaagagaataaaactgtgtcagaggctgaatcaagaatcttttggttgggacttattgcctgttcagtactgtgggtgatatttgcctttagtgcactcttctccttcacagtaaagtggctggaatctgaacctgtgatgttaagaaatcagtaaatattaaaaagaagatggatgcaagaaggatgaagaaagaagaaggactcacagaaaacactggacttccccggaagctacttgaaaaacatgacccctggccggcctatgtcacctatacctctcagacagtgaaaagactcattgagaaaagcaaaactagagaactggaatgcatgcgt

SEQ ID NO: 196588 - DNA, 2833 bp, Homo sapiens
  Payload ID: 18778
  Gene Name: TVP23C-CDRT4 readthrough
  ENST ID: ENST00000522212
  CDS Start-End: 114-608
ctcttacagtggtccctgctggcccttggtgacgggtcgcgtcagttccgacccggacccgtacgctgctgcgctgacgtggctcctggaagcagggctggcgtagggccgccatgttgcagcaggatagtaatgatgacactgaagatgtttcactgtttgatgcggaagaggagacgactaatagaccaagaaaagccaaaatcagacatccagtagcatcgtttttccacttattctttcgagtcagtgcaatcatcgtctgtcttctctgtgagttgctcagcagcagctttattacctgtatggttacaattatcttgttgttgtcgtgtgacttttgggcagtgaagaatgtcacaggtagactaatggttggcctacgttggtggaatcacattgatgaagatggaaagagccattgggtgtttgaatctagaaaggagtcctctcaagagaataaaactgtgtcagaggctgaatcaagaatcttttggttgggacttattgcctgttcagtactgtgggtgatatttgcctttagtgcactcttctccttcacagtaaagtggctggaatctgaacctgtgatgttaagaaatcagtaaatattaaaaagaagatggatgcaagaaggatgaagaaagaagaaggactcacagaaaacactggacttccccggaagctacttgaaaaacatgacccctggccggcctatgtcacctatacctctcagacagtgaaaagactcattgagaaaagcaaaactagagaactggaatgcatgcgtgccctcgaggaaagaccctgggcatcaaggcagaataaaccttccagcgtcattcagccgaaaaggaggaagtcttccaagtcttctggcaaagctgtgttcagggacacgctgtcagaatccacgttatcaatgtggggcgcttattcggtattggccatggctcctaccatgatcccagaacccacacacttacatgcggattccagagactgtccaactgaaaactataacaagatcatctttgcccgcaagcctatgatgaggatgctccctacagttcgctactgaccaacaaggagaaacatgcaaatgttttagccaggggtccctgcagccattccccaagaacgtacaaaagttaagctccatttaccactcacttgacagtgtcctttaaatctgaacttgctcttgctcatgcggagcttggctaagagaaaccagatcagaatgcaagctgtaggtgggtgggtgagtgtgtcccctcccacactgctctctggtgggtttgggcagtccctggctctagtctctgctgcagattctcaggaccaaaatgtgggtgatttgtctgggtccaggcaggagacagaaatcacacaagctcttttattagagataatataaagaatgattaaccaggtgacagtaaagggcaggaagggaatacaaaggtatccatggaggtagcaccacaggaagcaggcatcacacttgaggcttgggaacaaggggaagatgctggactcattgaaaggtggttgcttggagaagggacatggggctgaatctcagacttctgaggtgggggagtggggatgccactcaatgcagctggtatctctgagctctgaggagagtcctgtggggatggtgccccctcctctgaataggggagatgttttgttggtgtctctgaggggacccccatgaggctgcttttgtgagtgttggaaaaaccaaaaactgcattgaaatgtttctgggaggagttgccactgcctgggtgaagaaaaagcactgctagggttagcaacctgtctggcaagggacaggaagctgatagaaagtgaacaggaagcaaacaggaagtgagcaaggggccacttcctacttcctcctttagcctagcagattccttctagctccccctgggggctgagcctatcagggcacaaagccagaatgtggtttgtagaatcccagccccagcatctccaagcataggatggattttgaagccaagagggaattagctctcggccgggttctgagtgatcccatccagctgctcctggacctggtattgagaggtttttcccttggagggcaaacaaagtggcagtggggaccagggtgtcccctgctgagaaatggagagctcttttcccctgtacttctctggggtttgccttgtggaaccaagtgcttgggggaggagctcctggcaggactccagctgttatttgtcagaggacagctaggattggttcacccttgctctgagttggccccaaagcgagctatgctgaactcttctccatctccaagcagacaacctttgtctttacatgcaagagggatccaattatgacaggctgacccagctggtttcatgtttggggtttatctactgagtaaggctgaccttacctgagtttctgtatgtgtatttgcaagacagttaatactaatccatcatccctcacagagatgtagaggatgagatgtagtaacttatagcagtgtcatttggaaaagttgaatttgccctacaaggcatgttctccattcaagggtcttgtgtaaacgtttgcagacacaggtgcagctttggagaactcacctctggctcttgtgcttttatgttgggacagctgcctaaattaggagctctagacctgttattggttcccaactgttggccagaatgaattcttcgaaaaatataggtggtttccagggaatttgaatgattgtattttgtgtccatggaacgtttatagacatggaggcaggcaataaattcctccaataatt

SEQ ID NO: 196589 - DNA, 520 bp, Homo sapiens
  Payload ID: 18778
  Gene Name: TVP23C-CDRT4 readthrough
  ENST ID: ENST00000518506
  CDS Start-End: 1-162
atgttgcagcaggatagtaatgatgacactgaagatgtttcactgtttgatgcggaagaggagacgactaatagaccaagaaaagccaaaatcagacatccagtagcatcgtttttccacttattctttcgagtcagtgcaatcatcgtctgtcttctctaatgtcacaggtagactaatggttggcctacgttggtggaatcacattgatgaagatggaaagagccattgggtgtttgaatctagaaaggagtcctctcaagagaataaaactgtgtcagaggctgaatcaagaatcttttggttgggacttattgcctgttcagtactgtgggtgatatttgcctttagtgcactcttctccttcacagtaaagtggctggaatctgaacctgtgatgttaagaaatcagtaaatattaaaaagaagatggatgcaagaaggatgaagaaagaagaaggactcacagaaaacactggacttccccggaagctacttgaaaaacatgacccctggccgg

SEQ ID NO: 196590 - DNA, 1005 bp, Homo sapiens
  Payload ID: 18778
  Gene Name: TVP23C-CDRT4 readthrough
  ENST ID: ENST00000557349
  CDS Start-End: 112-225
cttacagtggtccctgctggcccttggtgacgggtcgcgtcagttccgacccggacccgtacgctgctgcgctgacgtggctcctggaagcagggctggcgtagggccgccatgttgcagcaggatagtaatgatgacactgaagatgtttcactgtttgatgcggaagaggagacgactaatagaccaagaaaagccaaaatcagaatgtcacaggtagactaatggttggcctacgttggtggaatcacattgatgaagatggaaagagccattgggtgtttgaatctagaaaggagtcctctcaagagaataaaactgtgtcagaggctgaatcaagaatcttttggttgggacttattgcctgttcagtactgtgggtgatatttgcctttagtgcactcttctccttcacagtaaagtggctggcggtggttattatgggtgtggtgctacaaggtgccaacctgtatggttacatcaggtgtaaggtgcgcagcagaaagcatttaaccagcatggctacttcatattttggaaagcagtttttaagacaaagacggtctcgccacattgcccagactggtctgaaagtcttgggctcaagagatcctcccgcttccgccttccaaagcgctgggataacaggcgtgagccgctgcccgggccatccctcgaggaagtttcatcaggactcacagaaaacactggacttccccggaagctacttgaaaaacatgacccctggccggcctatgtcacctatacctctcagacagtgaaaagactcattgagaaaagcaaaactagagaactggaatgcatgcgtgccctcgaggaaagaccctgggcatcaaggcagaataaaccttccagcgtcattcagccgaaaaggaggaagtcttccaagtcttctggcaaagctgtgttcagggacacgctgtcagaatccacgttatcaatgtggggcgcttattcggtattggccatggctcctaccatgat

SEQ ID NO: 196591 - DNA, 2088 bp, Homo sapiens
  Payload ID: 18779
  Gene Name: tweety family member 1
  Uniprot ID: Q9H313
  ENST ID: ENST00000301194
  CDS Start-End: 123-1478
ctgcctcccccccgctcccgctcccctgagcccagccagaccccgcgccgcccgcgccccgctcgactccggaggctcccgcagccccggcgtccgccccgctgccccctcccccgggggccatgggggcgcccccgggctaccggccctcagcttgggtgcatctcctccaccagctgccccgcgccgacttccagctccgcccggtgcccagcgttttcgcgccccaagagcaggaataccagcaggccttgttgctggtggcggccttggcgggcctgggcttgggcctgagcctcattttcatcgctgtctacctcatccgcttctgctgctgccggccccccgagccccccgggtccaagatcccctcgcccgggggaggctgcgtcacctggagctgcattgtcgcccttctcgccggctgcactggcattggcatcggtttctatggcaacagtgagaccagtgatggggtgtcccagctcagctctgcgctgctgcacgccaaccacacactcagcaccattgaccacctggtgttggagacggtggagaggctgggcgaggcggtgaggacagagctgaccaccctggaggaggtgctcgagccgcgcacggagctggtggctgccgcccgaggggctcgacggcaggcggaggctgcggcccagcagctgcaggggctggccttctggcagggagtgcccctgagccccctgcaggtggctgaaaatgtgtcctttgtggaggagtacaggtggctggcctacgtcctcctgctgctcctggagctgctggtctgcctcttcaccctcctgggcctggcgaagcagagcaagtggctggtgatcgtgatgacagtcatgagtctcctggttctcgtcctgagctggggctccatgggcctggaggcagccacggccgtgggcctcagtgacttctgctccaatccagacccttatgttctgaacctgacccaggaggagacagggctcagctcagacatcctgagctattatctcctctgcaaccgggccgtctccaaccccttccaacagaggctgactctgtcccagcgagctctggccaacatccactcccagctgctgggcctggagcgagaagctgtgcctcagttcccttcagcgcagaagcctctgctgtccttggaggagactctgaatgtgacagaaggaaatttccaccagttggtggcactgctacactgccgcagcctgcacaaggactatggtgcagccctgcggggcctgtgcgaagacgccctggaaggcctgctcttcctgctactcttctccctgctgtctgcaggagcgctggccactgccctctgcagcctgccccgagcctgggccctcttcccacccagtgacgactacgatgacacagacgatgacgaccctttcaaccctcagcaggaatccaagcgctttgtgcagtggcagtcgtctatctgagcccctcctcccggctggactggagcctggctcccctcttcgttccttccctggctgccggaggagaccccactaacccagcctgcctgggctctgaccactaacactcttggccatggacagcctgcacaggaccgcctccctgctcttggccactgtgctcccatttctgtccttggccttgggagtagctgagggggcagactagggagtagggctggcaggggagggggcagacagcctcgcctcgcacccttcatccctggctgccggtcccatccttggagggactaagctgggggtgggggacatgagtccccctgctgcccctgccacatcccagtgggctctgaccccctgatctcaactcgtggcactaacttggaaaagggttgatttaaaataaaagggaagactattttacaagcagctgggtcctccttatttctcctctcccttgattcggcctcctggccagggctgggacatcctccctgctgtcctctctcccccggcctcccagctgccaggaatttctgcgcctgtccaggctcagcaaggggtccaaagacattgttctttaaaaaaaaaaaaaaaaaaatcaaaaaac

SEQ ID NO: 196592 - DNA, 1885 bp, Homo sapiens
  Payload ID: 18779
  Gene Name: tweety family member 1
  Uniprot ID: Q9H313
  ENST ID: ENST00000376530
  CDS Start-End: 104-1456
gctcccctgagcccagccagaccccgcgccgcccgcgccccgctcgactccggaggctcccgcagccccggcgtccgccccgctgccccctcccccgggggccatgggggcgcccccgggctaccggccctcagcttgggtgcatctcctccaccagctgccccgcgccgacttccagctccgcccggtgcccagcgttttcgcgccccaagagcaggaataccagcaggccttgttgctggtggcggccttggcgggcctgggcttgggcctgagcctcattttcatcgctgtctacctcatccgcttctgctgctgccggccccccgagccccccgggtccaagatcccctcgcccgggggaggctgcgtcacctggagctgcattgtcgcccttctcgccggctgcactggcattggcatcggtttctatggcaacagtgagaccagtgatggggtgtcccagctcagctctgcgctgctgcacgccaaccacacactcagcaccattgaccacctggtgttggagacggtggagaggctgggcgaggcggtgaggacagagctgaccaccctggaggaggtgctcgagccgcgcacggagctggtggctgccgcccgaggggctcgacggcaggcggaggctgcggcccagcagctgcaggggctggccttctggcagggagtgcccctgagccccctgcaggtggctgaaaatgtgtcctttgtggaggagtacaggtggctggcctacgtcctcctgctgctcctggagctgctggtctgcctcttcaccctcctgggcctggcgaagcagagcaagtggctggtgatcgtgatgacagtcatgagtctcctggttctcgtcctgagctggggctccatgggcctggaggcagccacggccgtgggcctcagtgacttctgctccaatccagacccttatgttctgaacctgacccaggaggagacagggctcagctcagacatcctgagctattatctcctctgcaaccgggccgtctccaaccccttccaacagaggctgactctgtcccagcgagctctggccaacatccactcccagctgctgggcctggagcgagaagctgtgcctcagttcccttcagcgcagaagcctctgctgtccttggaggagactctgaatgtgacagaaggaaatttccaccagttggtggcactgctacactgccgcagcctgcacaaggactatggtgcagccctgcggggcctgtgcgaagacgccctggaaggcctgctcttcctgctactcttctccctgctgtctgcaggagcgctggccactgccctctgcagcctgccccgagcctgggccctcttcccacccagtgacgactacgatgacacagacgatgacgaccctttcaaccctcaggaatccaagcgctttgtgcagtggcagtcgtctatctgagcccctcctcccggctggactggagcctggctcccctcttcgttccttccctggctgccggaggagaccccactaacccagcctgcctgggctctgaccactaacactcttggccatggacagcctgcacaggaccgcctccctgctcttggccactgtgctcccatttctgtccttggccttgggagtagctgagggggcagactagggagtagggctggcaggggagggggcagacagcctcgcctcgcacccttcatccctggctgccggtcccatccttggagggactaagctgggggtgggggacatgagtccccctgctgcccctgccacatcccagtgggctctgaccccctgatctcaactcgtggcactaacttggaaaagggttgatttaaaataaaagggaagactattttacaagca

SEQ ID NO: 196593 - DNA, 1763 bp, Homo sapiens
  Payload ID: 18779
  Gene Name: tweety family member 1
  Uniprot ID: Q9H313
  ENST ID: ENST00000376531
  CDS Start-End: 28-1410
gccccgctgccccctcccccgggggccatgggggcgcccccgggctaccggccctcagcttgggtgcatctcctccaccagctgccccgcgccgacttccagctccgcccggtgcccagcgttttcgcgccccaagagcaggaataccagcaggccttgttgctggtggcggccttggcgggcctgggcttgggcctgagcctcattttcatcgctgtctacctcatccgcttctgctgctgccggccccccgagccccccgggtccaagatcccctcgcccgggggaggctgcgtcacctggagctgcattgtcgcccttctcgccggctgcactggcattggcatcggtttctatggcaacagtgagaccagtgatggggtgtcccagctcagctctgcgctgctgcacgccaaccacacactcagcaccattgaccacctggtgttggagacggtggagaggctgggcgaggcggtgaggacagagctgaccaccctggaggaggtgctcgagccgcgcacggagctggtggctgccgcccgaggggctcgacggcaggcggaggctgcggcccagcagctgcaggggctggccttctggcagggagtgcccctgagccccctgcaggtggctgaaaatgtgtcctttgtggaggagtacaggtggctggcctacgtcctcctgctgctcctggagctgctggtctgcctcttcaccctcctgggcctggcgaagcagagcaagtggctggtgatcgtgatgacagtcatgagtctcctggttctcgtcctgagctggggctccatgggcctggaggcagccacggccgtgggcctcagtgacttctgctccaatccagacccttatgttctgaacctgacccaggaggagacagggctcagctcagacatcctgagctattatctcctctgcaaccgggccgtctccaaccccttccaacagaggctgactctgtcccagcgagctctggccaacatccactcccagctgctgggcctggagcgagaagctgtgcctcagttcccttcagcgcagaagcctctgctgtccttggaggagactctgaatgtgacagaaggaaatttccaccagttggtggcactgctacactgccgcagcctgcacaaggactatggtgcagccctgcggggcctgtgcgaagacgccctggaaggcctgctcttcctgctactcttctccctgctgtctgcaggagcgctggccactgccctctgcagcctgccccgagcctgggccctcttcccacccaggaatccaagcgctttgtgcagtggcagtcgtctatctgagcccctcctcccggctggactggagcctggctcccctcttcgttccttccctggctgccggaggagaccccactaacccagcctgcctgggctctgaccactaacactcttggccatggacagcctgcacaggaccgcctccctgctcttggccactgtgctcccatttctgtccttggccttgggagtagctgagggggcagactagggagtagggctggcaggggagggggcagacagcctcgcctcgcacccttcatccctggctgccggtcccatccttggagggactaagctgggggtgggggacatgagtccccctgctgcccctgccacatcccagtgggctctgaccccctgatctcaactcgtggcactaacttggaaaagggttgatttaaaataaaagggaagactattttacaagca

SEQ ID NO: 196594 - DNA, 3678 bp, Homo sapiens
  Payload ID: 18779
  Gene Name: tweety family member 1
  ENST ID: ENST00000391739
  CDS Start-End: 1-115
cctcatccgcttctgctgctgccggccccccgagccccccgggtccaagatcccctcgcccgggggaggctgcgtcacctggagctgcattgtcgcccttctcgccggctggtaatggggccccagggtgggtgggcggtggggacagggctccccaagctctttgctggccttcctgggggtgtcctccggggacatggaggaagcagacaggaaggaggaaactccctcgtccctgtccctgccatttgcaagcccacttcagcgcacagcaggaaggactgtcccatttgatggatggagaaagtgaggctctggagaggaagtgaatcaagggcagccatctgcactggcattggcatcggtttctatggcaacagtgagaccagtgatggggtgtcccagctcagctctgcgctgctgcacgccaaccacacactcagcaccattgaccacctgacggtggagaggctgggcgaggcggtgaggacagagctgaccaccctggaggaggtgctcgagccgcgcacggagctggtggctgccgcccgaggggctcgacggcaggcggaggctgcggcccagcagctgcaggggctggccttctggcagggagtgcccctgagccccctgcaggtggctgaaaatgtgtcctttgtggaggagtacaggtggctggcctacgtcctcctgctgctcctggagctgctggtctgcctcttcaccctcctgggcctggcgaagcagagcaagtggctggtgatcgtgatgacagtcatgagtctcctggttctcgtcctgagctggggctccatgggcctggaggcagccacggccgtgggcctcagtgacttctgctccaatccagacccttatgttctgaacctgacccaggaggagacagggctcagctcagacatcctgagctattatctcctctgcaaccgggccgtctccaaccccttccaacagaggctgactctgtcccagcgagctctggccaacatccactcccagctgctgggcctggagcgagaagctgtgcctcagttcccttcagcgcagaagcctctgctgtccttggaggagactctgaatgtgacagaaggaaatttccaccagttggtggcactgctacactgccgcagcctgcacaaggtgaagcccctcccctcccaatttcttctcccacggggggcctctgtctcgacccacagaactacctcctccttctccttggacccctgccattgcgcctgaggatatctctgtatcctctgtttatatgatttatctgtcctatatctattctctacctatttataacctgtcgtctacctacctatcaagcattatccatattccttccctcctccctccctttccccccaactcccgcactccccgctgggtccccatcccaccctccccgtcccttcctgccaccttttccttccttgtcttctctcctctctccgtcctcctgcctctccctccctcctagaggctgccgcttagtgagttctggagcaagactgcctgggttccagtcctacctcctgaccaagggcaagtcacctaacttctctgtacctcagttagttccctcacttataaacctgggattgcaagagtgggcacctgtccagctcccctgcggcttgtgctgttcatacactggacaggcaggggtgggcagggtgcccaggaggaaagatatctggtgtcctgcaggctccagtttgggctctgccgcaggctgcacggccataggcaggtgagcgtggctgactctgcttcccacccgtaccgtgaggaaggacgagttttttttgtttgtttttttttcactggatggctgtgaggattgaaaaaaaaaatccccttataaaacagtaggagctggccgggcgcggaggctcacacctgtaatcccagcactttgggaggcccaggcgggtggatcacctgaggtcaggagttcaagaccagtctggccaacatggtgataccccgtctctactaaaaatagaaaaagttagccgggcatggtggtgggcgcctataatcccaactactcgggaggctgaggcaggagaatcgcttgaatccacgaggcagaggttgcagtgagccaagattgtgccactgcactccagcctgggcaacaagagcgaaactctgtcacaaacaaacaaacaaaaccagtaagagctgttctaaaacacacacccgaggatgcctttccccggccagtcttcccatcaaagacctcacatgtgcatagcttcaccaagtacctgaccctgttgcatttcacaggtggtaactcatcgatgcctcataacaatgctatgaagaaggaactatgattatcccacctaacaggttagaagatgaggagcagagttgagggaccttcccaaggtcacacggccagccagcccatgcacactgaggagagagggaccttccggagggccccgccctctgccccccacagccaggcagttgcccagttttgtcctttctgcttctggaatgtcttcatccatctactctcaatgcccaatgcccctgccgcagctgaggcctcgttctctcccctgcagaaggaagcatggccccctccccatccatccccccatggaccctagaatagggctgccagattcagcaaacagcaaaccactctgctataagtacgcccggtgcaatgctggggagatacttatactagaaaattatgtattgggcatccgatactcaaatgtaactggaagtcctgaatttgatctggcaaccctacccaagagggatttgtctacgccatcgcatggatctgagctttccctggtctggctcagacagaccccttctgtggctcccactgcctcccacccttctggaactggcattccaaaaagggagtggggagtaagcactgaagccatgctcagaattgctgactattgagctgagaaaggctgggcccccacccagcccagggctgccctgatcttttgcataaggataaactggggttcaggcgcttttctgtggcctaggcagaaactgggctggaatacaggcccccagactcctttgtggagggagggaagggaaggaagaggacagatcactctacccttccctaccactgcaccatgagaccctgggtctccatctcccctgtcagtgtgccagggtcctcacagattaaaatcaagaataagcggcggggccgggcactgtggctcacgcctgtaatcccagcactttgggaaaccaaggtgggcggatcaccagaggtcaggagtttgagaccagcctggccagcatggcgaaatcccatctctactaaaaatacaaaaaaactagccgggcgtggtggcacacccctgtattcctagctactcaggaggctgaggcacgagaattgcttgaacctgggcagtggaggttgcagtgagctgagatcgagccactgcactccagccggggtgacagagcgagaatccgtctcaaaaaaaaaaaaaaaaataggagggggctagggatgggtgcctcgtgcctataaacccagcactttgggaggcccagtggggcagatcagaactccttgagctcaggagttcaagaccagcctggccaacatggtgaaaccccatctctatt

SEQ ID NO: 196595 - DNA, 505 bp, Homo sapiens
  Payload ID: 18779
  Gene Name: tweety family member 1
  ENST ID: ENST00000423529
  CDS Start-End: 35-505
ctgatttcaatcgcgatgcaagccagctgtccggatgccgccgacgccagcagcgcggtacctgcgcgggcagcagctgccccgcgccgacttccagctccgcccggtgcccagcgttttcgcgccccaagagcaggaataccagcaggccttgttgctggtggcggccttggcgggcctgggcttgggcctgagcctcattttcatcgctgtctacctcatccgcttctgctgctgccggccccccgagccccccgggtccaagatcccctcgcccgggggaggctgcgtcacctggagctgcattgtcgcccttctcgccggctgcactggcattggcatcggtttctatggcaacagtgagaccagtgatggggtgtcccagctcagctctgcgctgctgcacgccaaccacacactcagcaccattgaccacctggtgttggagacggtggagaggctgggcgaggcggtgaggacagagctgaccaccctggaggaggtg

SEQ ID NO: 196596 - DNA, 929 bp, Homo sapiens
  Payload ID: 18779
  Gene Name: tweety family member 1
  ENST ID: ENST00000445095
  CDS Start-End: 89-929
gccagaccccgcgccgcccgcgccccgctcgactccggaggctcccgcagccccggcgtccgccccgctgccccctcccccgggggccatgggggcgcccccgggctaccggccctcagcttgggtgcatctcctccaccagctgccccgcgccgacttccagctccgcccggtgcccagcgttttcgcgccccaagagcaggaataccagcaggatcagagcagcctcgcggttacacaacggccacctccaacaacgccgctccaccggctccggcctcggcccagactcacgcccgctctggcccggagacctcccgaagccgcacgcggggatccgcggccccagtcaccgccagaggccttgttgctggtggcggccttggcgggcctgggcttgggcctgagcctcattttcatcgctgtctacctcatccgcttctgctgctgccggccccccgagccccccgggtccaagatcccctcgcccgggggaggctgcgtcacctggagctgcattgtcgcccttctcgccggctgcactggcattggcatcggtttctatggcaacagtgagaccagtgatggggtgtcccagctcagctctgcgctgctgcacgccaaccacacactcagcaccattgaccacctggtgttggagacggtggagaggctgggcgaggcggtgaggacagagctgaccaccctggaggaggtgctcgagccgcgcacggagctggtggctgccgcccgaggggctcgacggcaggcggaggctgcggcccagcagctgcaggggctggccttctggcagggagtgcccctgagccccctgcaggtggctgaaaatgtgtcctttgtggaggagtacaggtggctggcctacgtcctcctgctgctcctggagctgctggtctgcctcttcaccc

SEQ ID NO: 196597 - DNA, 665 bp, Homo sapiens
  Payload ID: 18779
  Gene Name: tweety family member 1
  ENST ID: ENST00000425969
  CDS Start-End: 44-385
cgcagccccggcgtccgccccgctgccccctcccccgggggccatgggggcgcccccgggctaccggccctcagcttgggtgcatctcctccaccagctgccccgcgccgacttccagctccgcccggtgcccagcgttttcgcgccccaagagcaggaataccagcaggccttgttgctggtggcggccttggcgggcctgggcttgggcctgagcctcattttcatcgctgtctacctcatccgcttctgctgctgccggccccccgagccccccgggtccaagatcccctcgcccgggggaggctgcgtcacctggagctgcattgtcgcccttctcgccggctggtgttggagacggtggagaggctgggcgaggcggtgaggacagagctgaccaccctggaggaggtgctcgagccgcgcacggagctggtggctgccgcccgaggggctcgacggcaggcggaggctgcggcccagcagctgcaggggctggccttctggcagggagtgcccctgagccccctgcaggtggctgaaaatgtgtcctttgtggaggagtacaggtggctggcctacgtcctcctgctgctcctggagctgctggtctgcctcttcaccctcctgggcctggcgaagcagagcaagtggctggtgatcgt

SEQ ID NO: 196598 - DNA, 2088 bp, Homo sapiens
  Payload ID: 18779
  Gene Name: tweety family member 1
  Uniprot ID: Q9H313
  ENST ID: ENST00000616929
  CDS Start-End: 123-1478
ctgcctcccccccgctcccgctcccctgagcccagccagaccccgcgccgcccgcgccccgctcgactccggaggctcccgcagccccggcgtccgccccgctgccccctcccccgggggccatgggggcgcccccgggctaccggccctcagcttgggtgcatctcctccaccagctgccccgcgccgacttccagctccgcccggtgcccagcgttttcgcgccccaagagcaggaataccagcaggccttgttgctggtggcggccttggcgggcctgggcttgggcctgagcctcattttcatcgctgtctacctcatccgcttctgctgctgccggccccccgagccccccgggtccaagatcccctcgcccgggggaggctgcgtcacctggagctgcattgtcgcccttctcgccggctgcactggcattggcatcggtttctatggcaacagtgagaccagtgatggggtgtcccagctcagctctgcgctgctgcacgccaaccacacactcagcaccattgaccacctggtgttggagacggtggagaggctgggcgaggcggtgaggacagagctgaccaccctggaggaggtgctcgagccgcgcacggagctggtggctgccgcccgaggggctcgacggcaggcggaggctgcggcccagcagctgcaggggctggccttctggcagggagtgcccctgagccccctgcaggtggctgaaaatgtgtcctttgtggaggagtacaggtggctggcctatgtcctcctgctgctcctggagctgctggtctgcctcttcaccctcctgggcctggcgaagcagagcaagtggctggtgatcgtgatgacagtcatgagtctcctggttctcgtcctgagctggggctccatgggcctggaggcagccacggccgtgggcctcagtgacttctgctccaatccagacccttatgttctgaacctgacccaggaggagacagggctcagctcagacatcctgagctattatctcctctgcaaccgggccgtctccaaccccttccaacagaggctgactctgtcccagcgagctctggccaacatccactcccagctgctgggcctggagcgagaagctgtgcctcagttcccttcagcgcagaagcctctgctgtccttggaggagactctgaatgtgacagaaggaaatttccaccagttggtggcactgctacactgccgcagcctgcacaaggactatggtgcagccctgcggggcctgtgcgaagacgccctggaaggcctgctcttcctgctgctcttctccctgctgtctgcaggagcgctggccactgccctctgcagcctgccccgagcctgggccctcttcccacccagtgacgactacgatgacacagacgatgacgaccctttcaaccctcagcaggaatccaagcgctttgtgcagtggcagtcgtctatctgagcccctcctcccggctggactggagcctggctcccctcttcgttccttccctggctgccggaggagaccccactaacccagcctgcctgggctctgaccactaacactcttggccatggacagcctgcacaggaccgcctccctgctcttggccactgtgctcccatttctgtccttggccttgggagtagctgagggggcagactagggagtagggctggcaggggagggggcagacagcctcgcctcgcacccttcatccctggctgccggtcccatccttggagggactaagctgggggtgggggacatgagtccccctgctgcccctgccacatcccagtgggctctgaccccctgatctcaactcgtggcactaacttggaaaagggttgatttaaaataaaagggaagactattttacaagcagctgggtcctccttatttctcctctcccttgattcggcctcctggccagggctgggacatcctccctgctgtcctctctcccccggcctcccagctgccaggaatttctgcgcctgtccaggctcagcaaggggtccaaagacattgttctttaaaaaaaaaaaaaaaaaaatcaaaaaac

SEQ ID NO: 196599 - DNA, 2088 bp, Homo sapiens; identical to SEQ ID NO: 196591
  Payload ID: 18779
  Gene Name: tweety family member 1
  Uniprot ID: Q9H313
  ENST ID: ENST00000611133
  CDS Start-End: 123-1478

SEQ ID NO: 196600 - DNA, 1850 bp, Homo sapiens
  Payload ID: 18779
  Gene Name: tweety family member 1
  Uniprot ID: Q9H313
  ENST ID: ENST00000619450
  CDS Start-End: 104-1456
gctcccctgagcccagccagaccccgcgccgcccgcgccccgctcgactccggaggctcccgcagccccggcgtccgccccgctgccccctcccccgggggccatgggggcgcccccgggctaccggccctcagcttgggtgcatctcctccaccagctgccccgcgccgacttccagctccgcccggtgcccagcgttttcgcgccccaagagcaggaataccagcaggccttgttgctggtggcggccttggcgggcctgggcttgggcctgagcctcattttcatcgctgtctacctcatccgcttctgctgctgccggccccccgagccccccgggtccaagatcccctcgcccgggggaggctgcgtcacctggagctgcattgtcgcccttctcgccggctgcactggcattggcatcggtttctatggcaacagtgagaccagtgatggggtgtcccagctcagctctgcgctgctgcacgccaaccacacactcagcaccattgaccacctggtgttggagacggtggagaggctgggcgaggcggtgaggacagagctgaccaccctggaggaggtgctcgagccgcgcacggagctggtggctgccgcccgaggggctcgacggcaggcggaggctgcggcccagcagctgcaggggctggccttctggcagggagtgcccctgagccccctgcaggtggctgaaaatgtgtcctttgtggaggagtacaggtggctggcctacgtcctcctgctgctcctggagctgctggtctgcctcttcaccctcctgggcctggcgaagcagagcaagtggctggtgatcgtgatgacagtcatgagtctcctggttctcgtcctgagctggggctccatgggcctggaggcagccacggccgtgggcctcagtgacttctgctccaatccagacccttatgttctgaacctgacccaggaggagacagggctcagctcagacatcctgagctattatctcctctgcaaccgggccgtctccaaccccttccaacagaggctgactctgtcccagcgagctctggccaacatccactcccagctgctgggcctggagcgagaagctgtgcctcagttcccttcagcgcagaagcctctgctgtccttggaggagactctgaatgtgacagaaggaaatttccaccagttggtggcactgctacactgccgcagcctgcacaaggactatggtgcagccctgcggggcctgtgcgaagacgccctggaaggcctgctcttcctgctactcttctccctgctgtctgcaggagcgctggccactgccctctgcagcctgccccgagcctgggccctcttcccacccagtgacgactacgatgacacagacgatgacgaccctttcaaccctcaggaatccaagcgctttgtgcagtggcagtcgtctatctgagcccctcctcccggctggactggagcctggctcccctcttcgttccttccctggctgccggaggagaccccactaacccagcctgcctgggctctgaccactaacactcttggccatggacagcctgcacaggaccgcctccctgctcttggccactgtgctcccatttctgtccttggccttgggagtagctgagggggcagactagggagtagggctggcaggggagggggcagacagcctcgcctcgcacccttcatccctggctgccggtcccatccttggagggactaagctgggggtgggggacatgagtccccctgctgcccctgccacatcccagtgggctctgaccccctgatctcaactcgtggcactaacttggaaaagggtt

SEQ ID NO: 196601 - DNA, 1885 bp, Homo sapiens
  Payload ID: 18779
  Gene Name: tweety family member 1
  Uniprot ID: Q9H313
  ENST ID: ENST00000620298
  CDS Start-End: 104-1456
gctcccctgagcccagccagaccccgcgccgcccgcgccccgctcgactccggaggctcccgcagccccggcgtccgccccgctgccccctcccccgggggccatgggggcgcccccgggctaccggccctcagcttgggtgcatctcctccaccagctgccccgcgccgacttccagctccgcccggtgcccagcgttttcgcgccccaagagcaggaataccagcaggccttgttgctggtggcggccttggcgggcctgggcttgggcctgagcctcattttcatcgctgtctacctcatccgcttctgctgctgccggccccccgagccccccgggtccaagatcccctcgcccgggggaggctgcgtcacctggagctgcattgtcgcccttctcgccggctgcactggcattggcatcggtttctatggcaacagtgagaccagtgatggggtgtcccagctcagctctgcgctgctgcacgccaaccacacactcagcaccattgaccacctggtgttggagacggtggagaggctgggcgaggcggtgaggacagagctgaccaccctggaggaggtgctcgagccgcgcacggagctggtggctgccgcccgaggggctcgacggcaggcggaggctgcggcccagcagctgcaggggctggccttctggcagggagtgcccctgagccccctgcaggtggctgaaaatgtgtcctttgtggaggagtacaggtggctggcctatgtcctcctgctgctcctggagctgctggtctgcctcttcaccctcctgggcctggcgaagcagagcaagtggctggtgatcgtgatgacagtcatgagtctcctggttctcgtcctgagctggggctccatgggcctggaggcagccacggccgtgggcctcagtgacttctgctccaatccagacccttatgttctgaacctgacccaggaggagacagggctcagctcagacatcctgagctattatctcctctgcaaccgggccgtctccaaccccttccaacagaggctgactctgtcccagcgagctctggccaacatccactcccagctgctgggcctggagcgagaagctgtgcctcagttcccttcagcgcagaagcctctgctgtccttggaggagactctgaatgtgacagaaggaaatttccaccagttggtggcactgctacactgccgcagcctgcacaaggactatggtgcagccctgcggggcctgtgcgaagacgccctggaaggcctgctcttcctgctgctcttctccctgctgtctgcaggagcgctggccactgccctctgcagcctgccccgagcctgggccctcttcccacccagtgacgactacgatgacacagacgatgacgaccctttcaaccctcaggaatccaagcgctttgtgcagtggcagtcgtctatctgagcccctcctcccggctggactggagcctggctcccctcttcgttccttccctggctgccggaggagaccccactaacccagcctgcctgggctctgaccactaacactcttggccatggacagcctgcacaggaccgcctccctgctcttggccactgtgctcccatttctgtccttggccttgggagtagctgagggggcagactagggagtagggctggcaggggagggggcagacagcctcgcctcgcacccttcatccctggctgccggtcccatccttggagggactaagctgggggtgggggacatgagtccccctgctgcccctgccacatcccagtgggctctgaccccctgatctcaactcgtggcactaacttggaaaagggttgatttaaaataaaagggaagactattttacaagca

SEQ ID NO: 196602 - DNA, 1537 bp, Homo sapiens
  Payload ID: 18779
  Gene Name: tweety family member 1
  ENST ID: ENST00000617153
  CDS Start-End: 63-380
gctcgactccggaggctcccgcagccccggcgtccgccccgctgccccctcccccgggggccatgggggcgcccccgggctaccggccctcagcttgggtgcatctcctccaccagctgccccgcgccgacttccagctccgcccggtgcccagcgttttcgcgccccaagagcaggaataccagcaggtgggaccggcctcgcggttacacaacggccacctccaacaacgccgctccaccggctccggcctcggcccagactcacgcccgctctggcccggagacctcccgaagccgcacgcggggatccgcggccccagtcaccgccagaggccttgttgctggtggcggccttggcgggcctgggcttgggcctgagcctcattttcatcgctgtctacctcatccgcttctgctgctgccggccccccgagccccccgggtccaagatcccctcgcccgggggaggctgcgtcacctggagctgcattgtcgcccttctcgccggctgcactggcattggcatcggtttctatggcaacagtgagaccagtgatggggtgtcccagctcagctctgcgctgctgcacgccaaccacacactcagcaccattgaccacctggtgttggagacggtggagaggctgggcgaggcggtgaggacagagctgaccaccctggaggaggtgctcgagccgcgcacggagctggtggctgccgcccgaggggctcgacggcaggcggaggctgcggcccagcagctgcaggggctggccttctggcagggagtgcccctgagccccctgcaggtggctgaaaatgtgtcctttgtggaggagtacaggtggctggcctacgtcctcctgctgctcctggagctgctggtctgcctcttcaccctcctgggcctggcgaagcagagcaagtggctggtgatcgtgatgacagtcatgagtctcctggttctcgtcctgagctggggctccatgggcctggaggcagccacggccgtgggcctcagtgacttctgctccaatccagacccttatgttctgaacctgacccaggaggagacagggctcagctcagaggctgactctgtcccagcgagctctggccaacatccactcccagctgctgggcctggagcgagaagctgtgcctcagttcccttcagcgcagaagcctctgctgtccttggaggagactctgaatgtgacagaaggaaatttccaccagttggtggcactgctacactgccgcagcctgcacaaggactatggtgcagccctgcggggcctgtgcgaagacgccctggaaggcctgctcttcctgctactcttctccctgctgtctgcaggagcgctggccactgccctctgcagcctgccccgagcctgggccctcttcccacccagtgacgactacgatgacacagacgatgacgaccctttcaaccctcagcaggaatccaagcgctttgtgcagtggcagtcgtctatctgagcccctcctcccggctggactggagcctg

SEQ ID NO: 196603 - DNA, 2088 bp, Homo sapiens; identical to SEQ ID NO: 196591
  Payload ID: 18779
  Gene Name: tweety family member 1
  Uniprot ID: Q9H313
  ENST ID: ENST00000619591
  CDS Start-End: 123-1478

SEQ ID NO: 196604 - DNA, 2692 bp, Homo sapiens
  Payload ID: 18779
  Gene Name: tweety family member 1
  ENST ID: ENST00000619108
  CDS Start-End: 42-182
cagccccggcgtccgccccgctgccccctcccccgggggccatgggggcgcccccgggctaccggccctcagcttgggtgcatctcctccaccagctgccccgcgccgacttccagctccgcccggtgcccagcgttttcgcgccccaagagcaggaataccagcaggatcagagcaggtgaatatgtcccagataaggtgggacccaggagacagcggacctgataacggtggcggggaaaacgctggctgctgcggtgctgggatgggattgagagtctgaaatggggaagggggcttcaggggctgaggaccagggctggaaaatgaaggggctctgggagaggaagcttcttgcccgtcccaagaaagaaggggtggtcagggcgctgcaggggtgagggccgagatgaggctgggtttggggagcctcgggatgacagacccgggtcccgagggtggggccggtgtgggaacctcacagaagccggtgtccctggggaaggggcccggctcggggcagctccaatgggcgaaagagctgtcccctgacccagtttaattcaagtccttgacttcgagattaatgaggagaaaggcttggctgagctggggacgggtgggggtgctgggagtcccgatgtggccccaggacgggtcctggccctgctgatggggcctgagcccctgggctccgtcttgggttgctcctgggagaagggggctgggattggagagctcagggggcgtggagggggtcccagaaaagcgcggaggggatgagtgctgtgttctgagctatttgggtcacggctggcacagccctgagcagctcttccccgcctgctcctcgccgccccctctccccacacacggggaccgccgtcccctcgcccacagcctcgcggttacacaacggccacctccaacaacgccgctccaccggctccggcctcggcccagactcacgcccgctctggcccggagacctcccgaagccgcacgcggggatccgcggccccagtcaccgccagaggccttgttgctggtggcggccttggcgggcctgggcttgggcctgagcctcattttcatcgctgtctacctcatccgcttctgctgctgccggccccccgagccccccgggtccaagatcccctcgcccgggggaggctgcgtcacctggagctgcattgtcgcccttctcgccggctgcactggcattggcatcggtttctatggcaacagtgagaccagtgatggggtgtcccagctcagctctgcgctgctgcacgccaaccacacactcagcaccattgaccacctggtgttggagacggtggagaggctgggcgaggcggtgaggacagagctgaccaccctggaggaggtgctcgagccgcgcacggagctggtggctgccgcccgaggggctcgacggcaggcggaggctgcggcccagcagctgcaggggctggccttctggcagggagtgcccctgagccccctgcaggtggctgaaaatgtgtcctttgtggaggagtacaggtggctggcctacgtcctcctgctgctcctggagctgctggtctgcctcttcaccctcctgggcctggcgaagcagagcaagtggctggtgatcgtgatgacagtcatgagtctcctggttctcgtcctgagctggggctccatgggcctggaggcagccacggccgtgggcctcagtgacttctgctccaatccagacccttatgttctgaacctgacccaggaggagacagggctcagctcagacatcctgagctattatctcctctgcaaccgggccgtctccaaccccttccaacagaggctgactctgtcccagcgagctctggccaacatccactcccagctgctgggcctggagcgagaagctgtgcctcagttcccttcagcgcagaagcctctgctgtccttggaggagactctgaatgtgacagaaggaaatttccaccagttggtggcactgctacactgccgcagcctgcacaaggactatggtgcagccctgcggggcctgtgcgaagacgccctggaaggcctgctcttcctgctactcttctccctgctgtctgcaggagcgctggccactgccctctgcagcctgccccgagcctgggccctcttcccacccagtgacgactacgatgacacagacgatgacgaccctttcaaccctcaggaatccaagcgctttgtgcagtggcagtcgtctatctgagcccctcctcccggctggactggagcctggctcccctcttcgttccttccctggctgccggaggagaccccactaacccagcctgcctgggctctgaccactaacactcttggccatggacagcctgcacaggaccgcctccctgctcttggccactgtgctcccatttctgtccttggccttgggagtagctgagggggcagactagggagtagggctggcaggggagggggcagacagcctcgcctcgcacccttcatccctggctgccggtcccatccttggagggactaagctgggggtgggggacatgagtccccctgctgcccctgccacatcccagtgggctctgaccccctgatctcaactcgtggcactaacttggaaaagggttgatttaaaataaaagggaagactattttacaagca

SEQ ID NO: 196605 - DNA, 1239 bp, Homo sapiens
  Payload ID: 18779
  Gene Name: tweety family member 1
  Uniprot ID: Q9H313
  ENST ID: ENST00000622771
  CDS Start-End: 92-811
gtcctgtctcatgataacactatttcacagaggacctgggctgtggcccagacacagtaaacagcaggaggctgagcttggagggtggtgaatgtggctggcctatgtcctcctgctgctcctggagctgctggtctgcctcttcaccctcctgggcctggcgaagcagagcaagtggctggtgatcgtgatgacagtcatgagtctcctggttctcgtcctgagctggggctccatgggcctggaggcagccacggccgtgggcctcagtgacttctgctccaatccagacccttatgttctgaacctgacccaggaggagacagggctcagctcagacatcctgagctattatctcctctgcaaccgggccgtctccaaccccttccaacagaggctgactctgtcccagcgagctctggccaacatccactcccagctgctgggcctggagcgagaagctgtgcctcagttcccttcagcgcagaagcctctgctgtccttggaggagactctgaatgtgacagaaggaaatttccaccagttggtggcactgctacactgccgcagcctgcacaaggactatggtgcagccctgcggggcctgtgcgaagacgccctggaaggcctgctcttcctgctgctcttctccctgctgtctgcaggagcgctggccactgccctctgcagcctgccccgagcctgggccctcttcccacccagtgacgactacgatgacacagacgatgacgaccctttcaaccctcagcaggaatccaagcgctttgtgcagtggcagtcgtctatctgagcccctcctcccggctggactggagcctggctcccctcttcgttccttccctggctgccggaggagaccccactaacccagcctgcctgggctctgaccactaacactcttggccatggacagcctgcacaggaccgcctccctgctcttggccactgtgctcccatttctgtccttggccttgggagtagctgagggggcagactagggagtagggctggcaggggagggggcagacagcctcgcctcgcacccttcatccctggctgccggtcccatccttggagggactaagctgggggtgggggacatgagtccccctgctgcccctgccacatcccagtgggctctgaccccctgatctcaactcgtggcactaacttggaaaagggttgatttaaaataaaagggaagactattttacaagc

SEQ ID NO: 196606 - DNA, 3869 bp, Homo sapiens
  Payload ID: 18779
  Gene Name: tweety family member 1
  Uniprot ID: Q9H313
  ENST ID: ENST00000620133
  CDS Start-End: 488-1450
aacggccacctccaacaacgccgctccaccggctccggcctcggcccagactcacgcccgctctggcccggagacctcccgaagccgcacgcggggatccgcggccccagtcaccgccagaggccttgttgctggtggcggccttggcgggcctgggcttgggcctgagcctcattttcatcgctgtctacctcatccgcttctgctgctgccggccccccgagccccccgggtccaagatcccctcgcccgggggaggctgcgtcacctggagctgcattgtcgcccttctcgccggctggtaatggggccccagggtgggtgggcggtggggacagggctccccaagctctttgctggccttcctgggggtgtcctccggggacatggaggaagcagacaggaaggaggaaactccctcgtccctgtccctgccatttgcaagcccacttcagcgcacagcaggaaggactgtcccatttgatggatggagaaagtgaggctctggagaggaagtgaatcaagggcagccatctgcactggcattggcatcggtttctatggcaacagtgagaccagtgatggggtgtcccagctcagctctgcgctgctgcacgccaaccacacactcagcaccattgaccacctgacggtggagaggctgggcgaggcggtgaggacagagctgaccaccctggaggaggtgctcgagccgcgcacggagctggtggctgccgcccgaggggctcgacggcaggcggaggctgcggcccagcagctgcaggggctggccttctggcagggagtgcccctgagccccctgcaggtggctgaaaatgtgtcctttgtggaggagtacaggtggctggcctacgtcctcctgctgctcctggagctgctggtctgcctcttcaccctcctgggcctggcgaagcagagcaagtggctggtgatcgtgatgacagtcatgagtctcctggttctcgtcctgagctggggctccatgggcctggaggcagccacggccgtgggcctcagtgacttctgctccaatccagacccttatgttctgaacctgacccaggaggagacagggctcagctcagacatcctgagctattatctcctctgcaaccgggccgtctccaaccccttccaacagaggctgactctgtcccagcgagctctggccaacatccactcccagctgctgggcctggagcgagaagctgtgcctcagttcccttcagcgcagaagcctctgctgtccttggaggagactctgaatgtgacagaaggaaatttccaccagttggtggcactgctacactgccgcagcctgcacaaggtgaagcccctcccctcccaatttcttctcccacggggggcctctgtctcgacccacagaactacctcctccttctccttggacccctgccattgcgcctgaggatatctctgtatcctctgtttatatgatttatctgtcctatatctattctctacctatttataacctgtcgtctacctacctatcaagcattatccatattccttccctcctccctccctttccccccaactcccgcactccccgctgggtccccatcccaccctccccgtcccttcctgccaccttttccttccttgtcttctctcctctctccgtcctcctgcctctccctccctcctagaggctgccgcttagtgagttctggagcaagactgcctgggttccagtcctacctcctgaccaagggcaagtcacctaacttctctgtacctcagttagttccctcacttataaacctgggattgcaagagtgggcacctgtccagctcccctgcggcttgtgctgttcatacactggacaggcaggggtgggcagggtgcccaggaggaaagatatctggtgtcctgcaggctccagtttgggctctgccgcaggctgcacggccataggcaggtgagcgtggctgactctgcttcccacccgtaccgtgaggaaggacgagttttttttgtttgtttttttttcactggatggctgtgaggattgaaaaaaaaaatccccttataaaacagtaggagctggccgggcgcggaggctcacacctgtaatcccagcactttgggaggcccaggcgggtggatcacctgaggtcaggagttcaagaccagtctggccaacatggtgataccccgtctctactaaaaatagaaaaagttagccgggcatggtggtgggcgcctataatcccaactactcgggaggctgaggcaggagaatcgcttgaatccacgaggcagaggttgcagtgagccaagattgtgccactgcactccagcctgggcaacaagagcgaaactctgtcacaaacaaacaaacaaaaccagtaagagctgttctaaaacacacacccgaggatgcctttccccggccagtcttcccatcaaagacctcacatgtgcatagcttcaccaagtacctgaccctgttgcatttcacaggtggtaactcatcgatgcctcataacaatgctatgaagaaggaactatgattatcccacctaacaggttagaagatgaggagcagagttgagggaccttcccaaggtcacacggccagccagcccgtgcacactgaggagagagggaccttccggagggccccgccctctgccccccacagccaggcagttgcccagttttgtcctttctgcttctggaatgtcttcatccatctactctcaatgcccaatgcccctgccgcagctgaggcctcgttctctcccctgcagaaggaagcatggccccctccccatccatccccccatggaccctagaatagggctgccagattcagcaaacagcaaaccactctgctataagtacgcccggtgcaatgctggggagatacttatactagaaaattatgtattgggcatccgatactcaaatgtaactggaagtcctgaatttgatctggcaaccctacccaagagggatttgtctacgccatcgcatggatctgagctttccctggtctggctcagacagaccccttctgtggctcccactgcctcccacccttctggaactggcattccaaaaagggagtggggagtaagcactgaagccatgctcagaattgctgactattgagctgagaaaggctgggcccccacccagcccagggctgccctgatcttttgcataaggataaactggggttcaggcgcttttctgtggcctaggcagaaactgggctggaatacaggcccccagactcctttgtggagggagggaagggaaggaagaggacagatcactctacccttccctaccactgcaccatgagaccctgggtctccatctcccctgtcagtgtgccagggtcctcacagattaaaatcaagaataagcggcggggccgggcactgtggctcatgcctgtaatcccagcactttgggaaaccaaggtgggcggatcaccagaggtcaggagtttgagaccagcctggccagcatggcgaaatcccatctctactaaaaatacaaaaaaactagccgggcgtggtggcacacccctgtattcctagctactcaggaggctgaggcacgagaattgcttgaacctgggcagtggaggttgcagtgagctgagatcgagccactgcactccagccggggtgacagagcgagaatccgtctcaaaaaaaaaaaaaaaaaataggagggggctagggatgggtgcctcgtgcctataaacccagcactttgggaggcccagtggggcagatcagaactccttgagctcaggagttcaagaccagcctggccaacatggtgaaaccccatctctatt

SEQ ID NO: 196607 - DNA, 3878 bp, Homo sapiens
  Payload ID: 18779
  Gene Name: tweety family member 1
  ENST ID: ENST00000618512
  CDS Start-End: 488-1459
aacggccacctccaacaacgccgctccaccggctccggcctcggcccagactcacgcccgctctggcccggagacctcccgaagccgcacgcggggatccgcggccccagtcaccgccagaggccttgttgctggtggcggccttggcgggcctgggcttgggcctgagcctcattttcatcgctgtctacctcatccgcttctgctgctgccggccccccgagccccccgggtccaagatcccctcgcccgggggaggctgcgtcacctggagctgcattgtcgcccttctcgccggctggtaatggggccccagggtgggtgggcggtggggacagggctccccaagctctttgctggccttcctgggggtgtcctccggggacatggaggaagcagacaggaaggaggaaactccctcgtccctgtccctgccatttgcaagcccacttcagcgcacagcaggaaggactgtcccatttgatggatggagaaagtgaggctctggagaggaagtgaatcaagggcagccatctgcactggcattggcatcggtttctatggcaacagtgagaccagtgatggggtgtcccagctcagctctgcgctgctgcacgccaaccacacactcagcaccattgaccacctggtgttggagacggtggagaggctgggcgaggcggtgaggacagagctgaccaccctggaggaggtgctcgagccgcgcacggagctggtggctgccgcccgaggggctcgacggcaggcggaggctgcggcccagcagctgcaggggctggccttctggcagggagtgcccctgagccccctgcaggtggctgaaaatgtgtcctttgtggaggagtacaggtggctggcctatgtcctcctgctgctcctggagctgctggtctgcctcttcaccctcctgggcctggcgaagcagagcaagtggctggtgatcgtgatgacagtcatgagtctcctggttctcgtcctgagctggggctccatgggcctggaggcagccacggccgtgggcctcagtgacttctgctccaatccagacccttatgttctgaacctgacccaggaggagacagggctcagctcagacatcctgagctattatctcctctgcaaccgggccgtctccaaccccttccaacagaggctgactctgtcccagcgagctctggccaacatccactcccagctgctgggcctggagcgagaagctgtgcctcagttcccttcagcgcagaagcctctgctgtccttggaggagactctgaatgtgacagaaggaaatttccaccagttggtggcactgctacactgccgcagcctgcacaaggtgaagcccctcccctcccaatttcttctcccacggggggcctctgtctggacccacagaactacctcctccttctccttggacccctgccattgcgcctgaggatatctctgtatcctctgtttatatgatttatctgtcctatatctattctctacctatttataacctgtcgtctacctacctatcaagcattatccatattccttccctcctccctccctttccccccaactcccgcactccccgctgggtccccatcccaccctccccgtccattcctgccaccttttccttccttgtcttctctcctctctccgtcctcctgcctctccctccctcctagaggctgccgcttagtgagttctggagcaagactgcctgggttccagtcctacctcctgaccaagggcaagtcacctaacttctctgtacctcagttagttccctcacttataaacctgggattgcaagagtgggcacctgtccagctcccctgcggcttgtgctgttcatacactggacaggcaggggtgggcagggtgcccaggaggaaagatatctggtgtcctgcaggctccagtttgggctctgccgcaggctgcacggccataggcaggtgagcgtggctgactctgcttcccacccgtaccgtgaggaaggacgagttttttttgtttgtttttttttcactggatggctgtgaggattgaaaaaaaaaatccccttataaaacagtaggagctggccgggcgcggaggctcacacctgtaatcccagcactttgggaggcccaggcgggtggatcacctgaggtcaggagttcaagaccagtctggccaacatggtgataccccgtctctactaaaaatagaaaaagttagccgggcatggtggtgggcgcctataatcccaactactcgggaggctgaggcaggagaatcgcttgaatccacgaggcagaggttgcagtgagccaagattgtgccactgcactccagcctgggcaacaagagcgaaactctgtcacaaacaaacaaacaaaaccagtaagagctgttctaaaacacacacccgaggatgcctttccccggccagtcttcccatcaaagacctcacatgtgcatagcttcaccaagtacctgaccctgttgcatttcacaggtggtaactcatcgatgcctcataacaatgctatgaagaaggaactatgattatcccacctaacaggttagaagatgaggagcagagttgagggaccttcccaaggtcacacggccagccagcccgtgcacactgaggagagagggaccttccggagggccccgccctctgccccccacagccaggcagttgcccagttttgtcctttctgcttctggaatgtcttcatccatctactctcaatgcgcaatgcccctgctgcagctgaggcctcgttctctcccctgcagaaggaagcatggccccctccccatccgtccccccatggaccctagaatagggctgccagattcagcaaacagcaaaccactctgctataagtacgcccggtgcaatgctggggagatacttatactagaaaattatgtattgggcatccgatactcaaatgtaactggaagtcctgaatttgatctggcaaccctacccaagagggatttgtctacgccatcgcgtggatctgagctttccctggtctggctcagacagaccccttctgtggctcccactgcctcccacccttctggaactggcattccaaaaagggagtggggagtaagcactgaagccatgctcagaattgctgactattgagctgagaaaggctgggcccccacccagcccagggctgccctgatcttttgcataaggataaactggggttcaggcgcttttctgtggcctaggcagaaactgggctggaatacaggcccccagactcctttgtggagggagggaagggaaggaagaggacagatcactctacccttccctaccactgcaccatgagaccctgggtctccatctcccctgtcagtgtgccagggtcctcacagattaaaatcaagaataagcggcggggccgggcactgtggctcacgcctgtaatcccagcactttgggaaaccaaggtgggcggatcaccagaggtcaggagtttgagaccagcctggccagcatggcgaaatcccatctctactaaaaatacaaaaaaactagccgggcgtggtggcgcacccctgtattcctagctactcaggaggctgaggcacgagaattgcttgaacctgggcagtggaggttgcagtgagctgagatcgagccactgcactccagccggggtgacagagcgagaatccgtctcaaaaaaaaaaaaaaaaaataggagggggctagggatgggtgcctcgtgcctatcaacccagcactttgggaggcccagtggggcagatcagaactccttgagctcaggagttcaagaccagcctggccaacatggtgaaaccccatctctatt

SEQ ID NO: 196608 - DNA, 1239 bp, Homo sapiens
  Payload ID: 18779
  Gene Name: tweety family member 1
  Uniprot ID: Q9H313
  ENST ID: ENST00000614387
  CDS Start-End: 92-811
gtcctgtctcatgataacactatttcacagaggacctgggctgtggcccagacacagtaaacagcaggaggctgagcttggagggtggtgaatgtggctggcctacgtcctcctgctgctcctggagctgctggtctgcctcttcaccctcctgggcctggcgaagcagagcaagtggctggtgatcgtgatgacagtcatgagtctcctggttctcgtcctgagctggggctccatgggcctggaggcagccacggccgtgggcctcagtgacttctgctccaatccagacccttatgttctgaacctgacccaggaggagacagggctcagctcagacatcctgagctattatctcctctgcaaccgggccgtctccaaccccttccaacagaggctgactctgtcccagcgagctctggccaacatccactcccagctgctgggcctggagcgagaagctgtgcctcagttcccttcagcgcagaagcctctgctgtccttggaggagactctgaatgtgacagaaggaaatttccaccagttggtggcactgctacactgccgcagcctgcacaaggactatggtgcagccctgcggggcctgtgcgaagacgccctggaaggcctgctcttcctgctactcttctccctgctgtctgcaggagcgctggccactgccctctgcagcctgccccgagcctgggccctcttcccacccagtgacgactacgatgacacagacgatgacgaccctttcaaccctcagcaggaatccaagcgctttgtgcagtggcagtcgtctatctgagcccctcctcccggctggactggagcctggctcccctcttcgttccttccctggctgccggaggagaccccactaacccagcctgcctgggctctgaccactaacactcttggccatggacagcctgcacaggaccgcctccctgctcttggccactgtgctcccatttctgtccttggccttgggagtagctgagggggcagactagggagtagggctggcaggggagggggcagacagcctcgcctcgcacccttcatccctggctgccggtcccatccttggagggactaagctgggggtgggggacatgagtccccctgctgcccctgccacatcccagtgggctctgaccccctgatctcaactcgtggcactaacttggaaaagggttgatttaaaataaaagggaagactattttacaagc

SEQ ID NO: 196609 - DNA, 1760 bp, Homo sapiens
  Payload ID: 18779
  Gene Name: tweety family member 1
  Uniprot ID: Q9H313
  ENST ID: ENST00000619453
  CDS Start-End: 28-1410
gccccgctgccccctcccccgggggccatgggggcgcccccgggctaccggccctcagcttgggtgcatctcctccaccagctgccccgcgccgacttccagctccgcccggtgcccagcgttttcgcgccccaagagcaggaataccagcaggccttgttgctggtggcggccttggcgggcctgggcttgggcctgagcctcattttcatcgctgtctacctcatccgcttctgctgctgccggccccccgagccccccgggtccaagatcccctcgcccgggggaggctgcgtcacctggagctgcattgtcgcccttctcgccggctgcactggcattggcatcggtttctatggcaacagtgagaccagtgatggggtgtcccagctcagctctgcgctgctgcacgccaaccacacactcagcaccattgaccacctggtgttggagacggtggagaggctgggcgaggcggtgaggacagagctgaccaccctggaggaggtgctcgagccgcgcacggagctggtggctgccgcccgaggggctcgacggcaggcggaggctgcggcccagcagctgcaggggctggccttctggcagggagtgcccctgagccccctgcaggtggctgaaaatgtgtcctttgtggaggagtacaggtggctggcctatgtcctcctgctgctcctggagctgctggtctgcctcttcaccctcctgggcctggcgaagcagagcaagtggctggtgatcgtgatgacagtcatgagtctcctggttctcgtcctgagctggggctccatgggcctggaggcagccacggccgtgggcctcagtgacttctgctccaatccagacccttatgttctgaacctgacccaggaggagacagggctcagctcagacatcctgagctattatctcctctgcaaccgggccgtctccaaccccttccaacagaggctgactctgtcccagcgagctctggccaacatccactcccagctgctgggcctggagcgagaagctgtgcctcagttcccttcagcgcagaagcctctgctgtccttggaggagactctgaatgtgacagaaggaaatttccaccagttggtggcactgctacactgccgcagcctgcacaaggactatggtgcagccctgcggggcctgtgcgaagacgccctggaaggcctgctcttcctgctgctcttctccctgctgtctgcaggagcgctggccactgccctctgcagcctgccccgagcctgggccctcttcccacccaggaatccaagcgctttgtgcagtggcagtcgtctatctgagcccctcctcccggctggactggagcctggctcccctcttcgttccttccctggctgccggaggagaccccactaacccagcctgcctgggctctgaccactaacactcttggccatggacagcctgcacaggaccgcctccctgctcttggccactgtgctcccatttctgtccttggccttgggagtagctgagggggcagactagggagtagggctggcaggggagggggcagacagcctcgcctcgcacccttcatccctggctgccggtcccatccttggagggactaagctgggggtgggggacatgagtccccctgctgcccctgccacatcccagtgggctctgaccccctgatctcaactcgtggcactaacttggaaaagggttgatttaaaataaaagggaagactattttacaa

SEQ ID NO: 196610 - DNA, 2090 bp, Homo sapiens
  Payload ID: 18779
  Gene Name: tweety family member 1
  Uniprot ID: Q9H313
  ENST ID: ENST00000611711
  CDS Start-End: 128-1480
accccctgcctcccccccgctcccgctcccctgagcccagccagaccccgcgccgcccgcgccccgctcgactccggaggctcccgcagccccggcgtccgccccgctgccccctcccccgggggccatgggggcgcccccgggctaccggccctcagcttgggtgcatctcctccaccagctgccccgcgccgacttccagctccgcccggtgcccagcgttttcgcgccccaagagcaggaataccagcaggccttgttgctggtggcggccttggcgggcctgggcttgggcctgagcctcattttcatcgctgtctacctcatccgcttctgctgctgccggccccccgagccccccgggtccaagatcccctcgcccgggggaggctgcgtcacctggagctgcattgtcgcccttctcgccggctgcactggcattggcatcggtttctatggcaacagtgagaccagtgatggggtgtcccagctcagctctgcgctgctgcacgccaaccacacactcagcaccattgaccacctggtgttggagacggtggagaggctgggcgaggcggtgaggacagagctgaccaccctggaggaggtgctcgagccgcgcacggagctggtggctgccgcccgaggggctcgacggcaggcggaggctgcggcccagcagctgcaggggctggccttctggcagggagtgcccctgagccccctgcaggtggctgaaaatgtgtcctttgtggaggagtacaggtggctggcctacgtcctcctgctgctcctggagctgctggtctgcctcttcaccctcctgggcctggcgaagcagagcaagtggctggtgatcgtgatgacagtcatgagtctcctggttctcgtcctgagctggggctccatgggcctggaggcagccacggccgtgggcctcagtgacttctgctccaatccagacccttatgttctgaacctgacccaggaggagacagggctcagctcagacatcctgagctattatctcctctgcaaccgggccgtctccaaccccttccaacagaggctgactctgtcccagcgagctctggccaacatccactcccagctgctgggcctggagcgagaagctgtgcctcagttcccttcagcgcagaagcctctgctgtccttggaggagactctgaatgtgacagaaggaaatttccaccagttggtggcactgctacactgccgcagcctgcacaaggactatggtgcagccctgcggggcctgtgcgaagacgccctggaaggcctgctcttcctgctactcttctccctgctgtctgcaggagcgctggccactgccctctgcagcctgccccgagcctgggccctcttcccacccagtgacgactacgatgacacagacgatgacgaccctttcaaccctcaggaatccaagcgctttgtgcagtggcagtcgtctatctgagcccctcctcccggctggactggagcctggctcccctcttcgttccttccctggctgccggaggagaccccactaacccagcctgcctgggctctgaccactaacactcttggccatggacagcctgcacaggaccgcctccctgctcttggccactgtgctcccatttctgtccttggccttgggagtagctgagggggcagactagggagtagggctggcaggggagggggcagacagcctcgcctcgcacccttcatccctggctgccggtcccatccttggagggactaagctgggggtgggggacatgagtccccctgctgcccctgccacatcccagtgggctctgaccccctgatctcaactcgtggcactaacttggaaaagggttgatttaaaataaaagggaagactattttacaagcagctgggtcctccttatttctcctctcccttgattcggcctcctggccagggctgggacatcctccctgctgtcctctctcccccggcctcccagctgccaggaatttctgcgcctgtccaggctcagcaaggggtccaaagacattgttctttaaaaaaaaaaaaaaaaaaatcaaaaaac

SEQ ID NO: 196611 - DNA, 1760 bp, Homo sapiens
  Payload ID: 18779
  Gene Name: tweety family member 1
  Uniprot ID: Q9H313
  ENST ID: ENST00000614458
  CDS Start-End: 28-1410
gccccgctgccccctcccccgggggccatgggggcgcccccgggctaccggccctcagcttgggtgcatctcctccaccagctgccccgcgccgacttccagctccgcccggtgcccagcgttttcgcgccccaagagcaggaataccagcaggccttgttgctggtggcggccttggcgggcctgggcttgggcctgagcctcattttcatcgctgtctacctcatccgcttctgctgctgccggccccccgagccccccgggtccaagatcccctcgcccgggggaggctgcgtcacctggagctgcattgtcgcccttctcgccggctgcactggcattggcatcggtttctatggcaacagtgagaccagtgatggggtgtcccagctcagctctgcgctgctgcacgccaaccacacactcagcaccattgaccacctggtgttggagacggtggagaggctgggcgaggcggtgaggacagagctgaccaccctggaggaggtgctcgagccgcgcacggagctggtggctgccgcccgaggggctcgacggcaggcggaggctgcggcccagcagctgcaggggctggccttctggcagggagtgcccctgagccccctgcaggtggctgaaaatgtgtcctttgtggaggagtacaggtggctggcctacgtcctcctgctgctcctggagctgctggtctgcctcttcaccctcctgggcctggcgaagcagagcaagtggctggtgatcgtgatgacagtcatgagtctcctggttctcgtcctgagctggggctccatgggcctggaggcagccacggccgtgggcctcagtgacttctgctccaatccagacccttatgttctgaacctgacccaggaggagacagggctcagctcagacatcctgagctattatctcctctgcaaccgggccgtctccaaccccttccaacagaggctgactctgtcccagcgagctctggccaacatccactcccagctgctgggcctggagcgagaagctgtgcctcagttcccttcagcgcagaagcctctgctgtccttggaggagactctgaatgtgacagaaggaaatttccaccagttggtggcactgctacactgccgcagcctgcacaaggactatggtgcagccctgcggggcctgtgcgaagacgccctggaaggcctgctcttcctgctactcttctccctgctgtctgcaggagcgctggccactgccctctgcagcctgccccgagcctgggccctcttcccacccaggaatccaagcgctttgtgcagtggcagtcgtctatctgagcccctcctcccggctggactggagcctggctcccctcttcgttccttccctggctgccggaggagaccccactaacccagcctgcctgggctctgaccactaacactcttggccatggacagcctgcacaggaccgcctccctgctcttggccactgtgctcccatttctgtccttggccttgggagtagctgagggggcagactagggagtagggctggcaggggagggggcagacagcctcgcctcgcacccttcatccctggctgccggtcccatccttggagggactaagctgggggtgggggacatgagtccccctgctgcccctgccacatcccagtgggctctgaccccctgatctcaactcgtggcactaacttggaaaagggttgatttaaaataaaagggaagactattttacaa

SEQ ID NO: 196612 - DNA, 1760 bp, Homo sapiens; identical to SEQ ID NO: 196611
  Payload ID: 18779
  Gene Name: tweety family member 1
  Uniprot ID: Q9H313
  ENST ID: ENST00000611471
  CDS Start-End: 28-1410

SEQ ID NO: 196613 - DNA, 3490 bp, Homo sapiens
  Payload ID: 18780
  Gene Name: tweety family member 2
  Uniprot ID: Q9BSA4
  ENST ID: ENST00000269346
  CDS Start-End: 75-1679
gggcgggcacggggccccggccgggaggtgagcgcagctgtcgttcagcttgtgggtagcactcgggccgagccatgcaggcggcgcgcgtggactacatcgctccctggtgggtcgtgtggctgcacagcgtcccgcacgtcggcctgcgcctgcagcccgtgaacagcaccttcagccccggcgacgagagttaccaggagtcgctgctgttcctggggctggtggccgccgtctgcctgggcctgaacctcatcttccttgtggcttacctggtctgtgcatgccactgccggcgggacgatgcggtgcagaccaagcagcaccactcctgctgcatcacctggacggccgtggtggccgggctcatctgctgtgctgcggtgggcgttggtttctatggaaacagcgagaccaacgatggggcgtaccagctgatgtactccttggacgatgccaaccacaccttctctgggatcgatgctctggtttccggaactacccagaagatgaaggtggacctagagcagcacctggcccggctcagtgagatctttgctgcccggggcgattacctgcagaccctgaagttcatacagcagatggcgggcagcgttgttgttcagctctcaggactgcccgtgtggagggaggtcaccatggagctgaccaagctatccgaccagactggctacgtggagtactacaggtggctctcctacctcctgctctttatcctggacctggtcatctgcctcattgcctgcctgggactggccaagcgctccaagtgtctcctggcctcgatgctgtgctgtggggcactgagcctgctcctcagttgggcatccctggccgctgatggctctgcggcagtggccaccagtgacttctgtgtggctcctgacaccttcatcctgaacgtcacggagggccagatcagcacagaggtgactcgctactacctgtattgcagccagagtggaagcagccccttccagcagaccctgaccaccttccagcgcgcacttaccaccatgcagatccaggtcgcggggctgctgcagtttgccgtgcccctcttctccactgcagaggaagacctgcttgcaatccagctcctgctgaactcctcagagtccagccttcaccagctgaccgccatggtggactgccgagggctgcacaaggattatctggacgctcttgctggcatctgctacgacggcctccagggcttgctgtaccttggcctcttctccttcctggccgccctcgccttctccaccatgatctgtgcagggccaagggcctggaagcacttcaccaccagaaacagagactacgatgacattgatgatgatgacccctttaacccccaagcctggcgcatggcggctcacagtcccccgaggggacagcttcacagcttctgcagctacagcagtggcctgggaagtcagaccagcctgcagcccccggcccagaccatctccaacgcccctgtctccgagtacatgaaccaagccatgctctttggtaggaacccacgctacgagaacgtgccactaatcgggagagcctcccctccgcctacgtactctcccagcatgagagccacctacctgtctgtggcggatgagcacctgaggcactacgggaatcagtttccagcctaacagactttcgggggttcctgcctcctttttccgttctggtttttaattagtgcaaatacaagctgcgtttctttaatagaaaccaaaggcatctggagcccgagaggcctcctgctgtggcagaggagcagctgggattcccgaccaaagccccagggggtgcagaagactcaccacgcgggccagcctctctcttttgccctgctctccacaccagaaatgcccccaggtgcttggctgcctcagaggtaccatccctgagctggctgcctggccctgctcacccctacgcctcgcccttgccaggaggggagtggcagtgaggagggggccaggtcaggcaccaccatcaagagagctgtgtgttctctctggtcccacaacgatgactctgcctcttgtcagcccagccaagagcccagacgacccctctgtcctcgttccctgtcctcgttccctgcaggtaacatgagaagggctgatcaggagatgctctttaagaagttcgcacccctgctgacaccagaacagcccaaatcagagttcccagggccagacaggctcttcctgggccacagaggggaggcatcaggaaagctctgcagtggggggctggtggctccggggctgggggatcacaggctggtgaaccccggtgggaacagaggtgaaagcctgccacattccgcctgtctccctaaccctccattgcctcgcctctattccagaatcaatgctgcagaatgtgttagctgcagataggcatggtctcaggtatgaacagacactttgaaacgactttaggtctttcttttctccagtgttttaaacatgttgattatccaaagaattgaaactcctagcacatccagtttttacaacagatttgcagctcattccttaccctggttaggtcactacttttgcagattttgctggcactgatctggagatctgcagatctggaggagacgggaaggagtcgattcttaaataaggatcagtgaggcatcctgtcccaagctactgtttggtggggatctgggttcatctcacccacagagggaggatctttaagaggagaaaaaagccaagagggaaagccagagttccctgttctaggggactagccaaatgcctacatcagctgtcccctccctgttgtctccaagtaagtttgccagaaaaggttttagcaaagtgctacaactgtgtctttataggaggataggcctctgccctgccccacccccaccacctgtccccacccagtgtcccaggccacaggagcttattggccaggagggaataatgtcccccaatactgcctgttgagggaccagagttggggtctttggtgcttccaacctcctgccaacctggagttcacaacaccagagccccacggcctcgcacactgaagcaggggcgtgcggtgactcggtgcttctgttttggaagaaccacctgtcatcaaaacatggacagcagggtgttctcagctcccagcgaagcctccacaacagaatggggccacagggcagccgggactccctgtctcacctacattaacccatgcatactgtatgccataaactcactttggtatatccgcgtcacatgcagagaggaactctgcgacgtcaaagtgttgcttcttaaagtttcattattggcaactagagggttgtttttaatgcatggaaactaaacagattcctcggggagttcctgaaggaaccaggtgggcaaacctttgcttatatacatgcggcctcacctggaagagaaataaaccacttgtactaaaa

SEQ ID NO: 196614 - DNA, 3661 bp, Homo sapiens
  Payload ID: 18780
  Gene Name: tweety family member 2
  Uniprot ID: Q9BSA4
  ENST ID: ENST00000441391
  CDS Start-End: 1213-1854
accgtaagtgctgtgatgcactaacctctaggtgctagaaccctgcacggcactgagtaagtactccataaatgtctatcaacttagcaagttagtgagtgatgctctattgtggacccctgaggcagtggctcctgaaggaggacggggccaccggcagagcagggcactcagaggggtcccctgcccggggagcatgtgccagaggagggggacatccctaaggaacaggccagaggacctgagctctccctggctgctctggaaggcggaggccccccagtttatccagtccctagagcaccccaggccagatctggggtgcgcctggcttggaggccatgtccttgctgccgcctctcctggggcctgcgtctgctcccaccctgccgcatgggccttagcaatcacttagccaggccgtgctgtggggccaggtcctccagctcataagtggcagccgcctctcagctccatgcccttcccaccccatgtcttggcaggtgagcacctgcacccaaggctcacagatgcttcagcaccaacctcattctttagaaagagtttgggggaggcttcatagattgaacacccgtccctgtagcacttgatcatagcaagacaaaatgtaaaacagcagatgaggccatggtgtaacgaactcccacacacacagcctgcagctgccctggggcccaggatgctggcccccaaaggtctgtcccagaagaggcattcgggaataagagtaacagcatgcgctctgccccagtcacttttctgagcactttacttgcattgggtgaatagcattatcatctccatgtcacagatgaggcaaccggggcacaggaagaataagtaacttgtccaaggcaacagagctaggaaggggcagagccaggtttgaacccaggaggctggctccagactgtcctttgccacctgggagggagctcaaggggctggggtgatgggctcccggctcctcccagggccccgctgtcctgatacctgattttcctccaccccgtccctctctccctcactcaggccaccagtgacttctgtgtggctcctgacaccttcatcctgaacgtcacggagggccagatcagcacagaggtgactcgctactacctgtattgcagccagagtggaagcagccccttccagcagaccctgaccaccttccagcgcgcacttaccaccatgcagatccaggtcgcggggctgctgcagtttgccgtgcccctcttctccactgcagaggaagacctgcttgcaatccagctcctgctgaactcctcagagtccagccttcaccagctgaccgccatggtggactgccgagggctgcacaaggattatctggacgctcttgctggcatctgctacgacggcctccagggcttgctgtaccttggcctcttctccttcctggccgccctcgccttctccaccatgatctgtgcagggccaagggcctggaagcacttcaccaccagaaacagagactacgatgacattgatgatgatgacccctttaacccccaagcctggcgcatggcggctcacagtcccccgaggggacagcttcacagcttctgcagctacagcagtggcctgggaagtcagaccagcctgcagcccccggcccagaccatctccaacgcccctgtctccgagtacatgaaccaagccatgctctttggtaggaacccacgctacgagaacgtgccactaatcgggagagcctcccctccgcctacgtactctcccagcatgagagccacctacctgtctgtggcggatgagcacctgaggcactacgggaatcagtttccagcctaacagactttcgggggttcctgcctcctttttccgttctggtttttaattagtgcaaatacaagctgcgtttctttaatagaaaccaaaggcatctggagcccgagaggcctcctgctgtggcagaggagcagctgggattcccgaccaaagccccagggggtgcagaagactcaccacgcgggccagcctctctcttttgccctgctctccacaccagaaatgcccccaggtgcttggctgcctcagaggtaccatccctgagctggctgcctggccctgctcacccctacgcctcgcccttgccaggaggggagtggcagtgaggagggggccaggtcaggcaccaccatcaagagagctgtgtgttctctctggtcccacaacgatgactctgcctcttgtcagcccagccaagagcccagacgacccctctgtcctcgttccctgtcctcgttccctgcaggtaacatgagaagggctgatcaggagatgctctttaagaagttcgcacccctgctgacaccagaacagcccaaatcagagttcccagggccagacaggctcttcctgggccacagaggggaggcatcaggaaagctctgcagtggggggctggtggctccggggctgggggatcacaggctggtgaaccccggtgggaacagaggtgaaagcctgccacattccgcctgtctccctaaccctccattgcctcgcctctattccagaatcaatgctgcagaatgtgttagctgcagataggcatggtctcaggtatgaacagacactttgaaacgactttaggtctttcttttctccagtgttttaaacatgttgattatccaaagaattgaaactcctagcacatccagtttttacaacagatttgcagctcattccttaccctggttaggtcactacttttgcagattttgctggcactgatctggagatctgcagatctggaggagacgggaaggagtcgattcttaaataaggatcagtgaggcatcctgtcccaagctactgtttggtggggatctgggttcatctcacccacagagggaggatctttaagaggagaaaaaagccaagagggaaagccagagttccctgttctaggggactagccaaatgcctacatcagctgtcccctccctgttgtctccaagtaagtttgccagaaaaggttttagcaaagtgctacaactgtgtctttataggaggataggcctctgccctgccccacccccaccacctgtccccacccagtgtcccaggccacaggagcttattggccaggagggaataatgtcccccaatactgcctgttgagggaccagagttggggtctttggtgcttccaacctcctgccaacctggagttcacaacaccagagccccacggcctcgcacactgaagcaggggcgtgcggtgactcggtgcttctgttttggaagaaccacctgtcatcaaaacatggacagcagggtgttctcagctcccagcgaagcctccacaacagaatggggccacagggcagccgggactccctgtctcacctacattaacccatgcatactgtatgccataaactcactttggtatatccgcgtcacatgcagagaggaactctgcgacgtcaaagtgttgcttcttaaagtttcattattggcaactagagggttgtttttaatgcatggaaactaaacagattcctcggggagttcctgaaggaaccaggtgggcaaacctttgcttatatacatgcggcctcacctggaagagaaataaaccacttgtact

SEQ ID NO: 196615 - DNA, 2015 bp, Homo sapiens
  Payload ID: 18780
  Gene Name: tweety family member 2
  ENST ID: ENST00000529107
  CDS Start-End: 32-1573
cctcaccaccactcagatcgctgagtaggagatgagcgtggtgggccaggaccggaagtctggctctgggtgttatttaaggtggctcctgtttttgtcgctgctgttcctggggctggtggccgccgtctgcctgggcctgaacctcatcttccttgtggcttacctggtctgtgcatgccactgccggcgggacgatgcggtgcagaccaagcagcaccactcctgctgcatcacctggacggccgtggtggccgggctcatctgctgtgctgcggtgggcgttggtttctatggaaacagcgagaccaacgatggggcgtaccagctgatgtactccttggacgatgccaaccacaccttctctgggatcgatgctctggtttccggaactacccagaagatgaaggtggacctagagcagcacctggcccggctcagtgagatctttgctgcccggggcgattacctgcagaccctgaagttcatacagcagatggcgggcagcgttgttgttcagctctcaggactgcccgtgtggagggaggtcaccatggagctgaccaagctatccgaccagactggctacgtggagtactacaggtggctctcctacctcctgctctttatcctggacctggtcatctgcctcattgcctgcctgggactggccaagcgctccaagtgtctcctggcctcgatgctgtgctgtggggcactgagcctgctcctcagttgggcatccctggccgctgatggctctgcggcagtggccaccagtgacttctgtgtggctcctgacaccttcatcctgaacgtcacggagggccagatcagcacagaggtgactcgctactacctgtattgcagccagagtggaagcagccccttccagcagaccctgaccaccttccagcgcgcacttaccaccatgcagatccaggtcgcggggctgctgcagtttgccgtgcccctcttctccactgcagaggaagacctgcttgcaatccagctcctgctgaactcctcagagtccagccttcaccagctgaccgccatggtggactgccgagggctgcacaaggattatctggacgctcttgctggcatctgctacgacggcctccagggcttgctgtaccttggcctcttctccttcctggccgccctcgccttctccaccatgatctgtgcagggccaagggcctggaagcacttcaccaccagaaacagagactacgatgacattgatgatgatgacccctttaacccccaagcctggcgcatggcggctcacagtcccccgaggggacagcttcacagcttctgcagctacagcagtggcctgggaagtcagaccagcctgcagcccccggcccagaccatctccaacgcccctgtctccgagtacatgaaccaagccatgctctttggtaggaacccacgctacgagaacgtgccactaatcgggagagcctcccctccgcctacgtactctcccagcatgagagccacctacctgtctgtggcggatgagcacctgaggcactacgggaatcagtttccagcctaacagactttcgggggttcctgcctcctttttccgttctggtttttaattagtgcaaatacaagctgcgtttctttaatagaaaccaaaggcatctggagcccgagaggcctcctgctgtggcagaggagcagctgggattcccgaccaaagccccagggggtgcagaagactcaccacgcgggccagcctctctcttttgccctgctctccacaccagaaatgcccccaggtgcttggctgcctcagaggtaccatccctgagctggctgcctggccctgctcacccctacgcctcgcccttgccaggaggggagtggcagtgaggagggggccaggtcaggcaccaccatcaagagagctgtgtgttctctctggtcccacaacgatgactctgcctcttgtcagcccagccaagagcccagacgacccctctgtcctcgtt

SEQ ID NO: 196616 - DNA, 532 bp, Homo sapiens
  Payload ID: 18780
  Gene Name: tweety family member 2
  ENST ID: ENST00000528128
  CDS Start-End: 1-415
gtggctctcctacctcctgctctttatcctggacctggtcatctgcctcattgcctgcctgggactggccaagcgctccaagtgtctcctggcctcgatgctgtgctgtggggcactgagcctgctcctcagttgggcatccctggccgctgatggctctgcggcagtggccaccagtgacttctgtgtggctcctgacaccttcatcctgaacgtcacggagggccagatcagcacagaggtgactcgctactacctgtattgcagccagagtggaagcagccccttccagcagaccctgaccaccttccagcgcgcacttaccaccatgcagatccaggtcgcggggctgctgcagtttgccgtgcccctcttctccactgcagagacctgcttgcaatccagctcctgctgaactcctcagagtccagccttcaccagctgaccgccatggtggactgccgagggctgcacaaggattatctggacgctcttgctggcatctgctacgacggcctccagggcttgctgt

SEQ ID NO: 196617 - DNA, 797 bp, Homo sapiens
  Payload ID: 18780
  Gene Name: tweety family member 2
  ENST ID: ENST00000526858
  CDS Start-End: 1-414
gcacttaccaccatgcagatccaggtcgcggggctgctgcagtttgccgtgcccctcttctccactgcagaggaagacctgcttgcaatccagctcctgctgaactcctcagagtccagccttcaccagctgaccgccatggtggactgccgagggctgcacaaggccaagcctgtcccctttgccccctcttctcaaggtgtgctgcttcttgccatcctggcctcagcttcagtgcccccgtctctggttccccaccctgcaacctcctccgccctgttcagagccagcttcttagtgcccagctcacagattatctggacgctcttgctggcatctgctacgacggcctccagggcttgctgtaccttggcctcttctccttcctggccgccctcgccttctccaccatgatctgtgcagggccaagggcctggaagcacttcaccaccagaaacagagactacgatgacattgatgatgatgacccctttaacccccaagcctggcgcatggcggctcacagtcccccgaggggacagcttcacagcttctgcagctacagcagtggcctgggaagtcagaccagcctgcagcccccggcccagaccatctccaacgcccctgtctccgagtacatgaaccaagccatgctctttggtaggaacccacgctacgagaacgtgccactaatcgggagagcctcccctccgcctacgtactctcccagcatgagagccacctacctgtctgtggcggatgagcacctgaggcactacgggaatcagtttccagcc

SEQ ID NO: 196618 - DNA, 4840 bp, Homo sapiens
  Payload ID: 18781
  Gene Name: tweety family member 3
  Uniprot ID: Q9C0H2
  ENST ID: ENST00000258796
  CDS Start-End: 206-1777
cggcgaacaaagaggcggcgggcgcgggcggccgagcggagccgagcgcagccgagccgggccgagccgggccgggccgggcccaggagcgcgcggatgatgcgggcggccaggcgggggtcgacgggtccctgaagcccgcgccccgggccagcaagggagccccgcgcaggccgcgcgcatccggaggcggccgggccccgccatggccggggtcagctacgcggcgccctggtgggtgagcctcctgcaccggctgccccacttcgacctgagctgggaggccactagcagccagttccggcccgaggacaccgactaccagcaggccctgctgctcctgggggccgccgccctggcctgcctcgccctggacctcctcttcctgctcttctactccttctggctgtgctgccggcggcgcaagagcgaggagcacctggacgccgactgctgctgcacggcctggtgtgtcatcatcgccacgctggtgtgcagcgccggcatcgcagtgggattctacggcaacggggagaccagtgatggcatccatagggccacctactcgctccgccacgccaaccgcacggtggccggggtccaggaccgcgtgtgggacacggcggtggggctgaaccacacggcggagcccagcctgcagaccctggagcggcagctggccgggcggcccgagcccctgcgagccgtacagaggctgcagggcctgctggagacgctgctgggctacacggccgccatccccttttggaggaacacggcggtgtcgctggaggtgctggcggagcaggtggatctctacgactggtacaggtggctgggctacctgggcctgctgctgctggacgtcatcatctgcctcctggtgctggttggcctcatccgcagctccaagggcatcctggtgggggtctgcctgctgggagtcctggccctggtcatcagctggggcgcgctgggcttggagctggctgtgtccgtgggctccagcgacttctgtgtggaccctgacgcctacgtgaccaaaatggtggaggagtactcggtgctgagtggggacatcctgcagtactacctggcctgctcgccccgcgccgccaaccccttccagcagaagctgtcgggcagccacaaggcactggtggagatgcaggatgtcgtggctgagcttctgaggaccgtcccctgggagcagccggccactaaggaccccctcctccgcgtccaggaggtgctgaatggcacggaggtgaacctgcagcacctcaccgccctggtggactgccgcagcctgcatctggactacgtgcaagcgctgaccggcttctgctatgacggcgtggagggcctcatctacctggccctcttctccttcgtcacagccctcatgttcagctccatcgtctgcagcgtcccgcacacctggcagcaaaagagaggccctgatgaggacggggaggaggaggccgctccagggccgcggcaggcgcacgacagcctctaccgcgtccacatgcccagcctgtacagctgtggcagcagctacggcagtgagaccagcatcccggccgcggcccacaccgtcagcaacgccccggtcactgagtacatgagccagaacgctaatttccagaacccccgctgtgagaacaccccactcattgggcgcgagtccccgccgccctcatacacctccagcatgagagccaaatacctcgccacgagccagcctcgccctgactccagcggcagccactagaccgcgcccggcagccacccaccccacgtgccaacttcccctccccgtgccagcactgccgcttccacctgggccacccaccggaccctcgcacgccgtgccaggcctgccccagacgcgtctgcaggccgcttgccctcctgtcccctccccgcaggggcacagtggagacgcaggggctctgggcccgtaccgccaactcgggtcacacctgaacgctgctgccagccgatgccccagccctgcacgccacccactatcccggcacgctccctctgcagatggtcgccgcacctacaagccctggccgcacccaacctgtgttgttgccgcccggcccttccctccacagctctccttcctcccgcccggcacttctgtggaccccttcttagttcacaggcacggctggggccgctctgtgctggcgcctgctggccactgagggacagggacacgtgccacctgctcatctctgccctgaggtcaccccgtggtccctccacgtgcccatctctctgcagtgccctcctcgcctgtgcagcccgcccacccacaggctcacccctcctgccggctgccagaggccccctccagcagggcctctctccgttgccccagcttcactctctccctcagcacctgccctgctggaggccccagccctccgtggacagcaggggccacgtggagcccgggccgctcacccgccacccagtgctggccgccttcttggtgccaaacccccttcccccacccagagactgggcagctgtgtctggttcgttctttgcactaaccacatttgtcatctctagggcaggctggggctgcgggctgagggggaccgctggcaccccccttccctcccttcttggttccatttccatccatgacaggtacagcatcccaggagcccggcctgaggggctggacccgagccggctgtgaacatccctcagcccctgctgtccccccttgggactaaccactaacctcacccccaaactccacgggtgcccctagctggcccagagccggcagtgtgagcccaagtccgggctggagccgaggccggagcagctgtctgggagtcaaggctgcagtagcgtttcttcatggggtgctccagggggtgccacagaccgacaggcagcccaagggcctggacacccctccccaggcaggtgctgccccaggaggactgtcctcgggaatgaacctcccgcgggctttggactgaggtccctgtggcctcggtctcctccccatgaagtgggagcgaggctccccaatggtgcttttggctttagtgtacgatgtttgctgtgcttcccgccgtggagggcagagccaccccacatcaggatcggacgtgctacccctcccggtcccggccctggcccagccagcccagccctcgaggctcgatgcctgtgccaaggccaggggcagccagagggcagctggatggccacgtgcaggggtcaaggctgggccctgcagtggggcgggccgccagccccagcagtttacagacgcatggctcttcctcccagagcagccggcagctacctggaccggaaatgtcctcatcccctccctggggccaggctctgccctggccttcctctgtgaacccctcctttctttgtgctggtgtctgggaccaaaaagggggaatatgggagggcagagtggggaggggagtccatgggcctggggccccaagccggggcgtctgagctccccaggcatgaccaaacctcagtggaggggcctctgcttcaggccccgcctggctgacattctgagcccccctcggaggccccgccacagccaacctgcccagtctttcctctgggcttgacccgccaggggagttctccaggcctagggccaggagagaggccctggcaccctggcgtgggtgcccgccaaacgccctgcgaccgctcagaagcacaaatgctgtccatggccgtgaggctgcctgccaggtgaatggacatagcgtgagaggcggtgaggccagggcttccagcctcgtgctgtctcgggactcctgaccgtggtgtgcgtgtgtgcccgtctgtgactttctactcaccaaggttgaagaaaggaaacggggaaaatcaaaaggggttcaaaccccacctcagtaggtggaggggagcgcctgccattggttgtatttttgttctgagttttcggtgccgtgttcctaactactccatcccatgacctcgccacacctactggggcatctggctggtgcctgctgccatggccagcccccactctcaccctgcacagggggtcttgcagcccccaggcccacagcctcgttgggaggacagggtggccctggggacaagagggaggagcccaggggcttacctcactgagagtgctccccagcaggcatccactaccccagggccccccacatgtcatggcaaggttggtagtgaatgggcctggttgggagcagcccctggcccattgcccacccacccatctcactatgcaattcgagttccaagcaacatttgctcctgccctggggccagctctgccccagccctgagaggggtggtgaggcagccccctggaccccagaaccccagacaagggggcaggcgggggaccagggcctctcctgtgggatctttgttttgtgtttaaccataatggttgtgtactgaaccacttcatatttgttatatataatatatatatatataatctccttaagactcagcctcctggtttacccccccggcctgggcatctgacctcccccaccccagtgtgatttaacatccaggaactgaggcctgaaccattttgcatttccccctcctccagcctctgtagggccatggctgtatgtactgtcgctgtgtttttttgtttttttagaactgggtttgggggctgatttttatttctttgggggctttttttcttggcaaatactaaaaatctcgtcaatgtaatttctgtggtttctattcagcttgggtttcatgttttaaaataaattttaaaaagcaa

SEQ ID NO: 196619 - DNA, 560 bp, Homo sapiens
  Payload ID: 18781
  Gene Name: tweety family member 3
  ENST ID: ENST00000400376
  CDS Start-End: 212-560
cttttgtgttcagagacctggggagagccacactggaaggccgtgcttggagccagacagggctgtgtgtccgatggggcgcctgtatgcagcctgtagcagtgtggggccagccccaccatctcatccagcgtgggggcacgccatggacggtgcccacccctgagtgcagcttctcggtgcacagaccccagacaggatcagactcctgatggggcctcttccatgttcacccctcagaaacactttcatggtcagcaagagggggttcagtcccccacaggctcccaatttccctaccagacctgaaaacctcaggactacagctggggtgggggatcctgccaggactcaggccctgctgctcctgggggccgccgccctggcctgcctcgccctggacctcctcttcctgctcttctactccttctggctgtgctgccggcggcgcaagagcgaggagcacctggacgccgactgctgctgcacggcctggtgtgtcatcatcgccacgctggtgtgcagcgccggcatcgcagtgggattctacggcaacgggg

SEQ ID NO: 196620 - DNA, 4263 bp, Homo sapiens
  Payload ID: 18781
  Gene Name: tweety family member 3
  Uniprot ID: Q9C0H2
  ENST ID: ENST00000403167
  CDS Start-End: 144-1202
tttgctctcagcacctagtacatgaggcctgatgggcagggtgtggcccagggccactggaggtcacaggcagtggctggagttcccctaatgggagcctttctcaagaactgacaccagtccccatgacccagacgctctgaatgccctctggggtgccaggctgctggcctcagctccccctcaagggcccctggcgccccactcccaggccccgggtccctgtgccctggcgcactcccaggtttgcctgcaggtggctgggctacctgggcctgctgctgctggacgtcatcatctgcctcctggtgctggttggcctcatccgcagctccaagggcatcctggtgggggtctgcctgctgggagtcctggccctggtcatcagctggggcgcgctgggcttggagctggctgtgtccgtgggctccagcgacttctgtgtggaccctgacgcctacgtgaccaaaatggtggaggagtactcggtgctgagtggggacatcctgcagtactacctggcctgctcgccccgcgccgccaaccccttccagcagaagctgtcgggcagccacaaggcactggtggagatgcaggatgtcgtggctgagcttctgaggaccgtcccctgggagcagccggccactaaggaccccctcctccgcgtccaggaggtgctgaatggcacggaggtgaacctgcagcacctcaccgccctggtggactgccgcagcctgcatctggactacgtgcaagcgctgaccggcttctgctatgacggcgtggagggcctcatctacctggccctcttctccttcgtcacagccctcatgttcagctccatcgtctgcagcgtcccgcacacctggcagcaaaagagaggccctgatgaggacggggaggaggaggccgctccagggccgcggcaggcgcacgacagcctctaccgcgtccacatgcccagcctgtacagctgtggcagcagctacggcagtgagaccagcatcccggccgcggcccacaccgtcagcaacgccccggtcactgagtacatgagccagaacgctaatttccagaacccccgctgtgagaacaccccactcattgggcgcgagtccccgccgccctcatacacctccagcatgagagccaaatacctcgccacgagccagcctcgccctgactccagcggcagccactagaccgcgcccggcagccacccaccccacgtgccaacttcccctccccgtgccagcactgccgcttccacctgggccacccaccggaccctcgcacgccgtgccaggcctgccccagacgcgtctgcaggccgcttgccctcctgtcccctccccgcaggggcacagtggagacgcaggggctctgggcccgtaccgccaactcgggtcacacctgaacgctgctgccagccgatgccccagccctgcacgccacccactatcccggcacgctccctctgcagatggtcgccgcacctacaagccctggccgcacccaacctgtgttgttgccgcccggcccttccctccacagctctccttcctcccgcccggcacttctgtggaccccttcttagttcacaggcacggctggggccgctctgtgctggcgcctgctggccactgagggacagggacacgtgccacctgctcatctctgccctgaggtcaccccgtggtccctccacgtgcccatctctctgcagtgccctcctcgcctgtgcagcccgcccacccacaggctcacccctcctgccggctgccagaggccccctccagcagggcctctctccgttgccccagcttcactctctccctcagcacctgccctgctggaggccccagccctccgtggacagcaggggccacgtggagcccgggccgctcacccgccacccagtgctggccgccttcttggtgccaaacccccttcccccacccagagactgggcagctgtgtctggttcgttctttgcactaaccacatttgtcatctctagggcaggctggggctgcgggctgagggggaccgctggcaccccccttccctcccttcttggttccatttccatccatgacaggtacagcatcccaggagcccggcctgaggggctggacccgagccggctgtgaacatccctcagcccctgctgtccccccttgggactaaccactaacctcacccccaaactccacgggtgcccctagctggcccagagccggcagtgtgagcccaagtccgggctggagccgaggccggagcagctgtctgggagtcaaggctgcagtagcgtttcttcatggggtgctccagggggtgccacagaccgacaggcagcccaagggcctggacacccctccccaggcaggtgctgccccaggaggactgtcctcgggaatgaacctcccgcgggctttggactgaggtccctgtggcctcggtctcctccccatgaagtgggagcgaggctccccaatggtgcttttggctttagtgtacgatgtttgctgtgcttcccgccgtggagggcagagccaccccacatcaggatcggacgtgctacccctcccggtcccggccctggcccagccagcccagccctcgaggctcgatgcctgtgccaaggccaggggcagccagagggcagctggatggccacgtgcaggggtcaaggctgggccctgcagtggggcgggccgccagccccagcagtttacagacgcatggctcttcctcccagagcagccggcagctacctggaccggaaatgtcctcatcccctccctggggccaggctctgccctggccttcctctgtgaacccctcctttctttgtgctggtgtctgggaccaaaaagggggaatatgggagggcagagtggggaggggagtccatgggcctggggccccaagccggggcgtctgagctccccaggcatgaccaaacctcagtggaggggcctctgcttcaggccccgcctggctgacattctgagcccccctcggaggccccgccacagccaacctgcccagtctttcctctgggcttgacccgccaggggagttctccaggcctagggccaggagagaggccctggcaccctggcgtgggtgcccgccaaacgccctgcgaccgctcagaagcacaaatgctgtccatggccgtgaggctgcctgccaggtgaatggacatagcgtgagaggcggtgaggccagggcttccagcctcgtgctgtctcgggactcctgaccgtggtgtgcgtgtgtgcccgtctgtgactttctactcaccaaggttgaagaaaggaaacggggaaaatcaaaaggggttcaaaccccacctcagtaggtggaggggagcgcctgccattggttgtatttttgttctgagttttcggtgccgtgttcctaactactccatcccatgacctcgccacacctactggggcatctggctggtgcctgctgccatggccagcccccactctcaccctgcacagggggtcttgcagcccccaggcccacagcctcgttgggaggacagggtggccctggggacaagagggaggagcccaggggcttacctcactgagagtgctccccagcaggcatccactaccccagggccccccacatgtcatggcaaggttggtagtgaatgggcctggttgggagcagcccctggcccattgcccacccacccatctcactatgcaattcgagttccaagcaacatttgctcctgccctggggccagctctgccccagccctgagaggggtggtgaggcagccccctggaccccagaaccccagacaagggggcaggcgggggaccagggcctctcctgtgggatctttgttttgtgtttaaccataatggttgtgtactgaaccacttcatatttgttatatataatatatatatatataatctccttaagactcagcctcctggtttacccccccggcctgggcatctgacctcccccaccccagtgtgatttaacatccaggaactgaggcctgaaccattttgcatttccccctcctccagcctctgtagggccatggctgtatgtactgtcgctgtgtttttttgtttttttagaactgggtttgggggctgatttttatttctttgggggctttttttcttggcaaatactaaaaatctcgtcaatgtaatttctgtggtttctattcagcttgggtttcatgttttaaaataaattttaaaaagc

SEQ ID NO: 196621 - DNA, 4537 bp, Homo sapiens
  Payload ID: 18781
  Gene Name: tweety family member 3
  Uniprot ID: Q9C0H2
  ENST ID: ENST00000407643
  CDS Start-End: 1-1476
atggccggggtcagctacgcggcgccctggtgggtgagcctcctgcaccggctgccccacttcgacctgagctgggaggccactagcagccagttccggcccgaggacaccgactaccagcaggccctgctgctcctgggggccgccgccctggcctgcctcgccctggacctcctcttcctgctcttctactccttctggctgtgctgccggcggcgcaagagcgaggagcacctggacgccgactgctgctgcacggcctggtgtgtcatcatcgccacgctggtgtgcagcgccggcatcgcagtgggattctacggcaacggggagaccagtgatggcatccatagggccacctactcgctccgccacgccaaccgcacggtggccggggtccaggaccgcgtgtgggacacggcggtggggctgaaccacacggcggagcccagcctgcagaccctggagcggcagctggccgggcggcccgagcccctgcgagccgtacagaggctgcagggcctgctggagacgctgctgggctacacggccgccatccccttttggaggaacacggcggtgtcgctggaggtgctggcggagcaggtggatctctacgactggtacagggtctgcctgctgggagtcctggccctggtcatcagctggggcgcgctgggcttggagctggctgtgtccgtgggctccagcgacttctgtgtggaccctgacgcctacgtgaccaaaatggtggaggagtactcggtgctgagtggggacatcctgcagtactacctggcctgctcgccccgcgccgccaaccccttccagcagaagctgtcgggcagccacaaggcactggtggagatgcaggatgtcgtggctgagcttctgaggaccgtcccctgggagcagccggccactaaggaccccctcctccgcgtccaggaggtgctgaatggcacggaggtgaacctgcagcacctcaccgccctggtggactgccgcagcctgcatctggactacgtgcaagcgctgaccggcttctgctatgacggcgtggagggcctcatctacctggccctcttctccttcgtcacagccctcatgttcagctccatcgtctgcagcgtcccgcacacctggcagcaaaagagaggccctgatgaggacggggaggaggaggccgctccagggccgcggcaggcgcacgacagcctctaccgcgtccacatgcccagcctgtacagctgtggcagcagctacggcagtgagaccagcatcccggccgcggcccacaccgtcagcaacgccccggtcactgagtacatgagccagaacgctaatttccagaacccccgctgtgagaacaccccactcattgggcgcgagtccccgccgccctcatacacctccagcatgagagccaaatacctcgccacgagccagcctcgccctgactccagcggcagccactagaccgcgcccggcagccacccaccccacgtgccaacttcccctccccgtgccagcactgccgcttccacctgggccacccaccggaccctcgcacgccgtgccaggcctgccccagacgcgtctgcaggccgcttgccctcctgtcccctccccgcaggggcacagtggagacgcaggggctctgggcccgtaccgccaactcgggtcacacctgaacgctgctgccagccgatgccccagccctgcacgccacccactatcccggcacgctccctctgcagatggtcgccgcacctacaagccctggccgcacccaacctgtgttgttgccgcccggcccttccctccacagctctccttcctcccgcccggcacttctgtggaccccttcttagttcacaggcacggctggggccgctctgtgctggcgcctgctggccactgagggacagggacacgtgccacctgctcatctctgccctgaggtcaccccgtggtccctccacgtgcccatctctctgcagtgccctcctcgcctgtgcagcccgcccacccacaggctcacccctcctgccggctgccagaggccccctccagcagggcctctctccgttgccccagcttcactctctccctcagcacctgccctgctggaggccccagccctccgtggacagcaggggccacgtggagcccgggccgctcacccgccacccagtgctggccgccttcttggtgccaaacccccttcccccacccagagactgggcagctgtgtctggttcgttctttgcactaaccacatttgtcatctctagggcaggctggggctgcgggctgagggggaccgctggcaccccccttccctcccttcttggttccatttccatccatgacaggtacagcatcccaggagcccggcctgaggggctggacccgagccggctgtgaacatccctcagcccctgctgtccccccttgggactaaccactaacctcacccccaaactccacgggtgcccctagctggcccagagccggcagtgtgagcccaagtccgggctggagccgaggccggagcagctgtctgggagtcaaggctgcagtagcgtttcttcatggggtgctccagggggtgccacagaccgacaggcagcccaagggcctggacacccctccccaggcaggtgctgccccaggaggactgtcctcgggaatgaacctcccgcgggctttggactgaggtccctgtggcctcggtctcctccccatgaagtgggagcgaggctccccaatggtgcttttggctttagtgtacgatgtttgctgtgcttcccgccgtggagggcagagccaccccacatcaggatcggacgtgctacccctcccggtcccggccctggcccagccagcccagccctcgaggctcgatgcctgtgccaaggccaggggcagccagagggcagctggatggccacgtgcaggggtcaaggctgggccctgcagtggggcgggccgccagccccagcagtttacagacgcatggctcttcctcccagagcagccggcagctacctggaccggaaatgtcctcatcccctccctggggccaggctctgccctggccttcctctgtgaacccctcctttctttgtgctggtgtctgggaccaaaaagggggaatatgggagggcagagtggggaggggagtccatgggcctggggccccaagccggggcgtctgagctccccaggcatgaccaaacctcagtggaggggcctctgcttcaggccccgcctggctgacattctgagcccccctcggaggccccgccacagccaacctgcccagtctttcctctgggcttgacccgccaggggagttctccaggcctagggccaggagagaggccctggcaccctggcgtgggtgcccgccaaacgccctgcgaccgctcagaagcacaaatgctgtccatggccgtgaggctgcctgccaggtgaatggacatagcgtgagaggcggtgaggccagggcttccagcctcgtgctgtctcgggactcctgaccgtggtgtgcgtgtgtgcccgtctgtgactttctactcaccaaggttgaagaaaggaaacggggaaaatcaaaaggggttcaaaccccacctcagtaggtggaggggagcgcctgccattggttgtatttttgttctgagttttcggtgccgtgttcctaactactccatcccatgacctcgccacacctactggggcatctggctggtgcctgctgccatggccagcccccactctcaccctgcacagggggtcttgcagcccccaggcccacagcctcgttgggaggacagggtggccctggggacaagagggaggagcccaggggcttacctcactgagagtgctccccagcaggcatccactaccccagggccccccacatgtcatggcaaggttggtagtgaatgggcctggttgggagcagcccctggcccattgcccacccacccatctcactatgcaattcgagttccaagcaacatttgctcctgccctggggccagctctgccccagccctgagaggggtggtgaggcagccccctggaccccagaaccccagacaagggggcaggcgggggaccagggcctctcctgtgggatctttgttttgtgtttaaccataatggttgtgtactgaaccacttcatatttgttatatataatatatatatatataatctccttaagactcagcctcctggtttacccccccggcctgggcatctgacctcccccaccccagtgtgatttaacatccaggaactgaggcctgaaccattttgcatttccccctcctccagcctctgtagggccatggctgtatgtactgtcgctgtgtttttttgtttttttagaactgggtttgggggctgatttttatttctttgggggctttttttcttggcaaatactaaaaatctcgtcaatgtaatttctgtggtttctattcagcttgggtttcatgttttaaaataaattttaaaaagc

SEQ ID NO: 196622 - DNA, 756 bp, Homo sapiens
  Payload ID: 18781
  Gene Name: tweety family member 3
  ENST ID: ENST00000429448
  CDS Start-End: 1-561
gaccccctcctccgcgtccaggaggtgctgaatggcacggaggtgaacctgcagcacctcaccgccctggtggactgccgcagcctgcatctggactacgtgcaagcgctgaccggcttctgctatgacggcgtggagggcctcatctacctggccctcttctccttcgtcacagccctcatgttcagctccatcgtctgcagcgtcccgcacacctggcagcaaaagagaggccctgatgaggacggggaggaggaggccgctccagggccgcggcaggcgcacgacagcctctaccgcgtccacatgcccagcctgtacagctgtggcagcagctacggcagtgagaccagcatcccggccgcggcccacaccgtcagcaacgccccggtcactgagtacatgagccagaacgctaatttccagaacccccgctgtgagaacaccccactcattgggcgcgagtccccgccgccctcacgctatctggctgccctggactctggcagccacgcgggctggcagtttaagcccatggacagtgcccgaacgctgtggtagctgttccctcagagcgacagtacacctccagcatgagagccaaatacctcgccacgagccagcctcgccctgactccagcggcagccactagaccgcgcccggcagccacccaccccacgtgccaacttcccctccccgtgccagcactgccgcttccacctgggccacccaccggaccctcgcacgccgtgcca

SEQ ID NO: 196623 - DNA, 3045 bp, Homo sapiens
  Payload ID: 18782
  Gene Name: twinfilin actin binding protein 1
  Uniprot ID: Q12792
  ENST ID: ENST00000395510
  CDS Start-End: 131-1183
gggcggggcggccgcgggtcgcgggcggatgacgcgccggggccggcggaggagcagccacttcctggggccgccggccggggccgctggctgcactcagcgccggagccgggagctagcggccgccgccatgtcccaccagaccggcatccaagcaagtgaagatgttaaagagatctttgccagagccagaaatggaaagtacagacttctgaaaatatctattgaaaatgagcaacttgtgattggatcatatagtcagccttcagattcctgggataaggattatgattcctttgttttacccctgttggaggacaaacaaccatgctatatattattcaggttagattctcagaatgcccagggatatgaatggatattcattgcatggtctccagatcattctcatgttcgtcaaaaaatgttgtatgcagcaacaagagcaactctgaagaaggaatttggaggtggccacattaaagatgaagtatttggaacagtaaaggaagatgtatcattacatggatataaaaaatacttgctgtcacaatcttcccctgccccactgactgcagctgaggaagaactacgacagattaaaatcaatgaggtacagactgacgtgggtgtggacactaagcatcaaacactacaaggagtagcatttcccatttctcgagaagcctttcaggctttggaaaaattgaataatagacagctcaactatgtgcagttggaaatagatataaaaaatgaaattataattttggccaacacaacaaatacagaactgaaagatttgccaaagaggattcccaaggattcagctcgttaccatttctttctgtataaacattcccatgaaggagactatttagagtccatagtttttatttattcaatgcctggatacacatgcagtataagagagcggatgctgtattctagctgcaagagccgtctgctagaaattgtagaaagacaactacaaatggatgtaattagaaagatcgagatagacaatggggatgagttgactgcagacttcctttatgaagaagtacatcccaagcagcatgcacacaagcaaagttttgcaaaaccaaaaggtcctgcaggaaaaagaggaattcgaagactaattaggggcccagcggaaactgaagctactactgattaaagtcatcacattaaacattgtaatactagttttttaaaagtccagcttttagtacaggagaactgaaatcattccatgttgatataaagtagggaaaaaaattgtactttttggaaaatagcacttttcacttctgtgtgtttttaaaattaatgttatagaagactcatgatttctatttttgagttaaagctagaaaagggttcaacataatgtttaattttgtcacactgttttcatagcgttgattccacacttcaaatacttcttaaaattttatacagttgggccagttctagaaagtctgatgtctcaaagggtaaacttactactttcttgtgggacagaaagaccttaaaatattcatattacttaatgaatatgttaaggaccaggctagagtattttctaagctggaaacttagtgtgccttggaaaaggccgcaagttgcttactccgagtagctgtgctagctctgtcagactgtaggatcatgtctgcaacttttagaaatagtgctttatattgcagcagtcttttatatttgacttttttttaatagcattaaaattgcagatcagctcactctgaaactttaagggtaccagatattttctatactgcaggatttctgatgacattgaaagactttaaacagccttagtaaattatctttctaatgctctgtgaggccaaacatttatgttcagattgaaatttaaattaatatcattcaaaaggaaacaaaaaatgttgagttttaaaaatcaggattgacttttttctccaaaaccatacatttatgggcaaattgtgttctttatcacttccgagcaaatactcagatttaaaattactttaaagtcctggtacttaacaggctaacgtagataaacaccttaataatctcagttaatactgtatttcaaaacacatttaactgttttctaatgctttgcattatcagttacaacctagagagattttgagcctcatatttctttgatacttgaaatagagggagctagaacacttaatgtttaatctgttaaacctgctgcaagagccataactttgaggcattttctaaatgaactgtggggatccaggatttgtaatttcttgatctaaactttatgctgcataaatcacttatcggaaatgcacatttcatagtgtgaagcactcatttctaaaccttattatctaaggtaatatatgcacctttcagaaatttgtgttcgagtaagtaaagcatattagaataattgtgggttgacagatttttaaaatagaatttagagtatttggggttttgtttgtttacaaataatcagactataatatttaaacatgcaaaataactgacaataatgttgcacttgtttactaaagatataagttgttccatgggtgtacacgtagacagacacacatacacccaaattattgcattaagaatcctggagcagaccatagctgaagctgttattttcagtcaggaagactacctgtcatgaaggtataaaataatttagaagtgaatgtttttctgtaccatctatgtgcaattatactctaaattccactacactacattaaagtaaatggacattccagaatatagatgtgattatagtcttaaactaattattattaaaccaatgattgctgaaaatcagtgatgcatttgttatagagtataactcatcgtttacagtatgttttagttggcagtatcatacctagatggtgaataacatattcccagtaaatttatatagcagtgaagaattacatgccttctggtggacattttataagtgcattttatatcacaataaaaattttttctctttaa

SEQ ID NO: 196624 - DNA, 3320 bp, Homo sapiens
  Payload ID: 18782
  Gene Name: twinfilin actin binding protein 1
  ENST ID: ENST00000547459
  CDS Start-End: 18-377
agctagcggccgccgccatgtcccaccagaccggcatccaaggtaacagcgcccggcgcgactcgcagggaaggggcttccgggagagccgggagagccgggagggctgcaggaccggcagggctggagtcgggccgggagctccggaagtcggtctcgcggggcgagccgggcctcggcgcctctccgcgctcctgcttcccgggcgctgccggcctgcgtcctcctccagcccggtccctgctgccgtcacgttgcagattgatccgaaattcgggggagcgaaggaaattggctttcgaggcggcctggttgaagggggcgtgccttccaccgtccccgacagtcgcccaactttcccccttttggtcacgtagggaagagctgggacagtggaggcgactggggcttcagtacgctgtcgagaaccagcaagtgaagatgttaaagagatctttgccagagccagaaatggaaagtacagacttctgaaaatatctattgaaaatgagcaacttgtgattggatcatatagtcagccttcagattcctgggataaggattatgattcctttgttttacccctgttggaggacaaacaaccatgctatatattattcaggttagattctcagaatgcccagggatatgaatggatattcattgcatggtctccagatcattctcatgttcgtcaaaaaatgttgtatgcagcaacaagagcaactctgaagaaggaatttggaggtggccacattaaagatgaagtatttggaacagtaaaggaagatgtatcattacatggatataaaaaatacttgctgtcacaatcttcccctgccccactgactgcagctgaggaagaactacgacagattaaaatcaatgaggtacagactgacgtgggtgtggacactaagcatcaaacactacaaggagtagcatttcccatttctcgagaagcctttcaggctttggaaaaattgaataatagacagctcaactatgtgcagttggaaatagatataaaaaatgaaattataattttggccaacacaacaaatacagaactgaaagatttgccaaagaggattcccaaggattcagctcgttaccatttctttctgtataaacattcccatgaaggagactatttagagtccatagtttttatttattcaatgcctggatacacatgcagtataagagagcggatgctgtattctagctgcaagagccgtctgctagaaattgtagaaagacaactacaaatggatgtaattagaaagatcgagatagacaatggggatgagttgactgcagacttcctttatgaagaagtacatcccaagcagcatgcacacaagcaaagttttgcaaaaccaaaaggtcctgcaggaaaaagaggaattcgaagactaattaggggcccagcggaaactgaagctactactgattaaagtcatcacattaaacattgtaatactagttttttaaaagtccagcttttagtacaggagaactgaaatcattccatgttgatataaagtagggaaaaaaattgtactttttggaaaatagcacttttcacttctgtgtgtttttaaaattaatgttatagaagactcatgatttctatttttgagttaaagctagaaaagggttcaacataatgtttaattttgtcacactgttttcatagcgttgattccacacttcaaatacttcttaaaattttatacagttgggccagttctagaaagtctgatgtctcaaagggtaaacttactactttcttgtgggacagaaagaccttaaaatattcatattacttaatgaatatgttaaggaccaggctagagtattttctaagctggaaacttagtgtgccttggaaaaggccgcaagttgcttactccgagtagctgtgctagctctgtcagactgtaggatcatgtctgcaacttttagaaatagtgctttatattgcagcagtcttttatatttgacttttttttaatagcattaaaattgcagatcagctcactctgaaactttaagggtaccagatattttctatactgcaggatttctgatgacattgaaagactttaaacagccttagtaaattatctttctaatgctctgtgaggccaaacatttatgttcagattgaaatttaaattaatatcattcaaaaggaaacaaaaaatgttgagttttaaaaatcaggattgacttttttctccaaaaccatacatttatgggcaaattgtgttctttatcacttccgagcaaatactcagatttaaaattactttaaagtcctggtacttaacaggctaacgtagataaacaccttaataatctcagttaatactgtatttcaaaacacatttaactgttttctaatgctttgcattatcagttacaacctagagagattttgagcctcatatttctttgatacttgaaatagagggagctagaacacttaatgtttaatctgttaaacctgctgcaagagccataactttgaggcattttctaaatgaactgtggggatccaggatttgtaatttcttgatctaaactttatgctgcataaatcacttatcggaaatgcacatttcatagtgtgaagcactcatttctaaaccttattatctaaggtaatatatgcacctttcagaaatttgtgttcgagtaagtaaagcatattagaataattgtgggttgacagatttttaaaatagaatttagagtatttggggttttgtttgtttacaaataatcagactataatatttaaacatgcaaaataactgacaataatgttgcacttgtttactaaagatataagttgttccatgggtgtacacgtagacagacacacatacacccaaattattgcattaagaatcctggagcagaccatagctgaagctgttattttcagtcaggaagactacctgtcatgaaggtataaaataatttagaagtgaatgtttttctgtaccatctatgtgcaattatactctaaattccactacactacattaaagtaaatggacattccagaatatagatgtgattatagtcttaaactaattattattaaaccaatgattgctgaaaatcagtgatgcatttgttatagagtataactcatcgtttacagtatgttttagttggcagtatcatacctagatggtgaataacatattcccagtaaatttatatagcagtgaagaattacatgccttctggtggacattttataagtgcattttatatcacaataaaaattttttctcttt

SEQ ID NO: 196625 - DNA, 396 bp, Homo sapiens
  Payload ID: 18782
  Gene Name: twinfilin actin binding protein 1
  ENST ID: ENST00000548403
  CDS Start-End: 56-396
ggccggggccgctggctgcactcagcgccggagccgggagctagcggccgccgccatgtcccaccagaccggcatccaagagcaacttgtgattggatcatatagtcagccttcagattcctgggataaggattatgattcctttgttttacccctgttggaggacaaacaaccatgctatatattattcaggttagattctcagaatgcccagggatatgaatggatattcattgcatggtctccagatcattctcatgttcgtcaaaaaatgttgtatgcagcaacaagagcaactctgaagaaggaatttggaggtggccacattaaagatgaagtatttggaacagtaaaggaagatgtatcattacatggatataaaaaatacttgctgtc

SEQ ID NO: 196626 - DNA, 925 bp, Homo sapiens
  Payload ID: 18782
  Gene Name: twinfilin actin binding protein 1
  ENST ID: ENST00000546662
  CDS Start-End: 52-925
ggggccgctggctgcactcagcgccggagccgggagctagcggccgccgccatgtcccaccagaccggcatccaagatactccccaagggaaactgatctgtatggttgcatgtaatgcgtgcagacagttcaatatgcagttatatctgacctccattatttcctggtttgaaattgggcagcctgcagcaagtgaagatgttaaagagatctttgccagagccagaaatggaaagtacagacttctgaaaatatctattgaaaatgagcaacttgtgattggatcatatagtcagccttcagattcctgggataaggattatgattcctttgttttacccctgttggaggacaaacaaccatgctatatattattcaggttagattctcagaatgcccagggatatgaatggatattcattgcatggtctccagatcattctcatgttcgtcaaaaaatgttgtatgcagcaacaagagcaactctgaagaaggaatttggaggtggccacattaaagatgaagtatttggaacagtaaaggaagatgtatcattacatggatataaaaaatacttgctgtcacaatcttcccctgccccactgactgcagctgaggaagaactacgacagattaaaatcaatgaggtacagactgacgtgggtgtggacactaagcatcaaacactacaaggagtagcatttcccatttctcgagaagcctttcaggctttggaaaaattgaataatagacagctcaactatgtgcagttggaaatagatataaaaaatgaaattataattttggccaacacaacaaatacagaactgaaagatttgccaaagaggattcccaaggattcagctcgttaccatttctttctgtataaacattcccatgaaggagactatttagagtccatag

SEQ ID NO: 196627 - DNA, 582 bp, Homo sapiens
  Payload ID: 18782
  Gene Name: twinfilin actin binding protein 1
  ENST ID: ENST00000546506
  CDS Start-End: 538-582
acttcctggggccgccggccggggccgctggctgcactcagcgccggagccgggagctagcggccgccgccatgtcccaccagaccggcatccaagattgatccgaaattcgggggagcgaaggaaattggctttcgaggcggcctggttgaagggggcgtgccttccaccgtccccgacagtcgcccaactttcccccttttggtcacgtagggaagagctgggacagtggaggcgactggggcttcagtacgctgtcgagaaccagcaagtgaagatgttaaagagatctttgccagagccagaaatggaaagtacagacttctgaaaatatctattgaaaatgagcaacttgtgattggatcatatagtcagccttcagattcctgggataaggattatgattcctttgttttacccctgttggaggacaaacaaccatgctatatattattcaggttagattctcagaatgcccagggatatgaatggatattcattgcatggtctccagatcattctcatgttcgtcaaaaaatgttgtatgcagcaacaagagcaactctgaagaaggaatttgga

SEQ ID NO: 196628 - DNA, 612 bp, Homo sapiens
  Payload ID: 18782
  Gene Name: twinfilin actin binding protein 1
  ENST ID: ENST00000550371
  CDS Start-End: 84-263
ggaggagcagccacttcctggggccgccggccggggccgctggctgcactcagcgccggagccgggagctagcggccgccgccatgtcccaccagaccggcatccaagcaagtgaagatgttaaagagatctttgccagagccagaaatggaaagtacagacttctgaaaatatctattgaaaatgtttctgcaccacagtccatttctaatgtcagtgcttccatctctggaatggaaatcactaaacagagcaacttgtgattggatcatatagtcagccttcagattcctgggataaggattatgattcctttgttttacccctgttggaggacaaacaaccatgctatatattattcaggttagattctcagaatgcccagggatatgaatggatattcattgcatggtctccagatcattctcatgttcgtcaaaaaatgttgtatgcagcaacaagagcaactctgaagaaggaatttggaggtggccacattaaagatgaagtatttggaacagtaaaggaagatgtatcattacatggatataaaaaatacttgctgtcacaatcttcccctgccccactgactgcagctgaggaagaactacg

SEQ ID NO: 196629 - DNA, 3012 bp, Homo sapiens
  Payload ID: 18782
  Gene Name: twinfilin actin binding protein 1
  Uniprot ID: Q12792
  ENST ID: ENST00000552521
  CDS Start-End: 392-1150
ggctgcactcagcgccggagccgggagctagcggccgccgccatgtcccaccagaccggcatccaagggaagagctgggacagtggaggcgactggggcttcagtacgctgtcgagaaccagcaagtgaagatgttaaagagatctttgccagagccagaaatggaaagtacagacttctgaaaatatctattgaaaatgagcaacttgtgattggatcatatagtcagccttcagattcctgggataaggattatgattcctttgttttacccctgttggaggacaaacaaccatgctatatattattcaggttagattctcagaatgcccagggatatgaatggatattcattgcatggtctccagatcattctcatgttcgtcaaaaaatgttgtatgcagcaacaagagcaactctgaagaaggaatttggaggtggccacattaaagatgaagtatttggaacagtaaaggaagatgtatcattacatggatataaaaaatacttgctgtcacaatcttcccctgccccactgactgcagctgaggaagaactacgacagattaaaatcaatgaggtacagactgacgtgggtgtggacactaagcatcaaacactacaaggagtagcatttcccatttctcgagaagcctttcaggctttggaaaaattgaataatagacagctcaactatgtgcagttggaaatagatataaaaaatgaaattataattttggccaacacaacaaatacagaactgaaagatttgccaaagaggattcccaaggattcagctcgttaccatttctttctgtataaacattcccatgaaggagactatttagagtccatagtttttatttattcaatgcctggatacacatgcagtataagagagcggatgctgtattctagctgcaagagccgtctgctagaaattgtagaaagacaactacaaatggatgtaattagaaagatcgagatagacaatggggatgagttgactgcagacttcctttatgaagaagtacatcccaagcagcatgcacacaagcaaagttttgcaaaaccaaaaggtcctgcaggaaaaagaggaattcgaagactaattaggggcccagcggaaactgaagctactactgattaaagtcatcacattaaacattgtaatactagttttttaaaagtccagcttttagtacaggagaactgaaatcattccatgttgatataaagtagggaaaaaaattgtactttttggaaaatagcacttttcacttctgtgtgtttttaaaattaatgttatagaagactcatgatttctatttttgagttaaagctagaaaagggttcaacataatgtttaattttgtcacactgttttcatagcgttgattccacacttcaaatacttcttaaaattttatacagttgggccagttctagaaagtctgatgtctcaaagggtaaacttactactttcttgtgggacagaaagaccttaaaatattcatattacttaatgaatatgttaaggaccaggctagagtattttctaagctggaaacttagtgtgccttggaaaaggccgcaagttgcttactccgagtagctgtgctagctctgtcagactgtaggatcatgtctgcaacttttagaaatagtgctttatattgcagcagtcttttatatttgacttttttttaatagcattaaaattgcagatcagctcactctgaaactttaagggtaccagatattttctatactgcaggatttctgatgacattgaaagactttaaacagccttagtaaattatctttctaatgctctgtgaggccaaacatttatgttcagattgaaatttaaattaatatcattcaaaaggaaacaaaaaatgttgagttttaaaaatcaggattgacttttttctccaaaaccatacatttatgggcaaattgtgttctttatcacttccgagcaaatactcagatttaaaattactttaaagtcctggtacttaacaggctaacgtagataaacaccttaataatctcagttaatactgtatttcaaaacacatttaactgttttctaatgctttgcattatcagttacaacctagagagattttgagcctcatatttctttgatacttgaaatagagggagctagaacacttaatgtttaatctgttaaacctgctgcaagagccataactttgaggcattttctaaatgaactgtggggatccaggatttgtaatttcttgatctaaactttatgctgcataaatcacttatcggaaatgcacatttcatagtgtgaagcactcatttctaaaccttattatctaaggtaatatatgcacctttcagaaatttgtgttcgagtaagtaaagcatattagaataattgtgggttgacagatttttaaaatagaatttagagtatttggggttttgtttgtttacaaataatcagactataatatttaaacatgcaaaataactgacaataatgttgcacttgtttactaaagatataagttgttccatgggtgtacacgtagacagacacacatacacccaaattattgcattaagaatcctggagcagaccatagctgaagctgttattttcagtcaggaagactacctgtcatgaaggtataaaataatttagaagtgaatgtttttctgtaccatctatgtgcaattatactctaaattccactacactacattaaagtaaatggacattccagaatatagatgtgattatagtcttaaactaattattattaaaccaatgattgctgaaaatcagtgatgcatttgttatagagtataactcatcgtttacagtatgttttagttggcagtatcatacctagatggtgaataacatattcccagtaaatttatatagcagtgaagaattacatgccttctggtggacattttataagtgcattttatatcacaataaaaattttttctctttaa

SEQ ID NO: 196630 - DNA, 1170 bp, Homo sapiens
  Payload ID: 18782
  Gene Name: twinfilin actin binding protein 1
  Uniprot ID: Q12792
  ENST ID: ENST00000548315
  CDS Start-End: 5-1078
cgccatgtcccaccagaccggcatccaagcaagtgaagatgttaaagagatctttgccagagccagaaatggaaagtacagacttctgaaaatatctattgaaaatgagcaacttgtgattggatcatatagtcagccttcagattcctgggataaggattatgattcctttgttttacccctgttggaggacaaacaaccatgctatatattattcaggttagattctcagaatgcccagggatatgaatggatattcattgcatggtctccagatcattctcatgttcgtcaaaaaatgttgtatgcagcaacaagagcaactctgaagaaggaatttggaggtggccacattaaagatgaagtatttggaacagtaaaggaagatgtatcattacatggatataaaaaatacttgctgtcacaatcttcccctgccccactgactgcagctgaggaagaactacgacagattaaaatcaatgagagcccagaggatcatattggggtacagactgacgtgggtgtggacactaagcatcaaacactacaaggagtagcatttcccatttctcgagaagcctttcaggctttggaaaaattgaataatagacagctcaactatgtgcagttggaaatagatataaaaaatgaaattataattttggccaacacaacaaatacagaactgaaagatttgccaaagaggattcccaaggattcagctcgttaccatttctttctgtataaacattcccatgaaggagactatttagagtccatagtttttatttattcaatgcctggatacacatgcagtataagagagcggatgctgtattctagctgcaagagccgtctgctagaaattgtagaaagacaactacaaatggatgtaattagaaagatcgagatagacaatggggatgagttgactgcagacttcctttatgaagaagtacatcccaagcagcatgcacacaagcaaagttttgcaaaaccaaaaggtcctgcaggaaaaagaggaattcgaagactaattaggggcccagcggaaactgaagctactactgattaaagtcatcacattaaacattgtaatactagttttttaaaagtccagcttttagtacaggagaactgaaatcattccatgttgatataaagtag

SEQ ID NO: 196631 - DNA, 1718 bp, Homo sapiens
  Payload ID: 18783
  Gene Name: twinfilin actin binding protein 2
  Uniprot ID: Q6IBS0
  ENST ID: ENST00000305533
  CDS Start-End: 245-1294
atccttagacccacccggaccgaggcgcaggctgcgcgcacgcgcggccccgagtccccgcctccctgccgcgcctgtcgggggcggggcgccgctgggggcgggtcctgcggcaccgcccgggaagctgcgcgagggtcgacagcctccgccacatcctccacctctcttggtccagcgagcgttgccgggccagggtcaagcggagggctccgacggcgcggacggagcgaagcgccgagccatggcgcaccaaacgggcatccacgccacggaagagctgaaggaattctttgccaaggcacgggctggctctgtgcggctcatcaaggttgtgattgaggacgagcagctcgtgctgggtgcctcgcaggagccagtaggccgctgggatcaggactatgacagggccgtgctgccactgctggacgcccagcagccctgctacctgctctaccgcctcgactcacagaatgctcagggcttcgaatggctcttcctcgcctggtcgcctgataactcccccgtgcggctgaagatgctgtacgcggccacgcgggccacagtgaaaaaggagtttggaggtggccacatcaaggatgagctcttcgggactgtgaaggatgacctctcttttgctgggtaccagaaacacctgtcgtcctgtgcggcacctgccccgctgacctcggctgagagagagctccagcagatccgcattaacgaggtgaagacagagatcagtgtggaaagcaagcaccagaccctgcagggcctcgccttccccctgcagcctgaggcccagcgggcactccagcagctcaagcagaaaatggtcaactacatccagatgaagctggacctagagcgggaaaccattgagctggtgcacacagagcccacggatgtggcccagctgccctcccgggtgccccgagatgctgcccgctaccacttcttcctctacaagcacacccatgagggcgacccccttgagtctgtagtgttcatctactccatgccggggtacaagtgcagcatcaaggagcgaatgctctactccagctgcaagagccgcctcctcgactccgtggagcaggacttccatctggagatcgccaagaaaattgagattggcgatggggcagagctgacggcagagttcctctacgacgaggtgcaccccaagcaacacgccttcaagcaggccttcgccaagcccaagggcccagggggcaagcggggccataagcgcctcatccgcggcccgggtgaaaatggggatgacagctaggaggctggagcagggccggccacgtgtggactgtggggctgcccaccttccgctccctgccaccatcctccttcctgggctccaggaaagtgtttctgggaggtcaggagggctggcagctgaacgcacttgcagcgtccgagggccaccgggctggcattttgtgacccttccctgttgctgtccctgcatctcgtctgtgtgcccagggtgtccggggaccctgcctggctggcttaagggggctgggtcaggggcctggcatgaacctggcctcccggggagctgagactagggtcccagcacagcccagaaacctttggccacaagaagtggggtcagtcagggctggggcaggggtcactgcagtttgggatggttgaatgctgtattttctaaagaataaaatatttttaaatcaaga

SEQ ID NO: 196632 - DNA, 1440 bp, Homo sapiens
  Payload ID: 18783
  Gene Name: twinfilin actin binding protein 2
  ENST ID: ENST00000499914
  CDS Start-End: 127-891
cccgggaagctgcgcgagggtcgacagcctccgccacatcctccacctctcttggtccagcgagcgttgccgggccagggtcaagcggagggctccgacggcgcggacggagcgaagcgccgagccatggcgcaccaaacgggcatccacgccacggaagagctgaaggaattctttgccaaggcacgggctggctctgtgcggctcatcaaggttgtgattgaggacgagcagctcgtgctgggtgcctcgcaggagccagtaggccgctgggatcaggactatgacagggccgtgctgccactgctggacgcccagcagccctgctacctgctctaccgcctcgactcacagaatgctcagggcttcgaatggctcttcctcgcctggtcgcctgataactcccccgtgcggctgaagatgctgtacgcggccacgcgggccacagtgaaaaaggagtttggaggtggccacatcaaggatgagctcttcgggactgtgaaggatgacctctcttttgctgggtaccagaaacacctgtcgtcctgtgcggcacctgccccgctgacctcggctgagagagagctccagcagatccgcattaacgaggtgaagacagagatcagtgtggaaagcaagcaccagaccctgcagggcctcgccttccccctgcagcctgaggcccagcgggcactccagcagctcaagcagaaaatggtcaactacatccagatgaagctggacctagagcgggaaaccattgagctggtgcacacagagcccacggatgtggcccagctgccctcccgggtgccccgagatgctgcccgctaccacttcttcctctacaagcacacccatgagggcgacccccttgagtctgtagattgagattggcgatggggcagagctgacggcagagttcctctacgacgaggtgcaccccaagcaacacgccttcaagcaggccttcgccaagcccaagggcccagggggcaagcggggccataagcgcctcatccgcggcccgggtgaaaatggggatgacagctaggaggctggagcagggccggccacgtgtggactgtggggctgcccaccttccgctccctgccaccatcctccttcctgggctccaggaaagtgtttctgggaggtcaggagggctggcagctgaacgcacttgcagcgtccgagggccaccgggctggcattttgtgacccttccctgttgctgtccctgcatctcgtctgtgtgcccagggtgtccggggaccctgcctggctggcttaagggggctgggtcaggggcctggcatgaacctggcctcccggggagctgagactagggtcccagcacagcccagaaacctttggccacaagaagtggggtcagtcagggctggggcaggggtcactgcagtttgggatggttgaatg

SEQ ID NO: 196633 - DNA, 1666 bp, Homo sapiens
  Payload ID: 18784
  Gene Name: twist family bHLH transcription factor 1
  Uniprot ID: Q15672
  ENST ID: ENST00000242261
  CDS Start-End: 352-960
gaggtataagagcctccaagtctgcagctctcgcccaactcccagacacctcgcgggctctgcagcaccggcaccgtttccaggaggcctggcggggtgtgcgtccagccgttgggcgctttctttttggacctcggggccatccacaccgtcccctccccctcccgcctccctccccgcctcccccgcgcgccctccccgcggaggtccctcccgtccgtcctcctgctctctcctccgcgggccgcatcgcccgggccggcgccgcgcgcgggggaagctggcgggctgaggcgccccgctcttctcctctgccccgggcccgcgaggccacgcgtcgccgctcgagagatgatgcaggacgtgtccagctcgccagtctcgccggccgacgacagcctgagcaacagcgaggaagagccagaccggcagcagccgccgagcggcaagcgcgggggacgcaagcggcgcagcagcaggcgcagcgcgggcggcggcgcggggcccggcggagccgcgggtgggggcgtcggaggcggcgacgagccgggcagcccggcccagggcaagcgcggcaagaagtctgcgggctgtggcggcggcggcggcgcgggcggcggcggcggcagcagcagcggcggcgggagtccgcagtcttacgaggagctgcagacgcagcgggtcatggccaacgtgcgggagcgccagcgcacccagtcgctgaacgaggcgttcgccgcgctgcggaagatcatccccacgctgccctcggacaagctgagcaagattcagaccctcaagctggcggccaggtacatcgacttcctctaccaggtcctccagagcgacgagctggactccaagatggcaagctgcagctatgtggctcacgagcggctcagctacgccttctcggtctggaggatggagggggcctggtccatgtccgcgtcccactagcaggcggagccccccaccccctcagcagggccggagacctagatgtcattgtttccagagaaggagaaaatggacagtctagagactctggagctggataactaaaaataaaaatatatgccaaagattttcttggaaattagaagagcaaaatccaaattcaaagaaacagggcgtggggcgcacttttaaaagagaaagcgagacaggcccgtggacagtgattcccagacgggcagcggcaccatcctcacacctctgcattctgatagaagtctgaacagttgtttgtgttttttttttttttttttttgacgaagaatgtttttatttttatttttttcatgcatgcattctcaagaggtcgtgccaatcagccactgaaaggaaaggcatcactatggactttctctattttaaaatggtaacaatcagaggaactataagaacacctttagaaataaaaatactgggatcaaactggcctgcaaaaccatagtcagttaattctttttttcatccttcctctgaggggaaaaacaaaaaaaaacttaaaatacaaaaaacaacattctatttatttattgaggacccatggtaaaatgcaaatagatccggtgtctaaatgcattcatatttttatgattgttttgtaaatatctttgtatatttttctgcaataaataaatataaaaaatttagagaa

SEQ ID NO: 196634 - DNA, 589 bp, Homo sapiens
  Payload ID: 18784
  Gene Name: twist family bHLH transcription factor 1
  ENST ID: ENST00000354571
  CDS Start-End: 1-406
cccggcccagggcaagcgcggcaagaagtctgcgggctgtggcggcggcggcggcgcgggcggcggcggcggcagcagcagcggcggcgggagtccgcagtcttacgaggagctgcagacgcagcgggtcatggccaacgtgcgggagcgccagcgcacccagtcgctgaacgaggcgttcgccgcgctgcggaagatcatccccacgctgccctcggacaagctgagcaagattcagaccctcaagctggcggccaggtacatcgacttcctctaccaggtcctccagagcgacgagctggactccaagatggcaagctgcagctatgtggctcacgagcggctcagctacgccttctcggtctggaggatggagggggcctggtccatgtccgcgtcccactagcaggcggagccccccaccccctcagcagggccggagacctagatttcttaaggtacaccaggatggagctggccatgactgctgagaagaagcacatgtccagatgataattcacgcacagttacaggttcccctccccaaagtggaacgtattattaataaaataatgttaaggagcagaaa

SEQ ID NO: 196635 - DNA, 527 bp, Homo sapiens
  Payload ID: 18784
  Gene Name: twist family bHLH transcription factor 1
  ENST ID: ENST00000443687
  CDS Start-End: 1-212
agatcatccccacgctgccctcggacaagctgagcaagattcagaccctcaagctggcggccaggtacatcgacttcctctaccaggtcctccagagcgacgagctggactccaagatggcaagctgcagctatgtggctcacgagcggctcagctacgccttctcggtctggaggatggagggggcctggtccatgtccgcgtcccactagcaggcggagccccccaccccctcagcagggccggagacctagatttcttaaggtacaccaggatggagctggccatgactgctgagaaggtgtgatacaattcagaaaataatttgtaattaagaaaaatcagacaagatggagaacaagaacaaatgtggagatgacttccagaggcaagaaaaaacacttcacagaagaatgaggttttattcccaaaagaaagaatgcttccatcagaagacataataatgattccattgaactggaaattaagatggttacctgaccaatttgggattcttatgcttctga

SEQ ID NO: 196636 - DNA, 1176 bp, Homo sapiens
  Payload ID: 18785
  Gene Name: twist family bHLH transcription factor 2
  Uniprot ID: Q8WVJ9
  ENST ID: ENST00000448943
  CDS Start-End: 185-667
ctagagtttccaaaaaagttagaataacttcctctcccggagacctcggttttgcacaagccggccttgaaatcagagcctttccagcaactccgagagcgtgtgctcggcgaccgcgggcttggccagcggcgcgcgctcggcgccccggcgcccccagccccacgcgcgccgggcgggcgccatggaggagggctccagctcgcccgtgtcccccgtggacagcctgggcaccagcgaggaggagctcgagaggcagcccaagcgcttcggccggaagcggcgctacagcaagaagtcgagcgaagatggcagcccgaccccgggcaagcgcggcaagaagggcagccccagcgcgcagtccttcgaggagctgcagagccagcgcatcctggccaacgtgcgcgagcgccagcgcacccagtcgctcaacgaggccttcgcggcgctgcgcaagatcatccccacgctgccctctgacaagctgagcaagatccagacgctcaagctggccgccaggtacatagacttcctctaccaggtcctgcagagcgacgagatggacaataagatgaccagctgcagctacgtggcccacgagcgcctcagctacgccttctccgtgtggcgcatggagggcgcgtggtccatgtccgcctcccactagcgccgcgccacccacctccggaccggcgcgccaggaggagattctgaatgatgctgccattgccagaccttctgctaccaaacagagcgaagaggaagagggggcagtgtttggtcaagacagcccacgaaacgttggcgggagtgagcacattagcaatggctaagaacatgcttgaatcatttgtaacaacccaggacagagatgccacaagaggactttggggaaaggcgaatccactcatacatcttggagttgttttttcaagttcagaaaatgaaccttcaccaaggtcttggaacatgaagcagagactctggtgctgactctatcatttgagctcctaagggtactcatgcccagtggagcatgcacaccagcaacactgccaacaccatctcggtgtcccaccccttagaggaggaagaggacacagaggggcgcccggtaataaccctcatttcctctcttccaccccaccacatcatcttaataaaacatgaaggtaa

SEQ ID NO: 196637 - DNA, 1404 bp, Homo sapiens
  Payload ID: 18785
  Gene Name: twist family bHLH transcription factor 2
  Uniprot ID: Q8WVJ9
  ENST ID: ENST00000612363
  CDS Start-End: 185-667
ctagagtttccaaaaaagttagaataacttcctctcccggagacctcggttttgcacaagccggccttgaaatcagagcctttccagcaactccgagagcgtgtgctcggcgaccgcgggcttggccagcggcgcgcgctcggcgccccggcgcccccagccccacgcgcgccgggcgggcgccatggaggagggctccagctcgcccgtgtcccccgtggacagcctgggcaccagcgaggaggagctcgagaggcagcccaagcgcttcggccggaagcggcgctacagcaagaagtcgagcgaagatggcagcccgaccccgggcaagcgcggcaagaagggcagccccagcgcgcagtccttcgaggagctgcagagccagcgcatcctggccaacgtgcgcgagcgccagcgcacccagtcgctcaacgaggccttcgcggcgctgcgcaagatcatccccacgctgccctctgacaagctgagcaagatccagacgctcaagctggccgccaggtacatagacttcctctaccaggtcctgcagagcgacgagatggacaataagatgaccagctgcagctacgtggcccacgagcgcctcagctacgccttctccgtgtggcgcatggagggcgcgtggtccatgtccgcctcccactagcgccgcgccacccacctccggaccggcgcgccagggctgtccgtcgcgtcggcggcgcaagtggaattgggatgcattcgagtctgtaacttctgaaacctgaacaacctcaggaggcccccacctctgccctccaccagcgtcgagagaagggacagcagtgacatcggacagaagacccgggctcccgtcctcccccaggacggtccccacataggaagggcactcccagccctcttgctggtgacattgtcatggtcatcttgtttctgtttggatttttcttctgggtcttatgtttggggggaggtttattctttctgaaaatgtctagattcaggaacacatttatgaggatttggattttgaatttgtatttccctctaagtgccttttttaatgtctatttttttaataaaacagaaatgcattcttgtacaattctgttgaaactggaccaaggctctcagaagaggacccccgagttccttcccctcccccgagcctctgcatgattgtttcaagtcagcctggaattcttactttcacgccgctattcttttcctttctccgtgattgcttggctagccatttaaaaaaaaatattctctgttcagtgtatatgttgcttgtttgttttatttattgagatatttttacaagctaagtgactgcagtgtggctgtgtatcctgctccccacccaggaaaaataaagacgtccgcgcagccatggtc

SEQ ID NO: 196638 - DNA, 3942 bp, Homo sapiens
  Payload ID: 18786
  Gene Name: TWIST neighbor
  Uniprot ID: Q3B726
  ENST ID: ENST00000222567
  CDS Start-End: 72-1088
aaaacgagcgccggggacatgggattgtgcttgcgtcaacggcgcgcgccgtgggaaccttgacaagcagcatggctgcaggttgctcagaggcgccgcggccagcggcggcttctgatgggtctctggtagggcaggctggcgtcctgccttgcctagagttgccgacttatgccgctgcttgtgcgctggtgaacagtcgctactcatgcctggtggccgggccgcaccaaaggcacatcgcgctgtcgccccgctaccttaacaggaaacgcaccggcattcgagaacagcttgatgcggagctccttcgctattctgagagccttttaggtgtccctattgcatatgataacatcaaagttgtgggagagcttggagatatttatgatgatcaaggacacattcatcttaacattgaagccgattttgttattttctgccctgaaccagggcagaagcttatgggtatagttaataaagtgtcttctagccacattggctgtttagtacatgggtgtttcaatgcctccattcctaaacctgagcagttgtcagctgagcagtggcaaaccatggagataaacatgggtgatgaactagaatttgaagtatttcgtttagactcagatgctgctggagtattctgcattcggggaaaactaaatatcacaagtttacaattcaagcgctctgaagtttctgaagaagttacagaaaatggcactgaggaagctgctaaaaaacctaaaaagaagaaaaagaagaaagacccagagacatatgaagtggacagtggtaccacaaagctagcagatgatgcagatgacactccaatggaagagtcagccctgcagaatactaataatgcgaatggcatctgggaggaggagccaaagaaaaagaagaagaagaaaaagcaccaggaagttcaggaccaggaccctgttttccaaggcagtgactccagtggttaccaaagtgaccataaaaagaaaaaaaagaaaagaaaacacagtgaagaggccgaatttaccccacctttgaaatgctcaccaaaaagaaaagggaaaagtaattttctttagtgtattttaaacacgattcagtttttaaaagatcgatctacatacaatagatgaataaatgttttcagtgatatgaaaaggttaagtatgccagtagtttacaaaacagaaaatacttaactaggagtaggaggctttatatgctaaaaatgataaaactgactgtaaattaatttggggaaagccagtattgttaaaataccattttatacaaaataaaaagctgctctcactgtcagctctcatattcttccaggttttgcactctacataaaattatttctacaatgtcaagactagccaaaggactttataatacaatattatattactaaagaatgagttaagtttgagattttgatgatttgattttgtgtgtgtttaataggcttcaccttattacatgctattttattttgcttttttaaaaactcaggacattaactaattttaggttttcctttatcatggctttctacagtatttctattgtttaacataaaatagtttgccaaagaagtttctgaagtcttcacagctcttaaaagccaggccagtactgactgtgtggtggtaaatgctattcattattttcttttctttcttccaagtgcatgtgtgtccttgtcttcttaagtctgagaggttgctggaaaggactgttttcttgtacttgttcatttgtgcctcagccattctagttttgttgtgtgttggaggacagtctaatgaagacaggataaatgtgattctgactagtgggaaatttcagattactttttaatgattggaatgggctataagatattgtgctgaagagaaaacagttgttctgttcactgctttcattgagaaaatgtggaatgtctcttgactaattgacaaagtgtaatgaaatgacaagctggttgaagctggtaatcaatgcatggccatatttattcattttccacacacttgaccatctactttgtataacacattctgctaaggcccagggatacaatggcaaacaagatagatgtagttccttcccttgtggcatgtcataagagaaacagatgtgcatatacacacaataaataagaaaattaataattgtattaagtggtatgaaaaaaagggggaggattgttcactcactgttacctgtgttagtatctgcaaatgcatgaatggttgaactcccatgtcagcatttttgttgccatttatttagtaccagacatagtgctggtctcacagcttaatatttggtaatgaataaattctgctagtggtatatgttgatctgaacttacaatgatgggatatagaattggcagagtggcagatgttcacaattgtctacaagtagatgtgctagacaatggaaggatgcaggccaacctctttgattacaattgagattcatgtgactattgagccctggaaatgtagcttgtccaaattgagatgtgctgtcagtataaaatacataccagattttaaagatgtaccaaaaaatgtaaactatctcaatttttatattggtgaaatcaatatgtcttggtatagtggcttaaataaaacaattttagcctttctcagtttatttttctgcaaaaagattaaaaattgtacatgaagctcatgttaactttcttttggtcagtgctattttaaaggaagtatgagttgaaaaaaaattgaaataaactatatcatattactaggacttaatatagtggcatacccaggaaatgcttagtaagtgttcccttcacattttaaaatttgagtatacaatcatgtttgacaatatagaaatttaatttttagtgaaacaattctaaaccccttttccatagacacaagaaagatggcaaatttatgctattcctggaaaaatacattgtggcttagcaaataagcaagttcccacgttacttttgttttgcttcaagtaatacttctgccagttgtgttttatgaattaaacagggaacggcatgctgaacttgaaactagatttgttcctgcttttttcacaatgtgagtagttttgaaaagtcagatctggccatttgtctttcctagaatagcataactttgttcattgttttttttgtttgtctttctgacacagaaagactgatgatggtgtccactatgtattcttcaaaacatttggcacatgctgcactaacctagtctatcttttctatcttggaatttgctcatacaaaccctatagcctagactagatcccttaccctctctccagttcctatcattcacccatttcactgtgcaagacacctcactagtcaccagtgatacagaaatgacttttaagcagtttctgctcttaagggcttaccgttttgtctataagatacacaagtataaatgacaagtacaaataacaatgaatgtttaatgctttacgtttagtgtttaagcttgttgttggaagagcagcattttgacccttggagaagaaaaactagctgtggcattccaggtggagaacctgacagaggactaagaagttatctaatgtaaaagacctcaggcaccaccttcgcataaactttttccagacaaggctaaatgtgcatgcttcataaccataattcttatttttctttaataaatatttttctacttgtaacactgtgcattatttcaaactgtttacctgtttgtaaagcttgtctcttaatcaaatttgtcttgaccaaataagtttcctgagggctggaattatgccttaactatatctatagtatttaacagtgaatcctttgtataatgaaagcatcaacagataattttaaattgataaataaaaagcacagtttcaaatggt

SEQ ID NO: 196639 - DNA, 3756 bp, Homo sapiens
  Payload ID: 18787
  Gene Name: twisted gastrulation BMP signaling modulator 1
  Uniprot ID: Q9GZX9
  ENST ID: ENST00000262120
  CDS Start-End: 192-863
ctctttaaggtgcccgaggctcgcgggcgctgcgctgaggggacggcgggaggcgcggcctggcctcgcactcaaagccgccgcagcgcgccccgggctcggccgacccggcggggatctaggggtgggcgacttcgcgggaccgtggcgcatgtttcctgggagttactgatcatcttctttgaagaaacatgaagttacactatgttgctgtgcttactctagccatcctgatgttcctgacatggcttccagaatcactgagctgtaacaaagcactctgtgctagtgatgtgagcaaatgcctcattcaggagctctgccagtgccggccgggagaaggcaattgctcctgctgtaaggagtgcatgctgtgtcttggggccctttgggacgagtgctgtgactgtgttggtatgtgtaatcctcgaaattatagtgacacacctccaacttcaaagagcacagtggaggagctgcatgaaccgatcccttctctcttccgggcactcacagaaggagatactcagttgaattggaacatcgtttctttccctgttgcagaagaactttcacatcatgagaatctggtttcatttttagaaactgtgaaccagccacaccaccagaatgtgtctgtccccagcaataatgttcacgcgccttattccagtgacaaagaacacatgtgtactgtggtttattttgatgactgcatgtccatacatcagtgtaaaatatcctgtgagtccatgggagcatccaaatatcgctggtttcataatgcctgctgcgagtgcattggtccagaatgtattgactatggtagtaaaactgtcaaatgtatgaactgcatgttttaaagaagacaaatgcaaaccaaagcaacttagtaaaataataggtataaaaagttattctgtaagtctgttggttgtatcttgtatcagaatcccagtaagttaagttgtaaagactttggaataagtttcttttaaaaatatgacatagccagtgatgtgtttaattatataactgttcttactgattttattgccccctagcaataagccctttcctttgaatacatgtacaactttggtcatatgagaagcaggtgcgcagagaattccttgaaagatctgaggtttttaacatgaagtctgacgtggttttcctctagcattccaaaaggtttttgctttgaaagtgttagcagaagcatgttgatgtgaattatgatttcttcatgtgctactgttagcacactgagtttttatagttgcacatcattcctcattgtgccttgttttatccattttataaatagagtagatatttgatataccactctgataactcatataaaaatatcatcataaaaagcttaatttcatcccttttatgttggttttaaaaggtaaatgcttaccatattttataattgagaactcttacatagtagaatccattctataatacatgtgttgacaaagctttagagaaagtttcctattctcttccatttcccctgcccaaagtgctgacataggcagtgatgaagaatctttaccaagattttcagggtgtacctatgaaattgctttaaatgcactgctggtgtaaataattagcaagcaaagcgtttctgtgacttcaggtaccagcttaaagagcactagggatggggaacgaatgccaaatcagactccacctagagcaccaggaaacagcttgtaccctggtagggaaatggtgttgctgaaaggggaggctgagccagtgcgagactgaacttgtgcagccttagccaagacaaagcagtgtttttcagcagacggctgatgggacaggaattgaagaagagaattgactcgtatgaacaggacagggtgaaaatgctgggaattattatgggaaacaaaactatctatgttcatattttgtaatatttcatttgttaagtttatatctggatataatgttctttttaaacaagtataatcatatcgtcggaggttaagattatgaaattttagaatctctattcaagatgatgttcactccaaatacactacagaatttagtcaacattttatataatgtttcaataaatgtttctttcaataaagatactatgtgcccttcatagtaataaaatctcaatcttaaagcatgaatctaaaacataaatatttatattacagactcaattttacaaaattactaattgctctagtgcatatttgaactacaagcaactttttaggaatacctctttatacgtctacatattttagtatataaaaatagataatgctcttggacacattttgtattattcatgatctgaatagtagttagttaaaagatcatttgtaatattatgatcaactgttataaattaaggtcttaataccttttctgctctttcaaataactctaatgaatattcaagatattttagccttttaaaaagttgagatttagctcatggatatattttttggtagggaaacattagggtctccttttcttccttttacctagaatgcctcatttaaaagtgccttgaaaacatttagctccccttcttcatgagcatctgtagagctgaaagtattctggaactttagacagaaagctgaaaggaatctgcagtctcctgctgcagttcaactctgctgtttttcagtcatttcctactgtgagtggagtgatgtttgtgtgtgtgttggcaacatgcctaatgttttcttaatgatgacaacaaatattttaaaactgcatttatcattttttaggtcttcattaaattttaaaatgtaatatctgtttcccaccccctacattaggaggataatttcttaaaccacattgttttaattgatttttcttatcttgatttctttcattagaaactatccctaaatgtaaagatcttttgccttcaaatttggcttattttttctgatttatgagggtttgaaagaaagaattcacctaaaagattccatttccagttttataatgtatttcaggttctgaataacaatatttttccaaattgaaagtaaatattccagaagttgatagcctggttaaaagttagatcctctattaccattctaagcacattcacttctatattgaagttttggtaaaaattcttttttcttttttaataaaaaattaggttattactttttttataaccagatttttaaagcactaggttttaaatcagtgggtatcataaaagccatatataaaagatcctttcttatagtaagacttgtgcttgttagcaggtttttctgttagtttttcccccataacatttaattattactaaaattgtatttacaatagtggtgccaaatcaaatggtaatttaaataaaatctattctgtgtttatgtagggtggtataaaaaagaggtcttcatttagacatgtgatttctaaaattccagaaagcaaaattgataagatgttagaaatttggaccattatttataatcagggtagcattaaaatggagaaaagaaagttttctgaaaaaatgcagtaaatataagccacatttctaaagtttatttttatgaaagcttcttttaagattttgaaatctattctgcattcccaagagtttatgtttattgtattttatatgatctacaacatataaaattgtgtatttttctttggttgtccctattaacaaaaaagtattttaataaaaaattgaaatga

SEQ ID NO: 196640 - DNA, 2311 bp, Homo sapiens
  Payload ID: 18787
  Gene Name: twisted gastrulation BMP signaling modulator 1
  Uniprot ID: Q9GZX9
  ENST ID: ENST00000583147
  CDS Start-End: 192-419
ctctttaaggtgcccgaggctcgcgggcgctgcgctgaggggacggcgggaggcgcggcctggcctcgcactcaaagccgccgcagcgcgccccgggctcggccgacccggcggggatctaggggtgggcgacttcgcgggaccgtggcgcatgtttcctgggagttactgatcatcttctttgaagaaacatgaagttacactatgttgctgtgcttactctagccatcctgatgttcctgacatggcttccagaatcactgagctgtaacaaagcactctgtgctagtgatgtgagcaaatgcctcattcaggagctctgccagtgccggccgggagaaggcaattgctcctgctgtaaggagtgcatgctgtgtcttggggccctttgggacgagtgctgtgactgtgttgattgaccctcctttcatttctgtcatgccacttgacaatgaaggaactgtatcagttgacctatagaatagcccacattccggatttgactgcttcctgtggaagtcctaccatactgactgttctgtcataaacaattttcataggattatgttaaggtatgtgtaatcctcgaaattatagtgacacacctccaacttcaaagagcacagtggaggagctgcatgaaccgatcccttctctcttccgggcactcacagaaggagatactcagttgaattggaacatcgtttctttccctgttgcagaagaactttcacatcatgagaatctggtttcatttttagaaactgtgaaccagccacaccaccagaatgtgtctgtccccagcaataatgttcacgcgccttattccagtgacaaagaacacatgtgtactgtggtttattttgatgactgcatgtccatacatcagtgtaaaatatcctgtgagtccatgggagcatccaaatatcgctggtttcataatgcctgctgcgagtgcattggtccagaatgtattgactatggtagtaaaactgtcaaatgtatgaactgcatgttttaaagaagacaaatgcaaaccaaagcaacttagtaaaataataggtataaaaagttattctgtaagtctgttggttgtatcttgtatcagaatcccagtaagttaagttgtaaagactttggaataagtttcttttaaaaatatgacatagccagtgatgtgtttaattatataactgttcttactgattttattgccccctagcaataagccctttcctttgaatacatgtacaactttggtcatatgagaagcaggtgcgcagagaattccttgaaagatctgaggtttttaacatgaagtctgacgtggttttcctctagcattccaaaaggtttttgctttgaaagtgttagcagaagcatgttgatgtgaattatgatttcttcatgtgctactgttagcacactgagtttttatagttgcacatcattcctcattgtgccttgttttatccattttataaatagagtagatatttgatataccactctgataactcatataaaaatatcatcataaaaagcttaatttcatcccttttatgttggttttaaaaggtaaatgcttaccatattttataattgagaactcttacatagtagaatccattctataatacatgtgttgacaaagctttagagaaagtttcctattctcttccatttcccctgcccaaagtgctgacataggcagtgatgaagaatctttaccaagattttcagggtgtacctatgaaattgctttaaatgcactgctggtgtaaataattagcaagcaaagcgtttctgtgacttcaggtaccagcttaaagagcactagggatggggaacgaatgccaaatcagactccacctagagcaccaggaaacagcttgtaccctggtagggaaatggtgttgctgaaaggggaggctgagccagtgcgagactgaacttgtgcagccttagccaagacaaagcagtgtttttcagcagacggctgatgggacaggaattgaagaagagaattgactcgtatgaacaggacagggtgaaaatgctgggaattattatgggaaacaaaactatctatgttcatattttgtaatatttcatttgttaagtttatatctggatataatgttctttttaaacaagtataatcatatcgtcggaggttaagattatgaaattttagaatctctattcaagatgatgttcactccaaatacactacagaatttagtcaacattttatataatgtttcaataaatgtttctttcaataaagatactatgtgcccttcatagt

SEQ ID NO: 196641 - DNA, 1119 bp, Homo sapiens
  Payload ID: 18787
  Gene Name: twisted gastrulation BMP signaling modulator 1
  ENST ID: ENST00000581641
  CDS Start-End: 109-663
cagcgcgccccgggctcggccgacccggcggggatctaggggtgggcgacttcgcgggaccgtggcgcatgtttcctgggagttactgatcatcttctttgaagaaacatgaagttacactatgttgctgtgcttactctagccatcctgatgttcctgacatggcttccagaatcactgagctgtaacaaagcactctgtgctagtgatgtgagcaaatgcctcattcaggagctctgccagtgccggccgggagaaggcaattgctcctgctgtaaggagtgcatgctgtgtcttggggccctttgggacgagtgctgtgactgtgttggtatgtgtaatcctcgaaattatagtgacacacctccaacttcaaagagcacagtggaggagctgcatgaaccgatcccttctctcttccgggcactcacagaaggagatactcagttgaattggaacatcgtttctttccctgttgcagaagaactttcacatcatgagaatctggtttcatttttagaaactgtgaaccagccacaccaccagaatgtgtctgtccccagcaataatgttcacgcgccttattccagtgacaaaggtaactgccaacagttgactttttccattccgccccctcatgtggtctgtccatgtaatctataaaacctatataagaccatcttttggagcagccttttggttttgaatttgtatcatctcacataaattctagactcaataaccctgatcccatcatatctagaggcacatgccagaaggataagagaaaaaaaatatctccaatccttgagtagataaaaaggcatgtcggctgggcgtggtggctcatgcctgtaatcccagcactttgggaggccgaggcaggtggatcacgaggtcaagagttcgagaccagcctgaccaacatggtgaaaccccatctctactaagaatacaaaaattagccgggtgtggtggcgggcgcctgtagtccagctacgagggaggctgaggcaggagaattgcttgaacctgagagtcggaggttgctgtgaaccgagatcacaccactgcactccagcctgggtggcagagcaagactccgtctcaccaaaaaaa

SEQ ID NO: 196642 - DNA, 5274 bp, Homo sapiens
  Payload ID: 18788
  Gene Name: two pore segment channel 1
  Uniprot ID: Q9ULQ1
  ENST ID: ENST00000335509
  CDS Start-End: 315-2765
gagaggacggtaggcggtggataggagagctggcgcagctgccctggtggcagtggctgaagtggcggcggcttcggcggctgcggcggctgcaacagcttcgggctcggggttttggcggcggcgccggcgggctaggctgcgcggtgcggaccccggcgcgcggtccgggttgctggggcggcgcgtaagatgcctctaatggaggagtttctgagcagcacccctggcccagtggctttgaaagggagctcaaaccagagactatttcaagccctggatatcatatcctgagggccacaggagaagagaacatggctgtgagtttggatgacgacgtgccgctcatcctgaccttggatgagggtggcagtgccccactggctccctccaacggcctgggccaagaagagctacctagcaaaaatggcggcagctatgccatccacgactcccaggcccccagtctcagctctgggggtgagagttccccctccagccccgcacacaactgggagatgaattaccaagaggcagcaatctacctccaggaaggcgagaacaacgacaagttcttcacccaccccaaggatgccaaggcgctggcggcctacctctttgcacacaatcacctcttctacctgatggagctggccacggccctgctgctgctgctgctctccctgtgcgaggcccccgccgtccccgcactccggcttggcatctatgtccacgccaccctggagctgtttgccctgatggtggtagtgtttgaactctgcatgaagttacgctggctgggcctccacaccttcatccggcacaagcggaccatggtcaagacctcggtgctggtggtgcagtttgtcgaggccatcgtggtgttggtacggcagatgtcccatgtgcgggtgacccgagcactgcgctgcattttcctggtggactgtcggtattgcggtggcgtccggcgcaacctgcggcagatcttccagtccctgccgcccttcatggacatcctcctgctgctgctgttcttcatgatcatctttgccatcctcggtttctacttgttctcccctaacccttcagacccctacttcagcaccctggagaacagcatcgtcagtctgtttgtccttctgaccacagccaatttcccagatgtgatgatgccctcctactcccggaacccctggtcctgcgtcttcttcatcgtgtacctctccatcgagctgtatttcatcatgaacctgcttctggctgtggtgttcgacaccttcaatgacattgagaaacgcaagttcaagtctttgctactgcacaagcgaaccgctatccagcatgcctaccgcctgctcatcagccagaggaggcctgccggcatctcctacaggcagtttgaaggcctcatgcgcttctacaagccccggatgagtgccagggagcgctatcttaccttcaaggccctgaatcagaacaacacacccctgctcagcctaaaggacttttacgatatctacgaagttgctgctttgaagtggaaggccaagaaaaacagagagcactggtttgatgagcttcccaggacggcgctcctcatcttcaaaggtattaatatccttgtgaagtccaaggccttccagtatttcatgtacttggtggtggcagtcaacggggtctggatcctcgtggagacatttatgctgaaaggtgggaacttcttctccaagcacgtgccctggagttacctcgtctttctaactatctatggggtggagctgttcctgaaggttgccggcctgggccctgtggagtacttgtcttccggatggaacttgtttgacttctccgtgacagtgttcgccttcctgggactgctggcgctggccctcaacatggagcccttctatttcatcgtggtcctgcgccccctccagctgctgaggttgtttaagttgaaggagcgctaccgcaacgtgctggacaccatgttcgagctgctgccccggatggccagcctgggcctcaccctgctcatcttttactactccttcgccatcgtgggcatggagttcttctgcgggatcgtcttccccaactgctgcaacacgagtacagtggcagatgcctaccgctggcgcaaccacaccgtgggcaacaggaccgtggtggaggaaggctactattatctcaataattttgacaacatcctcaacagctttgtgaccctgtttgagctcacagttgtcaacaactggtacatcatcatggaaggcgtcacctctcagacctcccactggagccgcctctacttcatgaccttttacattgtgaccatggtggtgatgacgatcattgtcgcctttatcctcgaggccttcgtcttccgaatgaactacagccgcaagaaccaggactcggaagttgatggtggcatcacccttgagaaggaaatctccaaagaagagctggttgccgtcctggagctctaccgggaggcacggggggcctcctcggatgtcaccaggctgctggagaccctctcccagatggagagataccagcaacattccatggtgtttctgggacggcgatcaaggaccaagagcgacctgagcctgaagatgtaccaggaggagatccaggagtggtatgaggagcatgccagggagcaagagcagcagcgacaactcagcagcagtgcagcccccgccgcccagcagcccccaggcagccgccagcgctcccagaccgttacctagcccagcgcccgaaagccgtctcttctatgcaataacacaatagtattactctactgcgatgtacggaactgcggtgtgtgtacacatactcacgtatatgcacatatttatatacaggaagaaaaaagacagacaagatggggcttggtttataaccaccttgccctgtcttccttaactccagaagccagtttggtgaggggtgggggtgcggccaccaggtctgagctcttcctactgtggaaggctccagaaggcccttcacaaggagacccctcacctggatccagtcgactgcggggcttgcccctcatgtgggctggcctccatcggccacgtccaaagctgtcactgctactgcttcaggctcacatccccccgacctgatggcgtgcccgccccctctccctgcggcccatgccacaggtttctgtgttttgctttagggacagaaccacttaggaaggaaagaactcccggtctccagggtggtatttcagtgtctgtgataatgtcacgcaacacctcttcggggaccagtgcccaggatctaatggaagcggaattggggcaactgggcccatgtggccagagctcagttagccagtgccgggcggccacagattacactgaccaatctcctcccttggctctgcaagcctcccacccagccttctctggcttaacccttgttggcgaaaactcttccacagtggcctccttggggacccagaacccggaggaaggggcatgaggcaggaagtggggccgatgtctgcaacccagaccacttcgtggaatgggctcttgaccaaatccctttttttgcgatttacccgttcaagcaaaacaacgttttggttaactaaggattgtgctaaagccgataccaggtccttcacacgtgtgcactaggaacaggagcgaacagcacagagagacgctccctgtgggacgcagcagccccgtggccccggcccagttcccagccaccctccctggctctgctcacaccagagatttccatagcaggagcggttggtgcagaagtaggttcagatgaacctcagttaacgtcgccacccctcctcccaccatggtaccctgtaggagccctgtatgacatctgagcgtggtggaggtaggagggttgccagctgcagtgaccctgccacagaggcagggtcagtgcagaggtcgctttggttccgcttccctgggccacagaacggaacacagcataggttctgcagcaggagccgcagtggcaggatggagggtgcgaagggcaaggagtgcactgctgggcattcctggccagccccggccctctggtgcctgcttcctgtgacttcagaaggcaggtggacagagcctccctctggccttgtcctcttcccagccacagaacgggcagggtggcacccgaccccaggggagcagtacctggtcccccaccccctcctcccaaccacctccaaggccaagctgggtcccatagccagcacggcatggttctccccttccccccttcccaggtcaggggagttggacaagtagcaggtgtttgtttttaaagcacagccctttgggaaagcaacacattattgagactcactgtgattcccccgggagtcagactggctttgtcctcttcctctctggagggccatgggccatcagcaggagctccacatcgagccccaggccagaaccccctccctttcacagagagggaactttattgcacaattgggtgccttttagcttttgtgtgttgaaatgggcgttttggaagcaagggtcaggggacagcttctaaaggtgtgagtctctgacctgagcatctgggcctcgcctgggcccttcttcctccccaggggtggaaacgtggaggggccagcagcaccccggggtctgcccaggggagtcaaggccccgaggtgggggggcctattccaggaggagtgggatctcggccctgtccagagcgagttaatgtgtccatctgcccaaccctgtcctgagaaaggacctggttttggccaggacctgacaaatacccaatggcagcagtgtcaacagacgggagtccagccagggtgggtgcccttgtcattgaggttagggacagctatccccaggttatgcctggccccacccagcagggagttggggtccccccacaggctgtgagctctgtgggccctgggatgtgatctagctcagatgccctctcatccttgatgtcatagttgagtgcacccaagtggcacccactggcggccaggggcacagcctggtggtggtggcaatagaactgtgcccctcctcagctcctcgcttcccctcccacagccccagccttactccaccatgcggacaatcattttgtacggatcacgggagcaatgctgtacggttttgtacactggtggtttgtttcctagaaaacccattgtgtctctggatttctagcacattactaaaagagcctctgctttgtaaa

SEQ ID NO: 196643 - DNA, 2558 bp, Homo sapiens
  Payload ID: 18788
  Gene Name: two pore segment channel 1
  ENST ID: ENST00000392569
  CDS Start-End: 194-2440
ccctttcctcctttggcttaagcctttggcaggacagattttgggctggaggccagcaattcaactgggagggctctgtgccagttcttgcctttctgaagatggcggcagctatgccatccacgactcccaggcccccagtctcagctctgggggtgagagttccccctccagccccgcacacaactgggagatgaattaccaagaggcagcaatctacctccaggaaggcgagaacaacgacaagttcttcacccaccccaaggatgccaaggcgctggcggcctacctctttgcacacaatcacctcttctacctgatggagctggccacggccctgctgctgctgctgctctccctgtgcgaggcccccgccgtccccgcactccggcttggcatctatgtccacgccaccctggagctgtttgccctgatggtggtagtgtttgaactctgcatgaagttacgctggctgggcctccacaccttcatccggcacaagcggaccatggtcaagacctcggtgctggtggtgcagtttgtcgaggccatcgtggtgttggtacggcagatgtcccatgtgcgggtgacccgagcactgcgctgcattttcctggtggactgtcggtattgcggtggcgtccggcgcaacctgcggcagatcttccagtccctgccgcccttcatggacatcctcctgctgctgctgttcttcatgatcatctttgccatcctcggtttctacttgttctcccctaacccttcagacccctacttcagcaccctggagaacagcatcgtcagtctgtttgtccttctgaccacagccaatttcccagatgtgatgatgccctcctactcccggaacccctggtcctgcgtcttcttcatcgtgtacctctccatcgagctgtatttcatcatgaacctgcttctggctgtggtgttcgacaccttcaatgacattgagaaacgcaagttcaagtctttgctactgcacaagcgaaccgctatccagcatgcctaccgcctgctcatcagccagaggaggcctgccggcatctcctacaggcagtttgaaggcctcatgcgcttctacaagccccggatgagtgccagggagcgctatcttaccttcaaggccctgaatcagaacaacacacccctgctcagcctaaaggacttttacgatatctacgaagttgctgctttgaagtggaaggccaagaaaaacagagagcactggtttgatgagcttcccaggacggcgctcctcatcttcaaaggtattaatatccttgtgaagtccaaggccttccagtatttcatgtacttggtggtggcagtcaacggggtctggatcctcgtggagacatttatgctgaaaggtgggaacttcttctccaagcacgtgccctggagttacctcgtctttctaactatctatggggtggagctgttcctgaaggttgccggcctgggccctgtggagtacttgtcttccggatggaacttgtttgacttctccgtgacagtgttcgccttcctgggactgctggcgctggccctcaacatggagcccttctatttcatcgtggtcctgcgccccctccagctgctgaggttgtttaagttgaaggagcgctaccgcaacgtgctggacaccatgttcgagctgctgccccggatggccagcctgggcctcaccctgctcatcttttactactccttcgccatcgtgggcatggagttcttctgcgggatcgtcttccccaactgctgcaacacgagtacagtggcagatgcctaccgctggcgcaaccacaccgtgggcaacaggaccgtggtggaggaaggctactattatctcaataattttgacaacatcctcaacagctttgtgaccctgtttgagctcacagttgtcaacaactggtacatcatcatggaaggcgtcacctctcagacctcccactggagccgcctctacttcatgaccttttacattgtgaccatggtggtgatgacgatcattgtcgcctttatcctcgaggccttcgtcttccgaatgaactacagccgcaagaaccaggactcggaagttgatggtggcatcacccttgagaaggaaatctccaaagaagagctggttgccgtcctggagctctaccgggaggcacggggggcctcctcggatgtcaccaggctgctggagaccctctcccagatggagagataccagcaacattccatggtgtttctgggacggcgatcaaggaccaagagcgacctgagcctgaagatgtaccaggaggagatccaggagtggtatgaggagcatgccagggagcaagagcagcagcgacaactcagcagcagtgcagcccccgccgcccagcagcccccaggcagccgccagcgctcccagaccgttacctagcccagcgcccgaaagccgtctcttctatgcaataacacaatagtattactctactgcgatgtacggaactgcggtgtgtgtacacatactcacgtatatgcacatatttatatacagg

SEQ ID NO: 196644 - DNA, 5173 bp, Homo sapiens
  Payload ID: 18788
  Gene Name: two pore segment channel 1
  Uniprot ID: Q9ULQ1
  ENST ID: ENST00000541517
  CDS Start-End: 1-2667
atggagtcttgctacattgcccaggctggtcttgaactgctaggctcaagcagttctcccaccttgacctcccaaagcgctgagattacagaagatgcctctaatggaggagtttctgagcagcacccctggcccagtggctttgaaagggagctcaaaccagagactatttcaagccctggatatcatatcctgagggccacaggagaagagaacatggctgtgagtttggatgacgacgtgccgctcatcctgaccttggatgagggtggcagtgccccactggctccctccaacggcctgggccaagaagagctacctagcaaaaatggcggcagctatgccatccacgactcccaggcccccagtctcagctctgggggtgagagttccccctccagccccgcacacaactgggagatgaattaccaagaggcagcaatctacctccaggaaggcgagaacaacgacaagttcttcacccaccccaaggatgccaaggcgctggcggcctacctctttgcacacaatcacctcttctacctgatggagctggccacggccctgctgctgctgctgctctccctgtgcgaggcccccgccgtccccgcactccggcttggcatctatgtccacgccaccctggagctgtttgccctgatggtggtagtgtttgaactctgcatgaagttacgctggctgggcctccacaccttcatccggcacaagcggaccatggtcaagacctcggtgctggtggtgcagtttgtcgaggccatcgtggtgttggtacggcagatgtcccatgtgcgggtgacccgagcactgcgctgcattttcctggtggactgtcggtattgcggtggcgtccggcgcaacctgcggcagatcttccagtccctgccgcccttcatggacatcctcctgctgctgctgttcttcatgatcatctttgccatcctcggtttctacttgttctcccctaacccttcagacccctacttcagcaccctggagaacagcatcgtcagtctgtttgtccttctgaccacagccaatttcccagatgtgatgatgccctcctactcccggaacccctggtcctgcgtcttcttcatcgtgtacctctccatcgagctgtatttcatcatgaacctgcttctggctgtggtgttcgacaccttcaatgacattgagaaacgcaagttcaagtctttgctactgcacaagcgaaccgctatccagcatgcctaccgcctgctcatcagccagaggaggcctgccggcatctcctacaggcagtttgaaggcctcatgcgcttctacaagccccggatgagtgccagggagcgctatcttaccttcaaggccctgaatcagaacaacacacccctgctcagcctaaaggacttttacgatatctacgaagttgctgctttgaagtggaaggccaagaaaaacagagagcactggtttgatgagcttcccaggacggcgctcctcatcttcaaaggtattaatatccttgtgaagtccaaggccttccagtatttcatgtacttggtggtggcagtcaacggggtctggatcctcgtggagacatttatgctgaaaggtgggaacttcttctccaagcacgtgccctggagttacctcgtctttctaactatctatggggtggagctgttcctgaaggttgccggcctgggccctgtggagtacttgtcttccggatggaacttgtttgacttctccgtgacagtgttcgccttcctgggactgctggcgctggccctcaacatggagcccttctatttcatcgtggtcctgcgccccctccagctgctgaggttgtttaagttgaaggagcgctaccgcaacgtgctggacaccatgttcgagctgctgccccggatggccagcctgggcctcaccctgctcatcttttactactccttcgccatcgtgggcatggagttcttctgcgggatcgtcttccccaactgctgcaacacgagtacagtggcagatgcctaccgctggcgcaaccacaccgtgggcaacaggaccgtggtggaggaaggctactattatctcaataattttgacaacatcctcaacagctttgtgaccctgtttgagctcacagttgtcaacaactggtacatcatcatggaaggcgtcacctctcagacctcccactggagccgcctctacttcatgaccttttacattgtgaccatggtggtgatgacgatcattgtcgcctttatcctcgaggccttcgtcttccgaatgaactacagccgcaagaaccaggactcggaagttgatggtggcatcacccttgagaaggaaatctccaaagaagagctggttgccgtcctggagctctaccgggaggcacggggggcctcctcggatgtcaccaggctgctggagaccctctcccagatggagagataccagcaacattccatggtgtttctgggacggcgatcaaggaccaagagcgacctgagcctgaagatgtaccaggaggagatccaggagtggtatgaggagcatgccagggagcaagagcagcagcgacaactcagcagcagtgcagcccccgccgcccagcagcccccaggcagccgccagcgctcccagaccgttacctagcccagcgcccgaaagccgtctcttctatgcaataacacaatagtattactctactgcgatgtacggaactgcggtgtgtgtacacatactcacgtatatgcacatatttatatacaggaagaaaaaagacagacaagatggggcttggtttataaccaccttgccctgtcttccttaactccagaagccagtttggtgaggggtgggggtgcggccaccaggtctgagctcttcctactgtggaaggctccagaaggcccttcacaaggagacccctcacctggatccagtcgactgcggggcttgcccctcatgtgggctggcctccatcggccacgtccaaagctgtcactgctactgcttcaggctcacatccccccgacctgatggcgtgcccgccccctctccctgcggcccatgccacaggtttctgtgttttgctttagggacagaaccacttaggaaggaaagaactcccggtctccagggtggtatttcagtgtctgtgataatgtcacgcaacacctcttcggggaccagtgcccaggatctaatggaagcggaattggggcaactgggcccatgtggccagagctcagttagccagtgccgggcggccacagattacactgaccaatctcctcccttggctctgcaagcctcccacccagccttctctggcttaacccttgttggcgaaaactcttccacagtggcctccttggggacccagaacccggaggaaggggcatgaggcaggaagtggggccgatgtctgcaacccagaccacttcgtggaatgggctcttgaccaaatccctttttttgcgatttacccgttcaagcaaaacaacgttttggttaactaaggattgtgctaaagccgataccaggtccttcacacgtgtgcactaggaacaggagcgaacagcacagagagacgctccctgtgggacgcagcagccccgtggccccggcccagttcccagccaccctccctggctctgctcacaccagagatttccatagcaggagcggttggtgcagaagtaggttcagatgaacctcagttaacgtcgccacccctcctcccaccatggtaccctgtaggagccctgtatgacatctgagcgtggtggaggtaggagggttgccagctgcagtgaccctgccacagaggcagggtcagtgcagaggtcgctttggttccgcttccctgggccacagaacggaacacagcataggttctgcagcaggagccgcagtggcaggatggagggtgcgaagggcaaggagtgcactgctgggcattcctggccagccccggccctctggtgcctgcttcctgtgacttcagaaggcaggtggacagagcctccctctggccttgtcctcttcccagccacagaacgggcagggtggcacccgaccccaggggagcagtacctggtcccccaccccctcctcccaaccacctccaaggccaagctgggtcccatagccagcacggcatggttctccccttccccccttcccaggtcaggggagttggacaagtagcaggtgtttgtttttaaagcacagccctttgggaaagcaacacattattgagactcactgtgattcccccgggagtcagactggctttgtcctcttcctctctggagggccatgggccatcagcaggagctccacatcgagccccaggccagaaccccctccctttcacagagagggaactttattgcacaattgggtgccttttagcttttgtgtgttgaaatgggcgttttggaagcaagggtcaggggacagcttctaaaggtgtgagtctctgacctgagcatctgggcctcgcctgggcccttcttcctccccaggggtggaaacgtggaggggccagcagcaccccggggtctgcccaggggagtcaaggccccgaggtgggggggcctattccaggaggagtgggatctcggccctgtccagagcgagttaatgtgtccatctgcccaaccctgtcctgagaaaggacctggttttggccaggacctgacaaatacccaatggcagcagtgtcaacagacgggagtccagccagggtgggtgcccttgtcattgaggttagggacagctatccccaggttatgcctggccccacccagcagggagttggggtccccccacaggctgtgagctctgtgggccctgggatgtgatctagctcagatgccctctcatccttgatgtcatagttgagtgcacccaagtggcacccactggcggccaggggcacagcctggtggtggtggcaatagaactgtgcccctcctcagctcctcgcttcccctcccacagccccagccttactccaccatgcggacaatcattttgtacggatcacgggagcaatgctgtacggttttgtacactggtggtttgtttcctagaaaacccattgtgtctctggatttctagcacattactaaaagagcctctgctttgt

SEQ ID NO: 196645 - DNA, 828 bp, Homo sapiens
  Payload ID: 18788
  Gene Name: two pore segment channel 1
  ENST ID: ENST00000552542
  CDS Start-End: 469-828
acatttgcccagggctctgcttgggtttggagcctttactaacgtgtgtcaataatgcgggtccaccttccataccatcttgcaaccaattatcagaaagagaaggcctgagcagggggatgtgcattttgctttctttcggcgtagcatctcatgctagatttttatctgggggcctttgaagagccagccggcacagaagcatggtggcaacgctgtgcctggaaaactcatcagtgtcactctggtttattttcctctcctctttgagctctttcccatggtgtggggctctcagtgacaactggcaagcggcggggcggttgctcgttgtcattctggtaggcgctggtttccggagggctccgagtgctttatggcggcagctatgccatccacgactcccaggcccccagtctcagctctgggggtgagagttccccctccagccccgcacacaactgggagatgaattaccaagaggcagcaatctacctccaggaaggcgagaacaacgacaagttcttcacccaccccaaggatgccaaggcgctggcggcctacctctttgcacacaatcacctcttctacctgatggagctggccacggccctgctgctgctgctgctctccctgtgcgaggcccccgccgtccccgcactccggcttggcatctatgtccacgccaccctggagctgtttgccctgatggtggtagtgtttgaactctgcatgaagttacgctggctgggcctccacaccttcatccggcacaagcggaccatggtcaagacctcggtgctggtggtgcagtttgtcgaggccatc

SEQ ID NO: 196646 - DNA, 527 bp, Homo sapiens
  Payload ID: 18788
  Gene Name: two pore segment channel 1
  ENST ID: ENST00000550873
  CDS Start-End: 273-527
aacgagtaaggcggggaacaagggaggagtaaggggcgtggattcttcgtcccgccccttcttaaggaggcgggcagggagtaccgcatcggcggcgggcgagacctgcggaaggacgtgatagttggccaatcagagttcatcacgaagatgcctctaatggaggagtttctgagcagcacccctggcccagtggctttgaaagggagctcaaaccagagactatttcaagccctggatatcatatcctgagggccacaggagaagagaacatggctgtgagtttggatgacgacgtgccgctcatcctgaccttggatgagggtggcagtgccccactggctccctccaacggcctgggccaagaagagctacctagcaaaaatggcggcagctatgccatccacgactcccaggcccccagtctcagctctgggggtgagagttccccctccagccccgcacacaactgggagatgaattaccaagaggcagcaatctacctccaggaaggcgagaacaacgac

SEQ ID NO: 196647 - DNA, 570 bp, Homo sapiens
  Payload ID: 18788
  Gene Name: two pore segment channel 1
  ENST ID: ENST00000551099
  CDS Start-End: 272-570
gagaggacggtaggcggtggataggagagctggcgcagctgccctggtggcagtggctgaagtggcggcggcttcggcggctgcggcggctgcaacagcttcgggctcggggttttggcggcggcgccggcgggctaggctgcgcgaagatgcctctaatggaggagtttctgagcagcacccctggcccagtggctttgaaagggagctcaaaccagagactatttcaagccctggatatcatatcctgagggccacaggagaagagaacatggctgtgagtttggatgacgacgtgccgctcatcctgaccttggatgagggtggcagtgccccactggctccctccaacggcctgggccaagaagagctacctagcaaaagacgctgctgcatgctgtgctccagcaaacagaaaccttggattccctgcagggtcatttccgatgtggcgtgcaaagcagccagctgtttcgagggagcgtctgggccctgtgacatcagcatgtgggagtgttaccgtgtgtgcaaacagatggcggcagctatgccatccacgactcccaggcc

SEQ ID NO: 196648 - DNA, 530 bp, Homo sapiens
  Payload ID: 18788
  Gene Name: two pore segment channel 1
  ENST ID: ENST00000551096
  CDS Start-End: 158-530
agcggggttgagaggacggtaggcggtggataggagagctggcgcagctgccctggtggcagtggctgaagtggcggcggcttcggcggctgcggcggctgcaacagcttcgggctcggggttttggcggcggcgccggcgggctaggctgcgcgagatggagtcttgctacattgcccaggctggtcttgaactgctaggctcaagcagttctcccaccttgacctcccaaagcgctgagattacagaagatgcctctaatggaggagtttctgagcagcacccctggcccagtggctttgaaagggagctcaaaccagagactatttcaagccctggatatcatatcctgagggccacaggagaagagaacatggctgtgagtttggatgacgacgtgccgctcatcctgaccttggatgagggtggcagtgccccactggctccctccaacggcctgggccaagaagagctacctagcaaaaatggcggcagctatgccatccacgactcccaggcccccagtctca

SEQ ID NO: 196649 - DNA, 762 bp, Homo sapiens
  Payload ID: 18788
  Gene Name: two pore segment channel 1
  ENST ID: ENST00000552985
  CDS Start-End: 118-762
cgagactcggtgtctgactgacctttcttttcaccattcaatttattgttccgctcagttgtccccacctcctgaagtctgaccaatcagaagcaccgccattttgacctttcaccaatggaaagacttgggactccctctgggttggactcaacgaagatggagtcttgctacattgcccaggctggtcttgaactgctaggctcaagcagttctcccaccttgacctcccaaagcgctgagattacagaagatgcctctaatggaggagtttctgagcagcacccctggcccagtggctttgaaagggagctcaaaccagagactatttcaagccctggatatcatatcctgagggccacaggagaagagaacatggctgtgagtttggatgacgacgtgccgctcatcctgaccttggatgagggtggcagtgccccactggctccctccaacggcctgggccaagaagagctacctagcaaaaatggcggcagctatgccatccacgactcccaggcccccagtctcagctctgggggtgagagttccccctccagccccgcacacaactgggagatgaattaccaagaggcagcaatctacctccaggaaggcgagaacaacgacaagttcttcacccaccccaaggatgccaaggcgctggcggcctacctctttgcacacaatcacctcttctacctgatggagctggccacggccctgctgctgctgctgctctccctgtgcgaggcccccgcc

SEQ ID NO: 196650 - DNA, 526 bp, Homo sapiens
  Payload ID: 18788
  Gene Name: two pore segment channel 1
  ENST ID: ENST00000552642
  CDS Start-End: 148-526
gttgctaggttacccgccaatctcagaaggcgagactcggtgtctgactgacctttcttttcaccattcaatttattgttccgctcagttgtccccacctcctgaagtctgaccaatcagaagcaccgccattttgacctttcaccaatggaaagacttgggactccctctgggttggactcaacgaatggcggcagctatgccatccacgactcccaggcccccagtctcagctctgggggtgagagttccccctccagccccgcacacaactgggagatgaattaccaagaggcagcaatctacctccaggaaggcgagaacaacgacaagttcttcacccaccccaaggatgccaaggcgctggcggcctacctctttgcacacaatcacctcttctacctgatggagctggccacggccctgctgctgctgctgctctccctgtgcgaggcccccgccgtccccgcactccggcttggcatctatgtccacgccaccctggagctgtttgccctgatggtgg

SEQ ID NO: 196651 - DNA, 609 bp, Homo sapiens
  Payload ID: 18788
  Gene Name: two pore segment channel 1
  ENST ID: ENST00000547955
  CDS Start-End: 1-313
aggtgggaacttcttctccaagcacgtgccctggagttacctcgtctttctaactatctatggggtggagctgttcctgaaggttgccggcctgggccctgtggagtacttgtcttccggatggaacttgtttgacttctccgtgacagtgttcgccttcctgggactgctggcgctggccctcaacatggagcccttctatttcatcgtggtcctgcgccccctccagctgctgaggttgtttaagttgaaggagcgctaccgcaacgtgctggacaccatgttcgagctgctgccccggatggccaggtaaggggtcacctgtgagtctaccttcacagcctgggcctcaccctgctcatcttttactactccttcgccatcgtgggcatggagttcttctgcgggatcgtcttccccaactgctgcaacacgagtacagtggcagatgcctaccgctggcgcaaccacaccgtgggcaacaggaccgtggtggaggaaggctactattatctcaataattttgacaacatcctcaacagctttgtgaccctgtttgagctcacagttgtcaacaactggtacatcatcatggaaggcgtcacctct

SEQ ID NO: 196652 - DNA, 5345 bp, Homo sapiens
  Payload ID: 18788
  Gene Name: two pore segment channel 1
  Uniprot ID: Q9ULQ1
  ENST ID: ENST00000550785
  CDS Start-End: 170-2836
aggagagctggcgcagctgccctggtggcagtggctgaagtggcggcggcttcggcggctgcggcggctgcaacagcttcgggctcggggttttggcggcggcgccggcgggctaggctgcgcggtgcggaccccggcgcgcggtccgggttgctggggcggcgcgtagatggagtcttgctacattgcccaggctggtcttgaactgctaggctcaagcagttctcccaccttgacctcccaaagcgctgagattacagaagatgcctctaatggaggagtttctgagcagcacccctggcccagtggctttgaaagggagctcaaaccagagactatttcaagccctggatatcatatcctgagggccacaggagaagagaacatggctgtgagtttggatgacgacgtgccgctcatcctgaccttggatgagggtggcagtgccccactggctccctccaacggcctgggccaagaagagctacctagcaaaaatggcggcagctatgccatccacgactcccaggcccccagtctcagctctgggggtgagagttccccctccagccccgcacacaactgggagatgaattaccaagaggcagcaatctacctccaggaaggcgagaacaacgacaagttcttcacccaccccaaggatgccaaggcgctggcggcctacctctttgcacacaatcacctcttctacctgatggagctggccacggccctgctgctgctgctgctctccctgtgcgaggcccccgccgtccccgcactccggcttggcatctatgtccacgccaccctggagctgtttgccctgatggtggtagtgtttgaactctgcatgaagttacgctggctgggcctccacaccttcatccggcacaagcggaccatggtcaagacctcggtgctggtggtgcagtttgtcgaggccatcgtggtgttggtacggcagatgtcccatgtgcgggtgacccgagcactgcgctgcattttcctggtggactgtcggtattgcggtggcgtccggcgcaacctgcggcagatcttccagtccctgccgcccttcatggacatcctcctgctgctgctgttcttcatgatcatctttgccatcctcggtttctacttgttctcccctaacccttcagacccctacttcagcaccctggagaacagcatcgtcagtctgtttgtccttctgaccacagccaatttcccagatgtgatgatgccctcctactcccggaacccctggtcctgcgtcttcttcatcgtgtacctctccatcgagctgtatttcatcatgaacctgcttctggctgtggtgttcgacaccttcaatgacattgagaaacgcaagttcaagtctttgctactgcacaagcgaaccgctatccagcatgcctaccgcctgctcatcagccagaggaggcctgccggcatctcctacaggcagtttgaaggcctcatgcgcttctacaagccccggatgagtgccagggagcgctatcttaccttcaaggccctgaatcagaacaacacacccctgctcagcctaaaggacttttacgatatctacgaagttgctgctttgaagtggaaggccaagaaaaacagagagcactggtttgatgagcttcccaggacggcgctcctcatcttcaaaggtattaatatccttgtgaagtccaaggccttccagtatttcatgtacttggtggtggcagtcaacggggtctggatcctcgtggagacatttatgctgaaaggtgggaacttcttctccaagcacgtgccctggagttacctcgtctttctaactatctatggggtggagctgttcctgaaggttgccggcctgggccctgtggagtacttgtcttccggatggaacttgtttgacttctccgtgacagtgttcgccttcctgggactgctggcgctggccctcaacatggagcccttctatttcatcgtggtcctgcgccccctccagctgctgaggttgtttaagttgaaggagcgctaccgcaacgtgctggacaccatgttcgagctgctgccccggatggccagcctgggcctcaccctgctcatcttttactactccttcgccatcgtgggcatggagttcttctgcgggatcgtcttccccaactgctgcaacacgagtacagtggcagatgcctaccgctggcgcaaccacaccgtgggcaacaggaccgtggtggaggaaggctactattatctcaataattttgacaacatcctcaacagctttgtgaccctgtttgagctcacagttgtcaacaactggtacatcatcatggaaggcgtcacctctcagacctcccactggagccgcctctacttcatgaccttttacattgtgaccatggtggtgatgacgatcattgtcgcctttatcctcgaggccttcgtcttccgaatgaactacagccgcaagaaccaggactcggaagttgatggtggcatcacccttgagaaggaaatctccaaagaagagctggttgccgtcctggagctctaccgggaggcacggggggcctcctcggatgtcaccaggctgctggagaccctctcccagatggagagataccagcaacattccatggtgtttctgggacggcgatcaaggaccaagagcgacctgagcctgaagatgtaccaggaggagatccaggagtggtatgaggagcatgccagggagcaagagcagcagcgacaactcagcagcagtgcagcccccgccgcccagcagcccccaggcagccgccagcgctcccagaccgttacctagcccagcgcccgaaagccgtctcttctatgcaataacacaatagtattactctactgcgatgtacggaactgcggtgtgtgtacacatactcacgtatatgcacatatttatatacaggaagaaaaaagacagacaagatggggcttggtttataaccaccttgccctgtcttccttaactccagaagccagtttggtgaggggtgggggtgcggccaccaggtctgagctcttcctactgtggaaggctccagaaggcccttcacaaggagacccctcacctggatccagtcgactgcggggcttgcccctcatgtgggctggcctccatcggccacgtccaaagctgtcactgctactgcttcaggctcacatccccccgacctgatggcgtgcccgccccctctccctgcggcccatgccacaggtttctgtgttttgctttagggacagaaccacttaggaaggaaagaactcccggtctccagggtggtatttcagtgtctgtgataatgtcacgcaacacctcttcggggaccagtgcccaggatctaatggaagcggaattggggcaactgggcccatgtggccagagctcagttagccagtgccgggcggccacagattacactgaccaatctcctcccttggctctgcaagcctcccacccagccttctctggcttaacccttgttggcgaaaactcttccacagtggcctccttggggacccagaacccggaggaaggggcatgaggcaggaagtggggccgatgtctgcaacccagaccacttcgtggaatgggctcttgaccaaatccctttttttgcgatttacccgttcaagcaaaacaacgttttggttaactaaggattgtgctaaagccgataccaggtccttcacacgtgtgcactaggaacaggagcgaacagcacagagagacgctccctgtgggacgcagcagccccgtggccccggcccagttcccagccaccctccctggctctgctcacaccagagatttccatagcaggagcggttggtgcagaagtaggttcagatgaacctcagttaacgtcgccacccctcctcccaccatggtaccctgtaggagccctgtatgacatctgagcgtggtggaggtaggagggttgccagctgcagtgaccctgccacagaggcagggtcagtgcagaggtcgctttggttccgcttccctgggccacagaacggaacacagcataggttctgcagcaggagccgcagtggcaggatggagggtgcgaagggcaaggagtgcactgctgggcattcctggccagccccggccctctggtgcctgcttcctgtgacttcagaaggcaggtggacagagcctccctctggccttgtcctcttcccagccacagaacgggcagggtggcacccgaccccaggggagcagtacctggtcccccaccccctcctcccaaccacctccaaggccaagctgggtcccatagccagcacggcatggttctccccttccccccttcccaggtcaggggagttggacaagtagcaggtgtttgtttttaaagcacagccctttgggaaagcaacacattattgagactcactgtgattcccccgggagtcagactggctttgtcctcttcctctctggagggccatgggccatcagcaggagctccacatcgagccccaggccagaaccccctccctttcacagagagggaactttattgcacaattgggtgccttttagcttttgtgtgttgaaatgggcgttttggaagcaagggtcaggggacagcttctaaaggtgtgagtctctgacctgagcatctgggcctcgcctgggcccttcttcctccccaggggtggaaacgtggaggggccagcagcaccccggggtctgcccaggggagtcaaggccccgaggtgggggggcctattccaggaggagtgggatctcggccctgtccagagcgagttaatgtgtccatctgcccaaccctgtcctgagaaaggacctggttttggccaggacctgacaaatacccaatggcagcagtgtcaacagacgggagtccagccagggtgggtgcccttgtcattgaggttagggacagctatccccaggttatgcctggccccacccagcagggagttggggtccccccacaggctgtgagctctgtgggccctgggatgtgatctagctcagatgccctctcatccttgatgtcatagttgagtgcacccaagtggcacccactggcggccaggggcacagcctggtggtggtggcaatagaactgtgcccctcctcagctcctcgcttcccctcccacagccccagccttactccaccatgcggacaatcattttgtacggatcacgggagcaatgctgtacggttttgtacactggtggtttgtttcctagaaaacccattgtgtctctggatttctagcacattactaaaagagcctctgctttgtaaa

SEQ ID NO: 196653 - DNA, 593 bp, Homo sapiens
  Payload ID: 18788
  Gene Name: two pore segment channel 1
  ENST ID: ENST00000548465
  CDS Start-End: 159-593
gccaaacggtgtctttttgctcttaagcctgggtgccaagtgaatctctctcctcttccaatgcagatggcggcagctatgccatccacgactcccaggcccccagtctcagctctgggggtgagagttccccctccagccccgcacacaactgggagatgaattaccaagaggcagcaatctacctccaggaaggcgagaacaacgacaagttcttcacccaccccaaggatgccaaggcgctggcggcctacctctttgcacacaatcacctcttctacctgatggagctggccacggccctgctgctgctgctgctctccctgtgcgaggcccccgccgtccccgcactccggcttggcatctatgtccacgccaccctggagctgtttgccctgatggtggtagtgtttgaactctgcatgaagttacgctggctgggcctccacaccttcatccggcacaagcggaccatggtcaagacctcggtgctggtggtgcagtttgtcgaggccatcgtggtgttggtacggcagatgtcccatgtgcgggtgacccgagcactgcgctgcattttcctggtggactgtcgg

SEQ ID NO: 196654 - DNA, 544 bp, Homo sapiens
  Payload ID: 18788
  Gene Name: two pore segment channel 1
  ENST ID: ENST00000549279
  CDS Start-End: 246-544
gagctggcgcagctgccctggtggcagtggctgaagtggcggcggcttcggcggctgcggcggctgcaacagcttcgggctcggggttttggcggcggcgccggcgggctaggctgcgcgaagatgcctctaatggaggagtttctgagcagcacccctggcccagtggctttgaaagggagctcaaaccagagactatttcaagccctggatatcatatcctgagggccacaggagaagagaacatggctgtgagtttggatgacgacgtgccgctcatcctgaccttggatgagggtggcagtgccccactggctccctccaacggcctgggccaagaagagctacctagcaaaagacgctgctgcatgctgtgctccagcaaacagaaaccttggattccctgcagggtcatttccgatgtggcgtgcaaagcagccagctgtttcgagggagcgtctgggccctgtgacatcagcatgtgggagtgttaccgtgtgtgcaaacagatggcggcagctatgccatccacgactcccaggcc

SEQ ID NO: 196655 - DNA, 564 bp, Homo sapiens
  Payload ID: 18788
  Gene Name: two pore segment channel 1
  ENST ID: ENST00000547275
  CDS Start-End: 124-564
agaaggcgagactcggtgtctgactgacctttcttttcaccattcaatttattgttccgctcagttgtccccacctcctgaagtctgaccaatcagaagcaccgccattttgacctttcaccaatggaaagacttgggactccctctgggttggactcaacgaaagatgcctctaatggaggagtttctgagcagcacccctggcccagtggctttgaaagggagctcaaaccagagactatttcaagccctggatatcatatcctgagggccacaggagaagagaacatggctgtgagtttggatgacgacgtgccgctcatcctgaccttggatgagggtggcagtgccccactggctccctccaacggcctgggccaagaagagctacctagcaaaaatggcggcagctatgccatccacgactcccaggcccccagtctcagctctgggggtgagagttccccctccagccccgcacacaactgggagatgaattaccaagaggcagcaatctacctccaggaaggcgagaacaacgacaagttcttcacccaccccaag

SEQ ID NO: 196656 - DNA, 610 bp, Homo sapiens
  Payload ID: 18788
  Gene Name: two pore segment channel 1
  ENST ID: ENST00000546781
  CDS Start-End: 1-610
gcttctggctgtggtgttcgacaccttcaatgacattgagaaacgcaagttcaagtctttgctactgcacaagcgaaccgctatccagcatgcctaccgcctgctcatcagccagaggaggcctgccggcatctcctacaggcagtttgaaggcctcatgcgcttctacaagccccggatgagtgccagggagcgctatcttaccttcaaggccctgaatcagaacaacacacccctgctcagcctaaaggacttttacgatatctacgaagttgctgctttgaagtggaaggccaagaaaaacagagagcactggtttgatgagcttcccaggacggcgctcctcatcttcaaaggtattaatatccttgtgaagtccaaggccttccagtatttcatgtacttggtggtggcagtcaacggggtctggatcctcgtggagacatttatgctgaaagtctatggggtggagctgttcctgaaggttgccggcctgggccctgtggagtacttgtcttccggatggaacttgtttgacttctccgtgacagtgttcgccttcctgggactgctggcgctggccctcaacatggagcccttctatttcatc

SEQ ID NO: 196657 - DNA, 596 bp, Homo sapiens
  Payload ID: 18788
  Gene Name: two pore segment channel 1
  ENST ID: ENST00000552897
  CDS Start-End: 274-596
ggtaggcggtggataggagagctggcgcagctgccctggtggcagtggctgaagtggcggcggcttcggcggctgcggcggctgcaacagcttcgggctcggggttttggcggcggcgccggcgggctaggctgcgcggtgcggaccccggcgcgcggtccgggttgctggggcggcgcgtatggcggcagctatgccatccacgactcccaggcccccagtctcagctctgggggtgagagttccccctccagccccgcacacaactgggagatgaattaccaagaggcagcaatctacctccaggaaggcgagaacaacgacaagttcttcacccaccccaaggatgccaaggcgctggcggcctacctctttgcacacaatcacctcttctacctgatggagctggccacggccctgctgctgctgctgctctccctgtgcgaggcccccgccgtccccgcactccggcttggcatctatgtccacgccaccctggagctgtttgccctgatggtggtagtgtttgaactctgcatgaagttacgctggctgggcctccacaccttcatccggcacaagcggaccatggtcaa

SEQ ID NO: 196658 - DNA, 2931 bp, Homo sapiens
  Payload ID: 18789
  Gene Name: two pore segment channel 2
  Uniprot ID: Q8NHX9
  ENST ID: ENST00000294309
  CDS Start-End: 102-2360
agcaaaaacgccagggacggggtctccgcgcctgcgcagtgaagctgggcgccttcggggcttgagcttctgagggtcgggtccagcgcgtgggctgctggatggcggaaccccaggcggagtcggagcccctgctgggcggggcccgcggcggtggcggcgactggccggcggggctgaccacttaccgcagcatccaagtcggccctggtgccgcggccaggtgggacctctgcattgatcaggctgtggtcttcatcgaagatgctattcagtaccgctccatcaaccaccgggtggatgccagctcgatgtggctttaccgacggtattactcgaacgtatgccaacggactttgagcttcaccatcttcttgatcctgtttttggcttttatcgagaccccatcctcactcaccagcacggcggacgtgcgctaccgcgctgctccctgggagccgccctgcggcctgaccgagagtgtcgaggtgctctgcctgctggtctttgcggccgacctctctgtgaagggttacctgttcgggtgggcccatttccagaaaaacctttggctgctgggctacctcgtggtgctggtggtgtctctggtggactggaccgtgtccctgagtctcgtgtgtcatgagcccctgcggatccgccggcttctccgtcccttcttcctgctgcagaactcctctatgatgaagaagaccttgaaatgcatccgctggtcgctgccggaaatggccagcgtcgggctgctgctggccatccacctgtgcctcttcaccatgttcggaatgctgctgttcgctggtgggaagcaggatgatgggcaggacagggagaggctgacctacttccagaacctgcctgagtctctgacttccctcctggtgctgctgaccacggccaacaaccccgatgtgatgattcctgcgtattccaagaaccgggcctatgccatcttcttcatagtcttcactgtgataggaagcctgtttctgatgaacctgctgacagccatcatctacagtcagttccggggctacctgatgaaatctctccagacctcgctgtttcggaggcggctgggaacccgggctgcctttgaagtcctatcctccatggtgggggagggaggagccttccctcaggcagttggggtgaagccccagaacttgctgcaggtgcttcagaaggtccagctggacagctcccacaaacaggccatgatggagaaggtgcgttcctatggcagtgttctgctctcagctgaggagtttcagaagctcttcaacgagcttgacagaagtgtggttaaagagcacccgccgaggcccgagtaccagtctccgtttctgcagagcgcccagttcctcttcggccactactactttgactacctggggaacctcatcgccctggcaaacctggtgtccatttgcgtgttcctggtgctggatgcagatgtgctgcctgctgagcgtgatgacttcatcctggggattctcaactgcgtcttcattgtgtactacctgttggagatgctgctcaaggtctttgccctgggcctgcgagggtacctgtcctaccccagcaacgtgtttgacgggctcctcaccgttgtcctgctggttttggagatctcaactctggctgtgtaccgattgccacacccaggctggaggccggagatggtgggcctgctgtcgctgtgggacatgacccgcatgctgaacatgctcatcgtgttccgcttcctgcgtatcatccccagcatgaagctgatggccgtggtggccagtaccgtcctgggcctggtgcagaacatgcgtgcgtttggcgggatcctggtggtggtctactacgtatttgccatcattgggatcaacttgtttagaggcgtcattgtggctcttcctggaaacagcagcctggcccctgccaatggctcggcgccctgtgggagcttcgagcagctggagtactgggccaacaacttcgatgactttgcggctgccctggtcactctgtggaacttgatggtggtgaacaactggcaggtgtttctggatgcatatcggcgctactcaggcccgtggtccaagatctattttgtattgtggtggctggtgtcgtctgtcatctgggtcaacctgtttctggccctgattctggagaacttccttcacaagtgggacccccgcagccacctgcagccccttgctgggaccccagaggccacctaccagatgactgtggagctcctgttcagggatattctggaggagcccggggaggatgagctcacagagaggctgagccagcacccgcacctgtggctgtgcaggtgacgtccgggctgccgtcccagcaggggcggcaggagagagaggctggcctacacaggtgcccgtcatggaagaggcggccatgctgtggccagccaggcaggaagagacctttcctctgacggaccactaagctggggacaggaaccaagtcctttgcgtgtggcccaacaaccatctacagaacagctgctggtgcttcagggaggcgccgtgccctccgctttcttttatagctgcttcagtgagaattccctcgtcgactccacagggacctttcagacaaaaatgcaagaagcagcggcctcccctgtcccctgcagcttccgtggtgcctttgctgccggcagcccttggggaccacaggcctgaccagggcctgcacaggttaaccgtcagacttccggggcattcaggtggggatgctggtggtttgacatggagagaaccttgactgtgttttattatttcatggcttgtatgagtgtgactgggtgtgtttctttagggttctgattgccagttattttcatcaataagtcttgcaaagaatgggattgtcattcttcacttc

SEQ ID NO: 196659 - DNA, 2000 bp, Homo sapiens
  Payload ID: 18789
  Gene Name: two pore segment channel 2
  ENST ID: ENST00000542467
  CDS Start-End: 38-1750
agcttctgagggtcgggtccagcgcgtgggctgctggatggcggaaccccaggcggagtcggagcccctgctgggcggggcccgcggcggtggcggcgactggccggcggggctgaccacttaccgcagcatccaagtcggccctggtgccgcggccaggtgggacctctgcattgatcaggctgtggtcttcatcgaagatgctattcagtaccgctccatcaaccaccgggtggatgccagctcgatgtggctttaccgacggtattactcgaacgtatgccaacggactttgagcttcaccatcttcttgatcctgtttttggcttttatcgagaccccatcctcactcaccagcacggcggacgtgcgctaccgcgctgctccctgggagccgccctgcggcctgaccgagagtgtcgaggtgctctgcctgctggtctttgcggccgacctctctgtgaagggttacctgttcgggtgggcccatttccagaaaaacctttggctgctgggctacctcgtggtgctggtggtgtctctggtggactggaccgtgtccctgagtctcgtgtgtcatgagcccctgcggatccgccggcttctccgtcccttcttcctgctgcagaactcctctatgatgaagaagaccttgaaatgcatccgctggtcgctgccggaaatggccagcgtcgggctgctgctggccatccacctgtgcctcttcaccatgttcggaatgctgctgttcgctggtgggaagcaggatgatgggcaggacagggagaggctgacctacttccagaacctgcctgagtctctgacttccctcctggtgctgctgaccacggccaacaaccccgatgtgatgattcctgcgtattccaagaaccgggcctatgccatcttcttcatagtcttcactgtgataggaagcctgtttctgatgaacctgctgacagccatcatctacagtcagttccggggctacctgatgaaatctctccagacctcgctgtttcggaggcggctgggaacccgggctgcctttgaagtcctatcctccatggtgggggagggaggagccttccctcaggcagttggggtgaagccccagaacttgctgcaggtgcttcagaaggtccagctggacagctcccacaaacaggccatgatggagaaggtgcgttcctatggcagtgttctgctctcagctgaggagtttcagaagctcttcaacgagcttgacagaagtgtggttaaagagcacccgccgaggcccgagtaccagtctccgtttctgcagagcgcccagttcctcttcggccactactactttgactacctggggaacctcatcgccctggcaaacctggtgtccatttgcgtgttcctggtgctggatgcagatgtgctgcctgctgagcgtgatgacttcatcctggggattctcaactgcgtcttcattgtgtactacctgttggagatgctgctcaaggtctttgccctgggcctgcgagggtacctgtcctaccccagcaacgtgtttgacgggctcctcaccgttgtcctgctgaacttccttcacaagtgggacccccgcagccacctgcagccccttgctgggaccccagaggccacctaccagatgactgtggagctcctgttcagggatattctggaggagcccggggaggatgagctcacagagaggctgagccagcacccgcacctgtggctgtgcaggtgacgtccgggctgccgtcccagcaggggcggcaggagagagaggctggcctacacaggtgcccgtcatggaagaggcggccatgctgtggccagccaggcaggaagagacctttcctctgacggaccactaagctggggacaggaaccaagtcctttgcgtgtggcccaacaaccatctacagaacagctgctggtgcttcagggaggcgccgtgccctccgctttcttttatagctgcttcagtgagaatt

SEQ ID NO: 196660 - DNA, 2914 bp, Homo sapiens
  Payload ID: 18790
  Gene Name: TXK tyrosine kinase
  Uniprot ID: P42681
  ENST ID: ENST00000264316
  CDS Start-End: 87-1670
gatttcagttgaaagatgtgtttttgtgagtagagcaccgcagaagaactgaagactgttgtgtgctccccgcagaaggggctaccatgatcctttcctcctataacaccatccagtcggttttctgttgctgctgttgctgttcagtgcagaagcgacaaatgagaacacagataagcctgagcacagatgaagagcttccagaaaaatacacccagcgtcgcaggccgtggctcagccaattgtcaaataagaagcaatccaacacgggccgtgtgcagccgtcaaaacgaaagccactgcctcccctcccaccctctgaggttgctgaagagaagatccaagtcaaggcactttatgattttctgcccagagaaccctgtaatttagccttaaggagagcagaagaatacctgatactggagaaatacaatcctcactggtggaaggcaagagaccgtttggggaatgaaggcttaatcccaagcaactatgtgactgaaaacaaaataactaatttagaaatatatgagtggtaccatagaaacattaccagaaatcaggcagaacatctattgagacaagagtctaaagaaggtgcatttattgtcagagattcaagacatttaggatcctacacaatttccgtatttatgggagctagaagaagtacggaggctgccataaaacattatcagataaaaaagaatgactcaggacagtggtatgtggctgaaagacacgcctttcaatcaatccctgagttaatctggtatcaccagcacaatgcagccggtctcatgactcgtctccgatatccagttgggctgatgggcagttgtttaccagccacagctgggtttagctacgaaaagtgggagatagatccatctgagttggcttttataaaggagattggaagcggtcagtttggagtggtccatttaggtgaatggcggtcacatatccaggtagctatcaaggccatcaatgaaggctccatgtctgaagaggatttcattgaagaggccaaagtgatgatgaaattatctcattcaaagctagtgcaactttatggagtctgtatacagcggaagcccctttacattgtgacagagttcatggaaaatggctgcctgcttaactatctcagggagaataaaggaaagcttaggaaggaaatgctactgagtgtatgccaggatatatgtgaaggaatggaatatctggagaggaatggctatattcatagggatttggcggcaaggaattgtttggtcagttcaacatgcatagtaaaaatttcagactttggaatgacaaggtacgttttggatgatgagtatgtcagttcttttggagccaagttcccaatcaagtggtcccctcctgaagtttttcttttcaataagtacagcagtaaatctgatgtctggtcatttggagttttaatgtgggaagtttttacagaaggaaaaatgccttttgaaaataagtcaaatttgcaagtcgtggaagctatttctgaaggcttcaggctatatcgccctcacctggcaccaatgtccatatatgaagtcatgtacagctgctggcatgagaaacctgaaggccgccctacatttgccgagctgctgcgggctgtcacagagattgcggaaacctggtgaccggaaacagaatgccaacccaaagagtcatcttgcaaaactgtcatttattgtgaatatcttcaccatatggggtcacttatggtgaatatctttcttcagagttgctgactcttgaaaacagtgcaaagatcacagtttttaaaagttttaaaaatttaagaatattcacacaatcgtttttctatgtgtgagagggatttgcacactcttatttttctgtaaaatatttcacatcccaaatgtgaagaagtgaaaaagacttcgcagcagtcttcattgtggtgctcttcatgatcatagccccaggaacccttgaggttcttcttcacaaggctgagagtgcttccttcttgaagacgagtgacattcatcacttcagtgatccatgcatagaatatgaaaataaattcttccaactcatgggataaaggggactcccttgaagaatttcatgtttttgggctgtatagctctttacagaaaatgcacctttataaatcacatgaatgttagtattctggaaatgtcttttgttaatataatcttcccatgttatttaacaaattgtttttgcacatatctgattatattgaaagcagttttttgcattcgagttttaaacactgttataaaatgtagccaaagctcacctttgaacagatcccggtgacattctatttccaggaaaatccggaacctgattttagttctgtgattttacactttttacatgtgagattggacagtttcagaggccttattttgtcatactaagtgtctcctgtaattttcaggaagatgatttgttctttccagaagaggagacaaaagcaagatagccaaatgtgacatcaagctccattgtttcggaaatccaggattttgaattcgagatgaaacaaccagcaatcacagttaaatcttaactttgcctgcactctttgtaggaatgatcagaaatttatctttatcattctgagtgcttcaggagtacaataggaagaaagatactggagaaagcactaatgtaatcaccatgaagtctgacaacaggagcccattatttgcgtactgtcccaccctgtatcatggttctctgggaacaagctttatgattctcattagagtttatttgttgattgtcagtagttgcgacttttaaattatatttcccccactcaaagaatggtatctttatatatcaatgacattcaataaatgtgtattatttctaatgagaa

SEQ ID NO: 196661 - DNA, 1407 bp, Homo sapiens
  Payload ID: 18790
  Gene Name: TXK tyrosine kinase
  ENST ID: ENST00000514937
  CDS Start-End: 18-266
acattgtgacagagttcatggaaaatggctgcctgcttaactatctcagggagaataaaggaaagcttaggaaggaaatgctactgagtgtatgccaggatatatgtgaaggaatggaatatctggagaggaatggctatattcatagggatttggcggcaaggaattgtttggtcagttcaacatgcatagtaaaaatttcagactttggaatgacaaggagttttaatgtgggaagtttttacagaaggaaaaatgccttttgaaaataagtcaaatttgcaagtcgtggaagctatttctgaaggcttcaggctatatcgccctcacctggcaccaatgtccatatatgaagtcatgtacagctgctggcatgagaaacctgaaggccgccctacatttgccgagctgctgcgggctgtcacagagattgcggaaacctggtgaccggaaacagaatgccaacccaaagagtcatcttgcaaaactgtcatttattgtgaatatcttcaccatatggggtcacttatggtgaatatctttcttcagagttgctgactcttgaaaacagtgcaaagatcacagtttttaaaagttttaaaaatttaagaatattcacacaatcgtttttctatgtgtgagagggatttgcacactcttatttttctgtaaaatatttcacatcccaaatgtgaagaagtgaaaaagacttcgcagcagtcttcattgtggtgctcttcatgatcatagccccaggaacccttgaggttcttcttcacaaggctgagagtgcttccttcttgaagacgagtgacattcatcacttcagtgatccatgcatagaatatgaaaataaattcttccaactcatgggataaaggggactcccttgaagaatttcatgtttttgggctgtatagctctttacagaaaatgcacctttataaatcacatgaatgttagtattctggaaatgtcttttgttaatataatcttcccatgttatttaacaaattgtttttgcacatatctgattatattgaaagcagttttttgcattcgagttttaaacactgttataaaatgtagccaaagctcacctttgaacagatcccggtgacattctatttccaggaaaatccggaacctgattttagttctgtgattttacactttttacatgtgagattggacagtttcagaggccttattttgtcatactaagtgtctcctgtaattttcaggaagatgatttgttctttccagaagaggagacaaaagcaagatagccaaatgtgacatcaagctccattgtttcggaaatccaggattttgaattcgagatgaaacaaccagcaatcacagttaaatcttaactttgcctgcactctttgtaggaatgatcag

SEQ ID NO: 196662 - DNA, 542 bp, Homo sapiens
  Payload ID: 18790
  Gene Name: TXK tyrosine kinase
  ENST ID: ENST00000506073
  CDS Start-End: 128-542
ttatttgtcttccactagtgaaggaaggcacgatcgagactttcatacgctttataataattcgtctcacccttcccttagagactccctcaatatcacgtactcatggctttctaacagctgagaaatgatctgcttttcagataacaccatccagtcggttttctgttgctgctgttgctgttcagtgcagaagcgacaaatgagaacacagataagcctgagcacagatgaagagcttccagaaaaatacacccagcgtcgcaggccgtggctcagccaattgtcaaataagaagcaatccaacacgggccgtgtgcagccgtcaaaacgaaagccactgcctcccctcccaccctctgaggttgctgaagagaagatccaagtcaaggcactttatgattttctgcccagagaaccctgtaatttagccttaaggagagcagaagaatacctgatactggagaaatacaatcctcactggtggaaggcaagagaccgtttggggaatgaaggcttaatcccaagcaactatgtgactg

SEQ ID NO: 196663 - DNA, 1153 bp, Homo sapiens
  Payload ID: 18790
  Gene Name: TXK tyrosine kinase
  ENST ID: ENST00000507351
  CDS Start-End: 129-677
aaaaatgcaaacacaattctgctcactggtgtatgtttttcttcaccaggaaattatctcattcaaagctagtgcaactttatggagtctgtatacagcggaagcccctttacattgtgacagagttcatggaaaatggctgcctgcttaactatctcagggagaataaaggaaagcttaggaaggaaatgctactgagtgtatgccaggatatatgtgaaggaatggaatatctggagaggaatggctatattcatagggatttggcggcaaggaattgtttggtcagttcaacatgcatagtaaaaatttcagactttggaatgacaaggtacgttttggatgatgagtatgtcagttcttttggagccaagttcccaatcaagtggtcccctcctgaagtttttcttttcaataagtacagcagtaaatctgatgtctggtcatttggagttttaatgtgggaagtttttacagaaggaaaaatgccttttgaaaataagtcaaatttgcaagtcgtggaagctatttctgaaggcttcaggctatatcgccctcacctggcaccaatgtccatatatgaagtcatgtacagctgctggcatgagaaacctgaaggccgccctacatttgccgagctgctgcgggctgtcacagagattgcggaaacctggtgaccggaaacagaatgccaacccaaagagtcatcttgcaaaactgtcatttattgtgaatatcttcaccatatggggtcacttatggtgaatatctttcttcagagttgctgactcttgaaaacagtgcaaagatcacagtttttaaaagttttaaaaatttaagaatattcacacaatcgtttttctatgtgtgagagggatttgcacactcttatttttctgtaaaatatttcacatcccaaatgtgaagaagtgaaaaagacttcgcagcagtcttcattgtggtgctcttcatgatcatagccccaggaacccttgaggttcttcttcacaaggctgagagtgcttccttcttgaagacgagtgacattcatcacttcagtgatccatgcatagaatatgaaaataaattcttccaactcatgggataaaggggactcccttgaagaatttcatgtttttgggctgtatagctc

SEQ ID NO: 196664 - DNA, 743 bp, Homo sapiens
  Payload ID: 18790
  Gene Name: TXK tyrosine kinase
  ENST ID: ENST00000509681
  CDS Start-End: 130-276
taaaaatgcaaacacaattctgctcactggtgtatgtttttcttcaccaggaaattatctcattcaaagctagtgcaactttatggagtctgtatacagcggaagcccctttacattgtgacagagttcatggaaaatggctgcctgcttaactatctcagggagaataaaggaaagcttaggaaggaaatgctactgagtgtatgccaggatatatgtgaaggaatggaatatctggagaggaatggctatattcatagggatttggagttttaatgtgggaagtttttacagaaggaaaaatgccttttgaaaataagtcaaatttgcaagtcgtggaagctatttctgaaggcttcaggctatatcgccctcacctggcaccaatgtccatatatgaagtcatgtacagctgctggcatgagaaacctgaaggccgccctacatttgccgagctgctgcgggctgtcacagagattgcggaaacctggtgaccggaaacagaatgccaacccaaagagtcatcttgcaaaactgtcatttattgtgaatatcttcaccatatggggtcacttatggtgaatatctttcttcagagttgctgactcttgaaaacagtgcaaagatcacagtttttaaaagttttaaaaatttaagaatattcacacaatcgtttttctatgtgtgagagggatttgcacactcttatttttctgtaaaatatttcacatcccaaatgtgaa

SEQ ID NO: 196665 - DNA, 568 bp, Homo sapiens
  Payload ID: 18791
  Gene Name: TYRO protein tyrosine kinase binding protein
  Uniprot ID: O43914
  ENST ID: ENST00000262629
  CDS Start-End: 68-409
acttgcctggacgctgcgccacatcccaccggcccttacactgtggtgtccagcagcatccggcttcatggggggacttgaaccctgcagcaggctcctgctcctgcctctcctgctggctgtaagtggtctccgtcctgtccaggcccaggcccagagcgattgcagttgctctacggtgagcccgggcgtgctggcagggatcgtgatgggagacctggtgctgacagtgctcattgccctggccgtgtacttcctgggccggctggtccctcgggggcgaggggctgcggaggcagcgacccggaaacagcgtatcactgagaccgagtcgccttatcaggagctccagggtcagaggtcggatgtctacagcgacctcaacacacagaggccgtattacaaatgagcccgaatcatgacagtcagcaacatgatacctggatccagccattcctgaagcccaccctgcacctcattccaactcctaccgcgatacagacccacagagtgccatccctgagagaccagaccgctccccaatactctcctaaaataaacatgaagc

SEQ ID NO: 196666 - DNA, 541 bp, Homo sapiens
  Payload ID: 18791
  Gene Name: TYRO protein tyrosine kinase binding protein
  ENST ID: ENST00000424586
  CDS Start-End: 68-373
acttgcctggacgctgcgccacatcccaccggcccttacactgtggtgtccagcagcatccggcttcatggggggacttgaaccctgcagcaggctcctgctcctgcctctcctgctggctgtaagtgattgcagttgctctacggtgagcccgggcgtgctggcagggatcgtgatgggagacctggtgctgacagtgctcattgccctggccgtgtacttcctgggccggctggtccctcgggggcgaggggctgcggaggcgacccggaaacagcgtatcactgagaccgagtcgccttatcaggagctccagggtcagaggtcggatgtctacagcgacctcaacacacagaggccgtattacaaatgagcccgaatcatgacagtcagcaacatgatacctggatccagccattcctgaagcccaccctgcacctcattccaactcctaccgcgatacagacccacagagtgccatccctgagagaccagaccgctccccaatactctcctaaaataaacatgaagcacaaaaaca

SEQ ID NO: 196667 - DNA, 522 bp, Homo sapiens
  Payload ID: 18791
  Gene Name: TYRO protein tyrosine kinase binding protein
  Uniprot ID: O43914
  ENST ID: ENST00000544690
  CDS Start-End: 48-356
acatcccaccggcccttacactgtggtgtccagcagcatccggcttcatggggggacttgaaccctgcagcaggctcctgctcctgcctctcctgctggctgtaagtgattgcagttgctctacggtgagcccgggcgtgctggcagggatcgtgatgggagacctggtgctgacagtgctcattgccctggccgtgtacttcctgggccggctggtccctcgggggcgaggggctgcggaggcagcgacccggaaacagcgtatcactgagaccgagtcgccttatcaggagctccagggtcagaggtcggatgtctacagcgacctcaacacacagaggccgtattacaaatgagcccgaatcatgacagtcagcaacatgatacctggatccagccattcctgaagcccaccctgcacctcattccaactcctaccgcgatacagacccacagagtgccatccctgagagaccagaccgctccccaatactctcctaaaataaacatgaagcacaaaaa

SEQ ID NO: 196668 - DNA, 570 bp, Homo sapiens
  Payload ID: 18791
  Gene Name: TYRO protein tyrosine kinase binding protein
  ENST ID: ENST00000587837
  CDS Start-End: 68-175
acttgcctggacgctgcgccacatcccaccggcccttacactgtggtgtccagcagcatccggcttcatggggggacttgaaccctgcagcaggctcctgctcctgcctctcctgctggctgtctccgtcctgtccaggcccaggcccagagcgattgcagttgctctacggtgagcccgggcgtgctggcagggatcgtgatgggagacctggtgctgacagtgctcattgccctggccgtgtacttcctgggccggctggtccctcgggggcgaggggctgcggaggcagcgacccggaaacagcgtatcactgagaccgagtcgccttatcaggagctccagggtcagaggtcggatgtctacagcgacctcaacacacagaggccgtattacaaatgagcccgaatcatgacagtcagcaacatgatacctggatccagccattcctgaagcccaccctgcacctcattccaactcctaccgcgatacagacccacagagtgccatccctgagagaccagaccgctccccaatactctcctaaaataaacatgaagcacaaaaaca

SEQ ID NO: 196669 - DNA, 522 bp, Homo sapiens
  Payload ID: 18791
  Gene Name: TYRO protein tyrosine kinase binding protein
  ENST ID: ENST00000586946
  CDS Start-End: 68-175
acttgcctggacgctgcgccacatcccaccggcccttacactgtggtgtccagcagcatccggcttcatggggggacttgaaccctgcagcaggctcctgctcctgcctctcctgctggctgtctccgtcctgtccaggcccaggcccagagcgattgcagttgctctacggtgagcccgggcgtgctggcagggatcgtgatgggagacctggtgctgacagtgctcattgccctggccgtgtacttcctgggccggctggtccctcgggggcgaggggctgcggaggcgacccggaaacagcgtatcactgagaccgagtcgccttatcaggagctccagggtcagaggtcggatgtctacagcgacctcaacacacagaggccgtattacaaatgagcccgaatcatgacagtcagcaacatgatacctggatccagccattcctgaagcccaccctgcacctcattccaactcctaccgcgatacagacccacagagtgccatccctgagagaccaga

SEQ ID NO: 196670 - DNA, 415 bp, Homo sapiens
  Payload ID: 18791
  Gene Name: TYRO protein tyrosine kinase binding protein
  Uniprot ID: O43914
  ENST ID: ENST00000589517
  CDS Start-End: 68-406
acttgcctggacgctgcgccacatcccaccggcccttacactgtggtgtccagcagcatccggcttcatggggggacttgaaccctgcagcaggctcctgctcctgcctctcctgctggctgtaagtggtctccgtcctgtccaggcccaggcccagagcgattgcagttgctctacggtgagcccgggcgtgctggcagggatcgtgatgggagacctggtgctgacagtgctcattgccctggccgtgtacttcctgggccggctggtccctcgggggcgaggggctgcggaggcgacccggaaacagcgtatcactgagaccgagtcgccttatcaggagctccagggtcagaggtcggatgtctacagcgacctcaacacacagaggccgtattacaaatgagcccgaatc

SEQ ID NO: 196671 - DNA, 620 bp, Homo sapiens
  Payload ID: 18791
  Gene Name: TYRO protein tyrosine kinase binding protein
  ENST ID: ENST00000585901
  CDS Start-End: 20-454
tccagcagcatccggcttcatggggggacttgaaccctgcagcaggctcctgctcctgcctctcctgctggctgtaagtggtctccgtcctgtccaggcccaggcccagagcgattgcagttgctctacggtgagcccgggcgtgctggcagggatcgtgatgggagacctggtgctgacagtgctcattgccctggccgtgtacttcctgggccggctggtccctcgggggcgaggggctgcggaggggatggtaatggaggtgctgatttggaatgacaaaacaccctcaactcaccactctgcctgtctctgcaccccacaacacccctcacctccagcagcgacccggaaacagcgtatcactgagaccgagtcgccttatcaggagctccagggtcagaggtcggatgtctacagcgacctcaacacacagaggccgtattacaaatgagcccgaatcatgacagtcagcaacatgatacctggatccagccattcctgaagcccaccctgcacctcattccaactcctaccgcgatacagacccacagagtgccatccctgagagaccagaccgctccccaatactctcctaaaataaacatgaagcacaaaaa

SEQ ID NO: 196672 - DNA, 8207 bp, Homo sapiens
  Payload ID: 18792
  Gene Name: TYRO3 protein tyrosine kinase
  Uniprot ID: Q06418
  ENST ID: ENST00000263798
  CDS Start-End: 225-2897
gcggtggcgcgggagcggccccggggaccccgcgctgctgacggcggcgaccgcggccggaggcgggcgcgggtctcggaggcggtcgcctcagcaccgccccacgggcggccccagcccctcccgcagccctcctccctcccgctcccttcccgccgcctcctccccgccctcctccctcctcgctcgcgggccgggcccggcatggtgcggcgtcgccgccgatggcgctgaggcggagcatggggcggccggggctcccgccgctgccgctgccgccgccaccgcggctcgggctgctgctggcggctctggcttctctgctgctcccggagtccgccgccgcaggtctgaagctcatgggagccccggtgaagctgacagtgtctcaggggcagccggtgaagctcaactgcagtgtggaggggatggaggagcctgacatccagtgggtgaaggatggggctgtggtccagaacttggaccagttgtacatcccagtcagcgagcagcactggatcggcttcctcagcctgaagtcagtggagcgctctgacgccggccggtactggtgccaggtggaggatgggggtgaaaccgagatctcccagccagtgtggctcacggtagaaggtgtgccatttttcacagtggagccaaaagatctggcagtgccacccaatgcccctttccaactgtcttgtgaggctgtgggtccccctgaacctgttaccattgtctggtggagaggaactacgaagatcgggggacccgctccctctccatctgttttaaatgtaacaggggtgacccagagcaccatgttttcctgtgaagctcacaacctaaaaggcctggcctcttctcgcacagccactgttcaccttcaagcactgcctgcagcccccttcaacatcaccgtgacaaagctttccagcagcaacgctagtgtggcctggatgccaggtgctgatggccgagctctgctacagtcctgtacagttcaggtgacacaggccccaggaggctgggaagtcctggctgttgtggtccctgtgcccccctttacctgcctgctccgggacctggtgcctgccaccaactacagcctcagggtgcgctgtgccaatgccttggggccctctccctatgctgactgggtgccctttcagaccaagggtctagccccagccagcgctccccaaaacctccatgccatccgcacagattcaggcctcatcttggagtgggaagaagtgatccccgaggcccctttggaaggccccctgggaccctacaaactgtcctgggttcaagacaatggaacccaggatgagctgacagtggaggggaccagggccaatttgacaggctgggatccccaaaaggacctgatcgtacgtgtgtgcgtctccaatgcagttggctgtggaccctggagtcagccactggtggtctcttctcatgaccgtgcaggccagcagggccctcctcacagccgcacatcctgggtacctgtggtccttggtgtgctaacggccctggtgacggctgctgccctggccctcatcctgcttcgaaagagacggaaagagacgcggtttgggcaagcctttgacagtgtcatggcccggggagagccagccgttcacttccgggcagcccggtccttcaatcgagaaaggcccgagcgcatcgaggccacattggacagcttgggcatcagcgatgaactaaaggaaaaactggaggatgtgctcatcccagagcagcagttcaccctgggccggatgttgggcaaaggagagtttggttcagtgcgggaggcccagctgaagcaagaggatggctcctttgtgaaagtggctgtgaagatgctgaaagctgacatcattgcctcaagcgacattgaagagttcctcagggaagcagcttgcatgaaggagtttgaccatccacacgtggccaaacttgttggggtaagcctccggagcagggctaaaggccgtctccccatccccatggtcatcttgcccttcatgaagcatggggacctgcatgccttcctgctcgcctcccggattggggagaacccctttaacctacccctccagaccctgatccggttcatggtggacattgcctgcggcatggagtacctgagctctcggaacttcatccaccgagacctggctgctcggaattgcatgctggcagaggacatgacagtgtgtgtggctgacttcggactctcccggaagatctacagtggggactactatcgtcaaggctgtgcctccaaactgcctgtcaagtggctggccctggagagcctggccgacaacctgtatactgtgcagagtgacgtgtgggcgttcggggtgaccatgtgggagatcatgacacgtgggcagacgccatatgctggcatcgaaaacgctgagatttacaactacctcattggcgggaaccgcctgaaacagcctccggagtgtatggaggacgtgtatgatctcatgtaccagtgctggagtgctgaccccaagcagcgcccgagctttacttgtctgcgaatggaactggagaacatcttgggccagctgtctgtgctatctgccagccaggaccccttatacatcaacatcgagagagctgaggagcccactgcgggaggcagcctggagctacctggcagggatcagccctacagtggggctggggatggcagtggcatgggggcagtgggtggcactcccagtgactgtcggtacatactcacccccggagggctggctgagcagccagggcaggcagagcaccagccagagagtcccctcaatgagacacagaggcttttgctgctgcagcaagggctactgccacacagtagctgttagcccacaggcagagggcatcggggccatttggccggctctggtggccactgagctggctgactaagccccgtctgaccccagcccagacagcaaggtgtggaggctcctgtggtagtcctcccaagctgtgctgggaagcccggactgaccaaatcacccaatcccagttcttcctgcaaccactctgtggccagcctggcatcagtttaggccttggcttgatggaagtgggccagtcctggttgtctgaacccaggcagctggcaggagtggggtggttatgtttccatggttaccatgggtgtggatggcagtgtggggagggcaggtccagctctgtgggccctaccctcctgctgagctgcccctgctgcttaagtgcatgcattgagctgcctccagcctggtggcccagctattaccacacttggggtttaaatatccaggtgtgcccctccaagtcacaaagagatgtccttgtaatattcccttttaggtgagggttggtaaggggttggtatctcaggtctgaatcttcaccatctttctgattccgcaccctgcctacgccaggagaagttgaggggagcatgcttccctgcagctgaccgggtcacacaaaggcatgctggagtacccagcctatcaggtgcccctcttccaaaggcagcgtgccgagccagcaagaggaaggggtgctgtgaggcttgcccaggagcaagtgaggccggagaggagttcaggaacccttctccatacccacaatctgagcacgctaccaaatctcaaaatatcctaagactaacaaaggcagctgtgtctgagcccaacccttctaaacggtgacctttagtgccaacttcccctctaactggacagcctcttctgtcccaagtctccagagagaaatcaggcctgatgagggggaattcctggaacctggaccccagccttggtgggggagcctctggaatgcatggggcgggtcctagctgttagggacatttccaagctgttagttgctgtttaaaatagaaataaaattgaagactaaagacctaaggttttgtctctttttttttttctttttttttgagacagtctcactgtgttgcccaggctggagtgcatggtgtgatcttggttcactgcaacctctgcctcctgggttcaagcgattcttgtgcctcagtcaccagagtagctgggattacaggggctcactaccatgcccaggtaatttttgtatttttagtagagatgtggtttcgccatgttggccagggtggtcttgaactcatgacctcaagtgatctgcctgccttggcctcccaaagtgctgggattacagtcctgagccaccacacctggccccagctttgtctcttaaatgtttactttttttgagatcacaaagatgaaagatttttatagagagaaaagtctggaaagacatatgccaaaatgttaacagctgttatctttttttttttttttttgagaccgagtctcactctgtcgcccaggctggagtgcaattgcgcgatctgagctcactgcaagctctgcctcccaggttcacgccattctcctgcctcagcctcccgagtagctgggactacaggtgcctgccaccacgcccggctaattttttgtatttttagtagagatagggtttcaccgtattagccaggatgatctcaatctcctgacctcgtgatccgcctgcctcagcctcccaaagtgttgggattacaggcgtgagccaccgcacctggcaacagctgttacctttaaatgatggggttaaggggacgttcttctttgtgctttccaagttttctgcattgagcacaaaatgcttttgtaattagatacaggatcccaatgaatcttattatactgaagataatacagagtcaccgtgggcagttagaaaaatgcaaaaaatcggctgggcgcagtggctcacgcctgtaatcccagcactttgggagacctgggtgtgtggatcacgaggtcagaagttcaagactagtctgaccaacatggtgacaccccgtctttactaaaaatacaaaaattagctgggcatggtggcgcgtgtctgtaatcccagctactcaggacactgaggcaggagaattgcttgaactcaggaggcggaggttgcagtgagtcgagatcccggcagcctaggtgacaggcgagactccatctcaaaaataaaataaaaataaaaatgcaaaaaataataaaaggtgccagttacctatactcccaccacctagagataatcaccattgatcttttgaaaatgcaaatattcagctgggcacagtggcgtgtatttttttttttttttgagacggagtctcgagtctctctctgtcgcccaggctagagtgcagtggtgtgatctcggctcactgtaacctctgtctcccaggtttaatcaagtctcttgtcttggcttcccgagtagttgggactacaggcacgagccactgtgtccggctattttttgtatttttttgtagagacagggtttcgccatgttggccaggctggtctcgaactcctgatttcaagtgatctgcctgccttagcctcccaaagtgctgtgataacaggggtgagacaccatacccagcttgtaatcccagcactttgggaggctgaggcgggtggatcacttcaggccgggagttcgagaccagcctgggcaacatgaaaccccatctcaactaaaaattcaaaaaagtttagccaggcttggtggcgcaggtttgtcatctcagctactgggtgactgaggcatgagaatcacttaaacctgggaggaggaggttgcagtaagctgagatcttgccactaaacttcggcctgggtgacagattaagactgtctcagaaacaaaacaaaacaacaaaaaagcttttagagcaagttcatgggagatgcagcaggaggcgcaggaaccacacatgtgctagtgaggagtgtggggagactgggagggcccacaggtattgtgctgcttctggctgagggcaggggaatagggtggctgcttctgaaagcaaatatcctgaaaaacctgttgctggtactccaaattctggttcccatgtagatcatgaaacctgaaaaacttccaggcaagtagctttcagaatctttcctgctgtgattagctttcactgcaggtagtgattacctgtgagataacatctgggaattattgattgaaaagaccttcactatcggttgggggcggtggctgatgcctgtaatcccagcactttgtgaggctgaggcgggtggatcacctgaggtcaggggttcaagaccagcctggccaacatggtgaaaccccatctctactaaaaaatacaaaaactagccaggagtggtggcaggcacctgtaatcccagctacttgggaggctaaggcaggagaatcacttgaaccctggaggcggaggttgcagtgaactgagatggcaccagtgcactccagcctgggtgacagagcgagactccatctcaaaaaaaaaaaaaaaaaaaagaggccaggcatggtggctcacgcctataatcccagcgctttgggattttctgtctcaaaaaaaaaaagagagagactctggatcaaaaaggattttcacaaacagatccaaagaaccagcatccagattaagaaacagcattaacagcaacccagaagcaacccttgggacctgcctcaatctctgcctcctccctactccccataggtaacctctatcctgacctcttaacaccatggatcagtgaagctccttttaaaagtatataaatggagtcatgtagatttgattactttgcgtttggcttctttccctcagcaacatgtttataaggatcatctaacaacagcagttttgaaaagtgagtctcaaagaggcaagaatggccgggcatggtggctcacacccgtaatcccagcgctttgggaggccgaggcgggcggatcacaaggtcaggagtttgagaccagcctggctaacagggtgaaaccctgtctttactaaaccctgtctttactaaaaatacacaaaattagccaggtatggtggcaggcacgtgtaatcctagctactcgggaggctgaggcaggagaatcacttgaacctgggagggggaggttgcagtgagccactacattccagcttgggtgagagagtgagactccatctcggaaaaaaaaaaaattagctgggcgtgctggtgggtgcctgtaatcccagctacttgggaggctgaggtaggagaattgcttgaacctgggaggtggaagttgctgtgagacgagattgtgccatggcactccagcctggacaagagtgagactccatctcaaaaaagaaaataataataatatagtttatttttcagtatttcatgttgatttatctcaaatttattgttgaataagaagtgatacagagattcaaagttatttttcccagatactttttattgtcccaataccaccatttattgaacaatctatattttatgcacatttcttttttttttcttttttttgatacagggtcttgctctgtttctgcctgggctggagtaaagtgatagtaaactgattctcccacctcagcgtcctgaatagctgggaccacaggcacacgccactgcacctggcaaatttttaagtgtttttttttttttttaatacagagccttgctctgtcgcccaggctggagtgcagtggtgtgatctcggctcactgcaacctccgcctctcagttcaagcgagtctcctcctgcctcacactcccaattagctgggactacaggcacgtgccaccacaacatgctaattttttgtatttttagtagagacagggtttcaccatgttagccaggatggtctcgatctcctgacctcgtgatctgcccgcctcagcctcccaaagtgctgggattacaggcttcagccaccgcgcccggcccagtttttaagtgttgtagagatggagtcttgctttgttgcccaggctggtcttgaactctgggctgaagcgatctgcccaccttggcctctcaaagtgcggagattacaggtgtgagccaccacacccagccagaatttcttgaataatctgtctccatttctctatatagcctcattgatctatctaaactcccatatctattttggttgctagactgttcatcccaattacatgtgccagtgtcactgctacactaattgaattactataaatgtataatgttttcct

SEQ ID NO: 196673 - DNA, 547 bp, Homo sapiens
  Payload ID: 18792
  Gene Name: TYRO3 protein tyrosine kinase
  ENST ID: ENST00000559851
  CDS Start-End: 1-66
gtgaagatgctgaaaggggcacatcttgttttatttcctccttccccatccccttctcctagctgacatcattgcctcaagcgacattgaagagttcctcagggaagcagcttgcatgaaggagtttgaccatccacacgtggccaaacttgttggggtaagcctccggagcagggctaaaggccgtctccccatccccatggtcatcttgcccttcatgaagcatggggacctgcatgccttcctgctcgcctcccggattggggagaacccctttaacctacccctccagaccctgatccggttcatggtggacattgcctgcggcatggagtacctgagctctcggaacttcatccaccgagacctggctgctcggaattgcatgctggcagaggacatgacagtgtgtgtggctgacttcggactctcccggaagatctacagtggggactactatcgtcaaggctgtgcctccaaactgcctgtcaagtggctggccctggagagcctggccgacaacctgtatactgtgcagagtgacgtg

SEQ ID NO: 196674 - DNA, 535 bp, Homo sapiens
  Payload ID: 18792
  Gene Name: TYRO3 protein tyrosine kinase
  ENST ID: ENST00000559815
  CDS Start-End: 1-365
gctgggaagtcctggctgttgtggtccctgtgcccccctttacctgcctgctccgggacctggtgcctgccaccaactacagcctcagggtgcgctgtgccaatgccttggggccctctccctatgctgactgggtgccctttcagaccaagggtctagccccagccagcgctccccaaaacctccatgccatccgcacagattcaggcctcatcttggagtgggaagaagtgatccccgaggcccctttggaaggccccctgggaccctacaaactgtcctgggttcaagacaatggaacccaggccagcagggccctcctcacagccgcacatcctgggtacctgtggtccttggtgtgctaacggccctggtgacggctgctgccctggccctcatcctgcttcgaaagagacggaaagagacgcggtttgggcaagcctttgacagtgtcatggcccggggagagccagccgttcacttccgggcagcccggtccttcaatcgagaaaggcccgagcgcatcgaggccaca

SEQ ID NO: 196675 - DNA, 3876 bp, Homo sapiens
  Payload ID: 18792
  Gene Name: TYRO3 protein tyrosine kinase
  ENST ID: ENST00000559066
  CDS Start-End: 810-3347
aagaaagaaacagagacagagatatctggcccctgccatccatgtcttgacagtgcctcatgagtctctcctcctgctgccgcctgggggcgcccccagctgggtctcaggctgctgccagcactgctgttgttatcattagggtaattaataaacaagcactgctggggccaagtggaagaagaggcaggcccctgctgctcaggagaatccctgaaaagatccagtgagcctgcggcaaccggagctgagtggctggtccctcctctctacccaggacctctggaaggggtgtggggtgggcttccccctggagggaagggcaaggggaggagcacacttggtaggcttggtttggaaccagctctgcatgtgcctaacaggatgtctgtgggcaaggccaccctcgtgattactggttgtggggcaggctctgaagcaattattcattcatttaacaggcatctgcctatttatttatggaaagcctactgtgtgcaaggtggtctactaataatagctaatgtttgactggacagtgtgacgacacagccaactttcacaccaggtcctgggaaaaggggtagaagcaggggaagcaaccaggaaaaatgacagcccaaaaagatacgggcaattaggctttggcctgtgtagtgtagtggtggggatatatattaggtaaaacctggggattaccaagatcttgggaaactcaggacccaagttggaaaacatacggcaattggggctggagaaaatgggcatttttcaggtgggagggacttggagataaaggtctgaagctcatgggagccccggtgaagctgacagtgtctcaggggcagccggtgaagctcaactgcagtgtggaggggatggaggagcctgacatccagtgggtgaaggatggggctgtggtccagaacttggaccagttgtacatcccagtcagcgagcagcactggatcggcttcctcagcctgaagtcagtggagcgctctgacgccggccggtactggtgccaggtggaggatgggggtgaaaccgagatctcccagccagtgtggctcacggtagaaggtgtgccatttttcacagtggagccaaaagatctggcagtgccacccaatgcccctttccaactgtcttgtgaggctgtgggtccccctgaacctgttaccattgtctggtggagaggaactacgaagatcgggggacccgctccctctccatctgttttaaatgtaacaggggtgacccagagcaccatgttttcctgtgaagctcacaacctaaaaggcctggcctcttctcgcacagccactgttcaccttcaagcactgcctgcagcccccttcaacatcaccgtgacaaagctttccagcagcaacgctagtgtggcctggatgccaggtgctgatggccgagctctgctacagtcctgtacagttcaggtgacacaggccccaggaggctgggaagtcctggctgttgtggtccctgtgcccccctttacctgcctgctccgggacctggtgcctgccaccaactacagcctcagggtgcgctgtgccaatgccttggggccctctccctatgctgactgggtgccctttcagaccaagggtctagccccagccagcgctccccaaaacctccatgccatccgcacagattcaggcctcatcttggagtgggaagaagtgatccccgaggcccctttggaaggccccctgggaccctacaaactgtcctgggttcaagacaatggaacccaggatgagctgacagtggaggggaccagggccaatttgacaggctgggatccccaaaaggacctgatcgtacgtgtgtgcgtctccaatgcagttggctgtggaccctggagtcagccactggtggtctcttctcatgaccgtgcaggccagcagggccctcctcacagccgcacatcctgggtacctgtggtccttggtgtgctaacggccctggtgacggctgctgccctggccctcatcctgcttcgaaagagacggaaagagacgcggtttgggcaagcctttgacagtgtcatggcccggggagagccagccgttcacttccgggcagcccggtccttcaatcgagaaaggcccgagcgcatcgaggccacattggacagcttgggcatcagcgatgaactaaaggaaaaactggaggatgtgctcatcccagagcagcagttcaccctgggccggatgttgggcaaaggagagtttggttcagtgcgggaggcccagctgaagcaagaggatggctcctttgtgaaagtggctgtgaagatgctgaaagctgacatcattgcctcaagcgacattgaagagttcctcagggaagcagcttgcatgaaggagtttgaccatccacacgtggccaaacttgttggggtaagcctccggagcagggctaaaggccgtctccccatccccatggtcatcttgcccttcatgaagcatggggacctgcatgccttcctgctcgcctcccggattggggagaacccctttaacctacccctccagaccctgatccggttcatggtggacattgcctgcggcatggagtacctgagctctcggaacttcatccaccgagacctggctgctcggaattgcatgctggcagaggacatgacagtgtgtgtggctgacttcggactctcccggaagatctacagtggggactactatcgtcaaggctgtgcctccaaactgcctgtcaagtggctggccctggagagcctggccgacaacctgtatactgtgcagagtgacgtgtgggcgttcggggtgaccatgtgggagatcatgacacgtgggcagacgccatatgctggcatcgaaaacgctgagatttacaactacctcattggcgggaaccgcctgaaacagcctccggagtgtatggaggacgtgtatgatctcatgtaccagtgctggagtgctgaccccaagcagcgcccgagctttacttgtctgcgaatggaactggagaacatcttgggccagctgtctgtgctatctgccagccaggaccccttatacatcaacatcgagagagctgaggagcccactgcgggaggcagcctggagctacctggcagggatcagccctacagtggggctggggatggcagtggcatgggggcagtgggtggcactcccagtgactgtcggtacatactcacccccggagggctggctgagcagccagggcaggcagagcaccagccagagagtcccctcaatgagacacagaggcttttgctgctgcagcaagggctactgccacacagtagctgttagcccacaggcagagggcatcggggccatttggccggctctggtggccactgagctggctgactaagccccgtctgaccccagcccagacagcaaggtgtggaggctcctgtggtagtcctcccaagctgtgctgggaagcccggactgaccaaatcacccaatcccagttcttcctgcaaccactctgtggccagcctggcatcagtttaggccttggcttgatggaagtgggccagtcctggttgtctgaacccaggcagctggcaggagtggggtggttatgtttccatggttaccatgggtgtggatggcagtgtggggagggcaggtccagctctgtgggccctaccctcctgctgagctgcccctgctgcttaagtgcatgcattgagctgcctccagcctggtggcccagctattaccacacttggggtttaaatatccaggtgtgcccctccaagtcacaaagagatgtccttgtaatattcccttttaggtgagggttggtaaggggttggtatctcaggtc

SEQ ID NO: 196676 - DNA, 856 bp, Homo sapiens
  Payload ID: 18792
  Gene Name: TYRO3 protein tyrosine kinase
  ENST ID: ENST00000568343
  CDS Start-End: 1-856
cctgggccggatgttgggcaaaggagagtttggttcagtgcgggaggcccagctgaagcaagaggatggctcctttgtgaaagtggctgtgaagatgctgaaagctgacatcattgcctcaagcgacattgaagagttcctcagggaagcagcttgcatgaaggagtttgaccatccacacgtggccaaacttgttggggtaagcctccggagcagggctaaaggccgtctccccatccccatggtcatcttgcccttcatgaagcatggggacctgcatgccttcctgctcgcctcccggattggggagaacccctttaccctgatccggttcatggtggacattgcctgcggcatggagtacctgagctctcggaacttcatccaccgagacctggctgctcggaattgcatgctggcagaggacatgacagtgtgtgtggctgacttcggactctcccggaagatctacagtggggactactatcgtcaaggctgtgcctccaaactgcctgtcaagtggctggccctggagagcctggccgacaacctgtatactgtgcagagtgacgtgtgggcgttcggggtgaccatgtgggagatcatgacacgtgggcagacgccatatgctggcatcgaaaacgctgagatttacaactacctcattggcgggaaccgcctgaaacagcctccggagtgtatggaggacgttcttacactcccactccatccaagccaagggctccctaggccttcagacaaccttttgtatgatctcatgtaccagtgctggagtgctgaccccaagcagcgcccgagctttacttgtctgcgaatggaactggagaacatcttg

SEQ ID NO: 196677 - DNA, 2485 bp, Homo sapiens
  Payload ID: 18793
  Gene Name: tyrosinase
  Uniprot ID: P14679
  ENST ID: ENST00000263321
  CDS Start-End: 503-2092
tattgagttcttcaaacattgtagcctctttatggtctctgagaaataactaccttaaacccataatctttaatacttcctaaactttcttaataagagaagctctattcctgacactacctctcatttgcaaggtcaaatcatcattagttttgtagtctattaactgggtttgcttaggtcaggcattattattactaaccttattgttaatattctaaccataagaattaaactattaatggtgaatagagtttttcactttaacataggcctatcccactggtgggatacgagccaattcgaaagaaaagtcagtcatgtgcttttcagaggatgaaagcttaagataaagactaaaagtgtttgatgctggaggtgggagtggtattatataggtctcagccaagacatgtgataatcactgtagtagtagctggaaagagaaatctgtgactccaattagccagttcctgcagaccttgtgaggactagaggaagaatgctcctggctgttttgtactgcctgctgtggagtttccagacctccgctggccatttccctagagcctgtgtctcctctaagaacctgatggagaaggaatgctgtccaccgtggagcggggacaggagtccctgtggccagctttcaggcagaggttcctgtcagaatatccttctgtccaatgcaccacttgggcctcaatttcccttcacaggggtggatgaccgggagtcgtggccttccgtcttttataataggacctgccagtgctctggcaacttcatgggattcaactgtggaaactgcaagtttggcttttggggaccaaactgcacagagagacgactcttggtgagaagaaacatcttcgatttgagtgccccagagaaggacaaattttttgcctacctcactttagcaaagcataccatcagctcagactatgtcatccccatagggacctatggccaaatgaaaaatggatcaacacccatgtttaacgacatcaatatttatgacctctttgtctggatgcattattatgtgtcaatggatgcactgcttgggggatctgaaatctggagagacattgattttgcccatgaagcaccagcttttctgccttggcatagactcttcttgttgcggtgggaacaagaaatccagaagctgacaggagatgaaaacttcactattccatattgggactggcgggatgcagaaaagtgtgacatttgcacagatgagtacatgggaggtcagcaccccacaaatcctaacttactcagcccagcatcattcttctcctcttggcagattgtctgtagccgattggaggagtacaacagccatcagtctttatgcaatggaacgcccgagggacctttacggcgtaatcctggaaaccatgacaaatccagaaccccaaggctcccctcttcagctgatgtagaattttgcctgagtttgacccaatatgaatctggttccatggataaagctgccaatttcagctttagaaatacactggaaggatttgctagtccacttactgggatagcggatgcctctcaaagcagcatgcacaatgccttgcacatctatatgaatggaacaatgtcccaggtacagggatctgccaacgatcctatcttccttcttcaccatgcatttgttgacagtatttttgagcagtggctccgaaggcaccgtcctcttcaagaagtttatccagaagccaatgcacccattggacataaccgggaatcctacatggttccttttataccactgtacagaaatggtgatttctttatttcatccaaagatctgggctatgactatagctatctacaagattcagacccagactcttttcaagactacattaagtcctatttggaacaagcgagtcggatctggtcatggctccttggggcggcgatggtaggggccgtcctcactgccctgctggcagggcttgtgagcttgctgtgtcgtcacaagagaaagcagcttcctgaagaaaagcagccactcctcatggagaaagaggattaccacagcttgtatcagagccatttataaaaggcttaggcaatagagtagggccaaaaagcctgacctcactctaactcaaagtaatgtccaggttcccagagaatatctgctggtatttttctgtaaagaccatttgcaaaattgtaacctaatacaaagtgtagccttcttccaactcaggtagaacacacctgtctttgtcttgctgttttcactcagcccttttaacattttcccctaagcccatatgtctaaggaaaggatgctatttggtaatgaggaactgttatttgtatgtgaattaaagtgctcttattttaaaaaattgaaataattttgatttttgccttctgattatttaaagatctatatatgttttattggccccttctttattttaataaaacagtgagaaatcta

SEQ ID NO: 196678 - DNA, 872 bp, Homo sapiens
  Payload ID: 18794
  Gene Name: tyrosinase-related protein 1
  ENST ID: ENST00000381136
  CDS Start-End: 76-819
aaagactttccttggggtaggacaggaaagctttggtgaagtggatttctctcatgagggaccagcttttctcacatggcacaggtaccacctcctgcgtctggagaaagacatgcaggcaccgaggatgggccaattaggagaaatccagctggaaatgtggccagaccaatggtgcaacgtcttcctgaaccacaggatgtcgctcagtgcttggaagttggtttatttgacacgcctcctttttattccaactctacaaacagtttccgaaacacagtggaaggttacagtgaccccacgggaaagtatgaccctgctgttcgaagtcttcacaatttggctcatctattcctgaatggaacagggggacaaacccatttgtctccaaatgatcctatttttgtcctcctgcacaccttcacagatgcagtctttgatgaatggctgaggagatacaatgctgatatatccacatttccattggaaaatgcccctattggacataatagacaatacaacatggtgccattctggcccccagtcaccaacacagaaatgtttgttactgctccagacaacctgggatacacttatgaaattcaatggccaagtcgggagtttagtgtacctgagataattgccatagcagtagttggcgctttgttactggttgcactcatttttgggactgcttcttatctgattcgtgccagacgcagtatggatgaagctaaccagcctctcctcactgatcagtatcaatgctatgctgaagaatatgaaaaactccagaatcctaatcagtctgtggtctaacaaatgccctactctcttatgcattagtatcacaaaaccacctggttgaatat

SEQ ID NO: 196679 - DNA, 2851 bp, Homo sapiens
  Payload ID: 18794
  Gene Name: tyrosinase-related protein 1
  Uniprot ID: P17643
  ENST ID: ENST00000388918
  CDS Start-End: 130-1743
aattctaagagaagttcatcagagacatccttcaggattgtgagctggattttcctctacgtgcttcagtcttctctacacaaagagctgcaaaccaggtctttgttttgcactcttatttcaagcagaatgagtgctcctaaactcctctctctgggctgtatcttcttccccttgctactttttcagcaggcccgggctcaattcccaagacagtgtgccactgttgaggctttgagaagtggtatgtgttgcccagacctgtcccctgtgtctgggcctgggacagaccgctgtggctcatcatcagggaggggcagatgtgaggcagtgactgcagactcccggccccacagccctcagtatccccatgatggcagagatgatcgggaggtctggcccttgcgcttcttcaataggacatgtcactgcaacggcaatttctcaggacacaactgtgggacgtgccgtcctggctggagaggagctgcctgtgaccagagggttctcatagtcaggagaaatcttctggacttaagtaaagaagaaaagaaccactttgtccgggccctggatatggcaaagcgcacaactcaccctttatttgtcattgccaccaggagatcagaagaaatactggggccagatggcaacacgccacaatttgagaacatttccatttataactactttgtttggacacactattactcagtcaaaaagactttccttggggtaggacaggaaagctttggtgaagtggatttctctcatgagggaccagcttttctcacatggcacaggtaccacctcctgcgtctggagaaagacatgcaggaaatgttgcaagagccttctttctcccttccttactggaattttgcaacggggaaaaatgtctgtgatatctgcacggatgacttgatgggatccagaagcaactttgattccactctaataagcccaaactctgtcttttctcaatggcgagtggtctgtgactccttggaagattatgataccctgggaacactttgtaacagcaccgaggatgggccaattaggagaaatccagctggaaatgtggccagaccaatggtgcaacgtcttcctgaaccacaggatgtcgctcagtgcttggaagttggtttatttgacacgcctcctttttattccaactctacaaacagtttccgaaacacagtggaaggttacagtgaccccacgggaaagtatgaccctgctgttcgaagtcttcacaatttggctcatctattcctgaatggaacagggggacaaacccatttgtctccaaatgatcctatttttgtcctcctgcacaccttcacagatgcagtctttgatgaatggctgaggagatacaatgctgatatatccacatttccattggaaaatgcccctattggacataatagacaatacaacatggtgccattctggcccccagtcaccaacacagaaatgtttgttactgctccagacaacctgggatacacttatgaaattcaatggccaagtcgggagtttagtgtacctgagataattgccatagcagtagttggcgctttgttactggttgcactcatttttgggactgcttcttatctgattcgtgccagacgcagtatggatgaagctaaccagcctctcctcactgatcagtatcaatgctatgctgaagaatatgaaaaactccagaatcctaatcagtctgtggtctaacaaatgccctactctcttatgcattagtatcacaaaaccacctggttgaatataatagattgagttattaactgtattttctttcactttattaccttctttctaatacaagcatatgttagcattaaagttctaggcatacttttcaaagctgggaagaccctttcagaatcttttcaatgggttttaattttcagttctatttaaaatggtgaatgacactaaactccatgatatttaaggatagtgtgaagatctttggcatgatttaaaggttgagtatgtgaagatataagtaagtgaactaccatgctttgtttacgtgtaaaggaaaataatgtttgatagtaaatgtccacttaaaatacatgaatgggcatttctaaaatgttaaaacataaacacatttccattcatggatatttgtcaacagatttaaagaaaaccacagttattaattaaagaaaattaattatgtgtagttataaaccaatgaaattttgattaaccttttcaaattaatgttccagtttgaagaccaatcaaatatattatttagtcaacatatactatttagtctcaggttcaaggctacaacaaaaatcaccatctttgtcaaactttggagagggaaaatcttcactttcttaagcaacaatggatattgcctgtgtttgccactgtgtttccctgcctctcaattcgctgaaaaaggaactacctatccttacatttcacctactaatgtctcttctaacatcttagaggtccatggagaaggcatatggagaacatgttttatactgctctataaatagtattccaatcactgtgcttaatttaaatagcattatcttatcatttatcagccttttatgtattttccaagtaaaatattaacatattatttcattggtcttcttttttatctggttctatatgaatgctattttttcccttctcttctaacatgaaatatattttctctttttgatcttgtgctatgaaacaatcttccaaagaactgtataaggtggtcataagtgaatattttaattaaaattggtaaaaataaataataacagtaataatcatgcactatagaaaa

SEQ ID NO: 196680 - DNA, 549 bp, Homo sapiens
  Payload ID: 18794
  Gene Name: tyrosinase-related protein 1
  ENST ID: ENST00000473763
  CDS Start-End: 243-549
ataaaagttatctcactaaatacttgagactcaaagtgatatacttcacttttccatacagcctgcagacaaaacccatcatatagctctgcctagctacaaggggatggcaaaatataatcccatatatctgaaaggagagaagaaccagatatggctggattttcctctacgtgcttcagtcttctctacacaaagagctgcaaaccaggtctttgttttgcactcttatttcaagcagaatgagtgctcctaaactcctctctctgggctgtatcttcttccccttgctactttttcagcaggcccgggctcaattcccaagacagtgtgccactgttgaggctttgagaagtggtatgtgttgcccagacctgtcccctgtgtctgggcctgggacagaccgctgtggctcatcatcagggaggggcagatgtgaggcagtgactgcagactcccggccccacagccctcagtatccccatgatggcagagatgatcgggaggtctggcccttgcgcttcttcaataggacatgtcactgcaacg

SEQ ID NO: 196681 - DNA, 3049 bp, Homo sapiens
  Payload ID: 18795
  Gene Name: tyrosine 3-monooxygenase/tryptophan 5-monooxygenase activation protein, beta
  Uniprot ID: P31946
  ENST ID: ENST00000353703
  CDS Start-End: 215-955
aggaccggagcggaagtggcgatcggagcggaagtggagctaccgccaccgccgccgccgattccggagccggggtagtcgccgccgccgccgccgctgcagccactgcaggcaccgctgccgccgcctgagtagtgggcttaggaaggaagaggtcatctcgctcggagcttcgctcggaagggtctttgttccctgcagccctcccacgggaatgacaatggataaaagtgagctggtacagaaagccaaactcgctgagcaggctgagcgatatgatgatatggctgcagccatgaaggcagtcacagaacaggggcatgaactctccaacgaagagagaaatctgctctctgttgcctacaagaatgtggtaggcgcccgccgctcttcctggcgtgtcatctccagcattgagcagaaaacagagaggaatgagaagaagcagcagatgggcaaagagtaccgtgagaagatagaggcagaactgcaggacatctgcaatgatgttctggagctgttggacaaatatcttattcccaatgctacacaaccagaaagtaaggtgttctacttgaaaatgaaaggagattattttaggtatctttctgaagtggcatctggagacaacaaacaaaccactgtgtcgaactcccagcaggcttaccaggaagcatttgaaattagtaagaaagaaatgcagcctacacacccaattcgtcttggtctggcactaaatttctcagtcttttactatgagattctaaactctcctgaaaaggcctgtagcctggcaaaaacggcatttgatgaagcaattgctgaattggatacgctgaatgaagagtcttataaagacagcactctgatcatgcagttacttagggacaatctcactctgtggacatcggaaaaccagggagacgaaggagacgctggggagggagagaactaatgtttctcgtgctttgtgatctgttcagtgtcactctgtaccctcaacatatatcccttgtgcgataaaaaaaaaaaaaaaaaaaaaaagagaatcgtacgtcgactttcgatttttcacagcctcagcctaggaaaaatggttcatgggataaacagctggtatttgtatctaaaactcagattggtcacataaatgccacggcattccgaagttttgattttgattaacattgacaggattactgtgtgtttaattttttaaaaactgaacactgtgattatggggttttgtaatttagcagaactcttactggtagaaaaaatagacctgaattatgtgtaactttttggaaggtttaatctgatatcaaaataatcattgaaatacaattccattgtaaagttgtacagaaagttatagagattatattgtgatgctggaacttggagtgagacacacatcatttggcatttgagttgaatggtaattcacagtaatgctgccgttgttcgggacttaaagacacttgacctgtttgggctgttgccacttaaaagttcatgaccacaaatgtccacagtgtcttcctctgaggaaactcgaatcctgaaatggaaattctttgtggcagataactggcttatgacaccttgaaaagttcaagtgctcatataacacaccacactgaaccccctttcctacagcaatatgttcactatgttaccaatttgcaacttgtgcttcaatagtggaatctactttcattgttaacactgagctaaagaaaaaaagccgtgtgttttatgaatgaccttatctgtttcctggataatacctttaagaataatgtcctgagtcaggcgtggtggtgcgtgcatctagtcccaactatttgggaggctgaggcaggaggatcgcttgagcccaggagtttaaagctgcagtgccctgtggttgcacctgtgaataactgcactccagcctgggcaacatagcgagacctcatctccaaaaaagaaaacaaaaaacaaaaaaaggaatgatgttctgtagagatggcctttcacttgaggagtactcagttttcaggttcttcctagctcggggcttttaaattttgaaatctaaacattctttcccaccatcctttttgactgttgaccttggttttctcttctaagtttctgtccctctgcttccttactttttttcctttttgaattctatctttatctgtcttttgttcactttttaatgctatatatgggcaggggtgagagacattactgagcaccttggtgagcaagcctggctttaaagattggagaagagcttctggcaccagaaccctgtcttcctccagttctcaacacggtgttgctcttcagtcataccggaatctgaatcaaaaaagtatttttaaatatccatgatttctccctgtattgaggctagccctgatcatgctttttgtgcctgtcaccaggtctcccaagtgcactcatccaggtcagtgctcagatgtgtttaaggagaccctatattcagggaagttgcgtgaacactgcagtggggagaattgagaatagtcaggcctatcagtctcacagaatcacccctctacctttgatattccacttagctgtagagtccatctgtttgtccatctgctgaaatgagaaaagaaaaatttatgcactgatttaaaacaaaccaaaaaaaaagaaaaaaacaaaaaaaaaaatccctcctttctagctgaacaaaaatgtgcagttaatacttggcgcttgaaaatgcagtagtgaatgtggaaccaagcctgtctgtatatctggtagctcttttcttgctttgttttttcttaccagtattctgcctaacgtttgcttctgtgatggttatattgcctagcaagcacacccgtggttgtgaaaatagtatagcaaaaaagaaaaatccccggttattgatgtactagatttgtgtatgtcttttaaacagttctagtttcaccttacacagaataatcaggaaaagtgtaaaaattcaaaagtgaaataaaaattttatcagttagttgcctgtgaa

SEQ ID NO: 196682 - DNA, 3109 bp, Homo sapiens
  Payload ID: 18795
  Gene Name: tyrosine 3-monooxygenase/tryptophan 5-monooxygenase activation protein, beta
  Uniprot ID: P31946
  ENST ID: ENST00000372839
  CDS Start-End: 275-1015
ggagctaccgccaccgccgccgccgattccggagccggggtagtcgccgccgccgccgccgctgcagccactgcaggcaccgctgccgccgcctgagtagtgggcttaggaaggaagaggtcatctcgctcggagcttcgctcggaagggtctttgttccctgcagccctcccacggcagagtctccagagatttgggccgctacaaaaagtgcattttgcccattcggctgtggatagagaagcaggaagagcactggacttggagtcagggaatgacaatggataaaagtgagctggtacagaaagccaaactcgctgagcaggctgagcgatatgatgatatggctgcagccatgaaggcagtcacagaacaggggcatgaactctccaacgaagagagaaatctgctctctgttgcctacaagaatgtggtaggcgcccgccgctcttcctggcgtgtcatctccagcattgagcagaaaacagagaggaatgagaagaagcagcagatgggcaaagagtaccgtgagaagatagaggcagaactgcaggacatctgcaatgatgttctggagctgttggacaaatatcttattcccaatgctacacaaccagaaagtaaggtgttctacttgaaaatgaaaggagattattttaggtatctttctgaagtggcatctggagacaacaaacaaaccactgtgtcgaactcccagcaggcttaccaggaagcatttgaaattagtaagaaagaaatgcagcctacacacccaattcgtcttggtctggcactaaatttctcagtcttttactatgagattctaaactctcctgaaaaggcctgtagcctggcaaaaacggcatttgatgaagcaattgctgaattggatacgctgaatgaagagtcttataaagacagcactctgatcatgcagttacttagggacaatctcactctgtggacatcggaaaaccagggagacgaaggagacgctggggagggagagaactaatgtttctcgtgctttgtgatctgttcagtgtcactctgtaccctcaacatatatcccttgtgcgataaaaaaaaaaaaaaaaaaaaaaagagaatcgtacgtcgactttcgatttttcacagcctcagcctaggaaaaatggttcatgggataaacagctggtatttgtatctaaaactcagattggtcacataaatgccacggcattccgaagttttgattttgattaacattgacaggattactgtgtgtttaattttttaaaaactgaacactgtgattatggggttttgtaatttagcagaactcttactggtagaaaaaatagacctgaattatgtgtaactttttggaaggtttaatctgatatcaaaataatcattgaaatacaattccattgtaaagttgtacagaaagttatagagattatattgtgatgctggaacttggagtgagacacacatcatttggcatttgagttgaatggtaattcacagtaatgctgccgttgttcgggacttaaagacacttgacctgtttgggctgttgccacttaaaagttcatgaccacaaatgtccacagtgtcttcctctgaggaaactcgaatcctgaaatggaaattctttgtggcagataactggcttatgacaccttgaaaagttcaagtgctcatataacacaccacactgaaccccctttcctacagcaatatgttcactatgttaccaatttgcaacttgtgcttcaatagtggaatctactttcattgttaacactgagctaaagaaaaaaagccgtgtgttttatgaatgaccttatctgtttcctggataatacctttaagaataatgtcctgagtcaggcgtggtggtgcgtgcatctagtcccaactatttgggaggctgaggcaggaggatcgcttgagcccaggagtttaaagctgcagtgccctgtggttgcacctgtgaataactgcactccagcctgggcaacatagcgagacctcatctccaaaaaagaaaacaaaaaacaaaaaaaggaatgatgttctgtagagatggcctttcacttgaggagtactcagttttcaggttcttcctagctcggggcttttaaattttgaaatctaaacattctttcccaccatcctttttgactgttgaccttggttttctcttctaagtttctgtccctctgcttccttactttttttcctttttgaattctatctttatctgtcttttgttcactttttaatgctatatatgggcaggggtgagagacattactgagcaccttggtgagcaagcctggctttaaagattggagaagagcttctggcaccagaaccctgtcttcctccagttctcaacacggtgttgctcttcagtcataccggaatctgaatcaaaaaagtatttttaaatatccatgatttctccctgtattgaggctagccctgatcatgctttttgtgcctgtcaccaggtctcccaagtgcactcatccaggtcagtgctcagatgtgtttaaggagaccctatattcagggaagttgcgtgaacactgcagtggggagaattgagaatagtcaggcctatcagtctcacagaatcacccctctacctttgatattccacttagctgtagagtccatctgtttgtccatctgctgaaatgagaaaagaaaaatttatgcactgatttaaaacaaaccaaaaaaaaagaaaaaaacaaaaaaaaaaatccctcctttctagctgaacaaaaatgtgcagttaatacttggcgcttgaaaatgcagtagtgaatgtggaaccaagcctgtctgtatatctggtagctcttttcttgctttgttttttcttaccagtattctgcctaacgtttgcttctgtgatggttatattgcctagcaagcacacccgtggttgtgaaaatagtatagcaaaaaagaaaaatccccggttattgatgtactagatttgtgtatgtcttttaaacagttctagtttcaccttacacagaataatcaggaaaagtgtaaaaattcaaaagtgaaataaaaattttatcagttagttgcctgtgaa

SEQ ID NO: 196683 - DNA, 556 bp, Homo sapiens
  Payload ID: 18795
  Gene Name: tyrosine 3-monooxygenase/tryptophan 5-monooxygenase activation protein, beta
  ENST ID: ENST00000445830
  CDS Start-End: 334-556
agtcgccgccgccgccgccgctgcagccactgcaggcaccgctgccgccgcctgagtagtgggcttaggaaggaagaggtcatctcgctcggagcttcgctcggaagggtctttgttccctgcagccctcccacgatagcatcaggtcctgattttgcttgccctgtgtgggagatggaatttggcaagatgatgctatgaacataaaatcagcctcgggaaccaaaagagaaaggcagagtctccagagatttgggccgctacaaaaagtgcattttgcccattcggctgtggatagagaagcaggaagagcactggacttggagtcagggaatgacaatggataaaagtgagctggtacagaaagccaaactcgctgagcaggctgagcgatatgatgatatggctgcagccatgaaggcagtcacagaacaggggcatgaactctccaacgaagagagaaatctgctctctgttgcctacaagaatgtggtaggcgcccgccgctcttcctggcgtgtcatctccagcattgagcagaaaacagagaggaatg

SEQ ID NO: 196684 - DNA, 648 bp, Homo sapiens
  Payload ID: 18795
  Gene Name: tyrosine 3-monooxygenase/tryptophan 5-monooxygenase activation protein, beta
  ENST ID: ENST00000428262
  CDS Start-End: 349-648
cggagccggggtagtcgccgccgccgccgccgctgcagccactgcaggcaccgctgccgccgcctgagtagtgggcttaggaaggaagaggtcatctcgctcggagcttcgctcggaagggtctttgttccctgcagccctcccacgtgcttgttatattgaagccattttagaattggagcgctatagatcagggaggcagcctctataaaaccaggctgagcaaattcccatgatgctggttctctaggcagagtctccagagatttgggccgctacaaaaagtgcattttgcccattcggctgtggatagagaagcaggaagagcactggacttggagtcagggaatgacaatggataaaagtgagctggtacagaaagccaaactcgctgagcaggctgagcgatatgatgatatggctgcagccatgaaggcagtcacagaacaggggcatgaactctccaacgaagagagaaatctgctctctgttgcctacaagaatgtggtaggcgcccgccgctcttcctggcgtgtcatctccagcattgagcagaaaacagagaggaatgagaagaagcagcagatgggcaaagagtaccgtgagaagatagaggcagaactgcaggacatctgcaatgatgttctg

SEQ ID NO: 196685 - DNA, 1097 bp, Homo sapiens
  Payload ID: 18795
  Gene Name: tyrosine 3-monooxygenase/tryptophan 5-monooxygenase activation protein, beta
  ENST ID: ENST00000479421
  CDS Start-End: 189-638
agcggaagtggagctaccgccaccgccgccgccgattccggagccggggtagtcgccgccgccgccgccgctgcagccactgcaggcaccgctgccgccgcctgagtagtgggcttaggaaggaagaggtcatctcgctcggagcttcgctcggaagggtctttgttccctgcagccctcccacgggaatgacaatggataaaagtgagctggtacagaaagccaaactcgctgagcaggctgagcgatatgatgatatggctgcagccatgaaggcagtcacagaacaggggcatgaactctccaacgaagagagaaatctgctctctgttgcctacaagaatgtggtaggcgcccgccgctcttcctggcgtgtcatctccagcattgagcagaaaacagagaggaatgagaagaagcagcagatgggcaaagagtaccgtgagaagatagaggcagaactgcaggacatctgcaatgatgttctgtttttcaggatgccacattctaaaacaactcttcgaaaatattgctctgtatacgaagcttggactccttcagaactacttttgttgagctgttggacaaatatcttattcccaatgctacacaaccagaaagtaaggtgttctacttgaaaatgaaaggagattattttaggtatctttctgaagtggcatctggagacaacaaacaaaccactgtgtcgaactcccagcaggcttaccaggaagcatttgaaattagtaagaaagaaatgcagcctacacacccaattcgtcttggtctggcactaaatttctcagtcttttactatgagattctaaactctcctgaaaaggcctgtagcctggcaaaaacggcatttgatgaagcaattgctgaattggatacgctgaatgaagagtcttataaagacagcactctgatcatgcagttacttagggacaatctcactctgtggacatcggaaaaccagggagacgaaggagacgctggggagggagagaactaatgtttctcgtgctttgtgatctgttcagtgtcactctgtaccctcaacatatatcccttgtgcgataaaaaaaaaaaaaaaa

SEQ ID NO: 196686 - DNA, 689 bp, Homo sapiens
  Payload ID: 18795
  Gene Name: tyrosine 3-monooxygenase/tryptophan 5-monooxygenase activation protein, beta
  ENST ID: ENST00000633979
  CDS Start-End: 1-244
agccatgaaggcagtcacagaacaggggcatgaactctccaacgaagagagaaatctgctctctgttgcctacaagaatgtggtaggcgcccgccgctcttcctggcgtgtcatctccagcattgagcagaaaacagagaggaatgagaagaagcagcagatgggcaaagagtaccgtgagaagatagaggcagaactgcaggacatctgcaatgatgttctggtacatctggtattcagatgaagtatgtcatgcattccaagggcaagaaagttccataattcatgaaatgtagaccaacttttaagagcatctgaaagaatgtgaagaagagcttggtacttactgcctcttaaccagtttttcaggatgccacattctaaaacaactcttcgaaaatattgctctgtatacgaagcttggactccttcagaactacttttgttgagctgttggacaaatatcttattcccaatgctacacaaccagaaagtaaggtgttctacttgaaaatgaaaggagattattttaggtatctttctgaagtggcatctggagacaacaaacaaaccactgtgtcgaactcccagcaggcttaccaggaagcatttgaaattagtaagaaagaaatgcagcctacacacccaattcgtcttggtctggcactaaatttctcagtcttttacta

SEQ ID NO: 196687 - DNA, 2211 bp, Homo sapiens
  Payload ID: 18796
  Gene Name: tyrosine 3-monooxygenase/tryptophan 5-monooxygenase activation protein, epsilon
  Uniprot ID: P62258
  ENST ID: ENST00000264335
  CDS Start-End: 269-1036
gctccggcgcccgctgagccgacagaggagaggcgtctcgtgcgctcgttccagccgcttcgggcgccgagttccaggacccgccccccgcgccagttgccagggagcggttgccatagagctgagcagttgtccgcgtgcgcaggcggaagtcccggattgaggcgccgccatttttgctgcccggacgcggagcgagaggctgagagagtcggagacactatccgcttccatccgtcgcgcagaccctgccggagccgctgccgctatggatgatcgagaggatctggtgtaccaggcgaagctggccgagcaggctgagcgatacgacgaaatggtggagtcaatgaagaaagtagcagggatggatgtggagctgacagttgaagaaagaaacctcctatctgttgcatataagaatgtgattggagctagaagagcctcctggagaataatcagcagcattgaacagaaagaagaaaacaagggaggagaagacaagctaaaaatgattcgggaatatcggcaaatggttgagactgagctaaagttaatctgttgtgacattctggatgtactggacaaacacctcattccagcagctaacactggcgagtccaaggttttctattataaaatgaaaggggactaccacaggtatctggcagaatttgccacaggaaacgacaggaaggaggctgcggagaacagcctagtggcttataaagctgctagtgatattgcaatgacagaacttccaccaacgcatcctattcgcttaggtcttgctctcaatttttccgtattctactacgaaattcttaattcccctgaccgtgcctgcaggttggcaaaagcagcttttgatgatgcaattgcagaactggatacgctgagtgaagaaagctataaggactctacacttatcatgcagttgttacgtgataatctgacactatggacttcagacatgcagggtgacggtgaagagcagaataaagaagcgctgcaggacgtggaagacgaaaatcagtgagacataagccaacaagagaaaccatctctgaccaccccctcctccccatcccaccctttggaaactccccattgtcactgagaaccaccaaatctgacttttacatttggtctcagaatttaggttcctgccctgttggttttttttttttttttttaaacagttttcaaaagttcttaaaggcaagagtgaatttctgtggattttactggtcccagcttttaggttctttaagacactaacaggactacatagaggctttttcagcattactgtgtcgtctccgtgccagatgtggcaagatcaccattagcaaatggaaattacatttgaaagccattagacttataggtgatgcaagcatctaagagagaggttaatcacactatagaggcataagtggtatcagttttcatttttctaattgtttaaactgtgttttataccagtgtttgcaagtaattgggtgttagcttgagatggttaaaggtggtttggggagggacttcgttgtaatggttttgctgtaaaaaatgtttccaactccgctgaaatgttgctgaaaagcatggtgctggtaacagttcaacaatccgtggctgctcattcttgcctactttactctcccactgaagcaggttagcgttgaaggtggtatggaaaagcctgcatgcctgttcaattcttttgtttcttctccttccccctccccctacctccttcccctcactcctcccctccttcgctcgctcaacctcttttgttcagtatgtgtaacttgaagctaatttgtactactggatatctgactggagccacagatacagaatctgtattgttcttactgaaacacagcatggaattaacattaaacttaaataaaacaaacctaaattaaaaatgccaaatatcgcgcctccatcctttatacttctaaaataaaatctctagtccaaacacactgacagtattatgtttgcctgaatgtgaaacattcctccttttttcttccataaataatttgtttgcttcccaaagatgtatgttttggaaaaaaattgcctgtagtctggttgtgaagaacactgagtcagttgatggtgtgtcttgtcctccagaccaggcagcaacatggtatttattttaatcattaaagtacaacatgagtagtacaa

SEQ ID NO: 196688 - DNA, 780 bp, Homo sapiens
  Payload ID: 18796
  Gene Name: tyrosine 3-monooxygenase/tryptophan 5-monooxygenase activation protein, epsilon
  ENST ID: ENST00000573026
  CDS Start-End: 72-188
agaggctgagagagtcggagacactatccgcttccatccgtcgcgcagaccctgccggagccgctgccgctatggatgatcgagaggatctggtgtaccaggcgaagctggccgagcaggctgagcgatacgacggtgaagagcagaataaagaagcgctgcaggacgtggaagacgaaaatcagtgagacataagccaacaagagaaaccatctctgaccaccccctcctccccatcccaccctttggaaactccccattgtcactgagaaccaccaaatctgacttttacatttggtctcagaatttaggttcctgccctgttggttttttttttttttttttaaacagttttcaaaagttcttaaaggcaagagtgaatttctgtggattttactggtcccagcttttaggttctttaagacactaacaggactacatagaggctttttcagcattactgtgtcgtctccgtgccagatgtggcaagatcaccattagcaaatggaaattacatttgaaagccattagacttataggtgatgcaagcatctaagagagaggttaatcacactatagaggcataagtggtatcagttttcatttttctaattgtttaaactgtgttttataccagtgtttgcaagtaattgggtgttagcttgagatggttaaaggtggtttggggagggacttcgttgtaatggttttgctgtaaaaaatgtttccaactccgctgaaatgttgctgaaaagcatggtgctggtaacagttcaacaa

SEQ ID NO: 196689 - DNA, 540 bp, Homo sapiens
  Payload ID: 18796
  Gene Name: tyrosine 3-monooxygenase/tryptophan 5-monooxygenase activation protein, epsilon
  ENST ID: ENST00000575977
  CDS Start-End: 105-428
gcgccgccatttttgctgcccggacgcggagcgagaggctgagagagtcggagacactatccgcttccatccgtcgcgcagaccctgccggagccgctgccgctatggatgatcgagaggatctggtgtaccaggcgaagctggccgagcaggctgagcgatacgacgaaatggtggagtcaatgaagaaagtagcagggatggatgtggagctgacagttgaagaaagaaacctcctatctgttgcatataagaatgtgattggagctagaagagcctcctggagaataatcagcagcattgaacagaaagaagaaaacaagggaggagaagacaagctaaaaatgattcgggaatatcggcaaatggtgaagagcagaataaagaagcgctgcaggacgtggaagacgaaaatcagtgagacataagccaacaagagaaaccatctctgaccaccccctcctccccatcccaccctttggaaactccccattgtcactgagaaccaccaaatctgacttttacatttggtctcagaat

SEQ ID NO: 196690 - DNA, 1818 bp, Homo sapiens
  Payload ID: 18796
  Gene Name: tyrosine 3-monooxygenase/tryptophan 5-monooxygenase activation protein, epsilon
  Uniprot ID: P62258
  ENST ID: ENST00000571732
  CDS Start-End: 210-911
attgaggcgccgccatttttgctgcccggacgcggagcgagaggctgagagagtcggagacactatccgcttccatccgtcgcgcagaccctgccggagccgctgccgctatggatgatcgagaggatctggtgtaccaggcgaagctggccgagcaggctgagcgatacgacgtgctctggaactgaacccgcagtatcttccaagaaatggtggagtcaatgaagaaagtagcagggatggatgtggagctgacagttgaagaaagaaacctcctatctgttgcatataagaatgtgattggagctagaagagcctcctggagaataatcagcagcattgaacagaaagaagaaaacaagggaggagaagacaagctaaaaatgattcgggaatatcggcaaatggttgagactgagctaaagttaatctgttgtgacattctggatgtactggacaaacacctcattccagcagctaacactggcgagtccaaggttttctattataaaatgaaaggggactaccacaggtatctggcagaatttgccacaggaaacgacaggaaggaggctgcggagaacagcctagtggcttataaagctgctagtgatattgcaatgacagaacttccaccaacgcatcctattcgcttaggtcttgctctcaatttttccgtattctactacgaaattcttaattcccctgaccgtgcctgcaggttggcaaaagcagcttttgatgatgcaattgcagaactggatacgctgagtgaagaaagctataaggactctacacttatcatgcagttgttacgtgataatctgacactatggacttcagacatgcagggtgacggtgaagagcagaataaagaagcgctgcaggacgtggaagacgaaaatcagtgagacataagccaacaagagaaaccatctctgaccaccccctcctccccatcccaccctttggaaactccccattgtcactgagaaccaccaaatctgacttttacatttggtctcagaatttaggttcctgccctgttggttttttttttttttttttaaacagttttcaaaagttcttaaaggcaagagtgaatttctgtggattttactggtcccagcttttaggttctttaagacactaacaggactacatagaggctttttcagcattactgtgtcgtctccgtgccagatgtggcaagatcaccattagcaaatggaaattacatttgaaagccattagacttataggtgatgcaagcatctaagagagaggttaatcacactatagaggcataagtggtatcagttttcatttttctaattgtttaaactgtgttttataccagtgtttgcaagtaattgggtgttagcttgagatggttaaaggtggtttggggagggacttcgttgtaatggttttgctgtaaaaaatgtttccaactccgctgaaatgttgctgaaaagcatggtgctggtaacagttcaacaatccgtggctgctcattcttgcctactttactctcccactgaagcaggttagcgttgaaggtggtatggaaaagcctgcatgcctgttcaattcttttgtttcttctccttccccctccccctacctccttcccctcactcctcccctccttcgctcgctcaacctcttttgttcagtatgtgtaacttgaagctaatttgtactactggatatctgactggagccacagatacagaatctgtattgttcttactgaaacacagcatggaattaacattaaacttaaataaaacaaacctaaattaaaaatgccaa

SEQ ID NO: 196691 - DNA, 739 bp, Homo sapiens
  Payload ID: 18796
  Gene Name: tyrosine 3-monooxygenase/tryptophan 5-monooxygenase activation protein, epsilon
  ENST ID: ENST00000573196
  CDS Start-End: 97-381
atttttgctgcccggacgcggagcgagaggctgagagagtcggagacactatccgcttccatccgtcgcgcagaccctgccggagccgctgccgctatggatgatcgagaggatctggtgtaccaggcgaagctggccgagcaggctgagcgatacgacgaaatggtggagtcaatgaagaaagtagcagggatggatgtggagctgacagttgaagaaagaaacctcctatctgttgcatataagaatgtgattggagctagaagagcctcctggagaataatcagcagcattgaacagaaagaagaaaacaagggaggagaagacaagctaaaaatgattcgggaatatcggcaaatggttggcaaaagcagcttttgatgatgcaattgcagaactggatacgctgagtgaagaaagctataaggactctacacttatcatgcagttgttacgtgataatctgacactatggacttcagacatgcagggtgacggtgaagagcagaataaagaagcgctgcaggacgtggaagacgaaaatcagtgagacataagccaacaagagaaaccatctctgaccaccccctcctccccatcccaccctttggaaactccccattgtcactgagaaccaccaaatctgacttttacatttggtctcagaatttaggttcctgccctgttggttttttttttttttttttaaacagttttcaaaagttcttaaaggcaagag

SEQ ID NO: 196692 - DNA, 1377 bp, Homo sapiens
  Payload ID: 18796
  Gene Name: tyrosine 3-monooxygenase/tryptophan 5-monooxygenase activation protein, epsilon
  ENST ID: ENST00000466227
  CDS Start-End: 1-329
aaatggtggagtcaatgaagaaagtagcagggatggatgtggagctgacagttgaagaaagaaacctcctatctgttgcatataagaatgtgattggagctagaagagcctcctggagaataatcagcagcattgaacagaaagaagaaaacaagggaggagaagacaagctaaaaatgattcgggaatatcggcaaatggttgagactgagctaaagttaatctgttgtgacattctggatgtactggacaaacacctcattccagcagctaacactggttggcaaaagcagcttttgatgatgcaattgcagaactggatacgctgagtgaagaaagctataaggactctacacttatcatgcagttgttacgtgataatctgacactatggacttcagacatgcagggtgacggtgaagagcagaataaagaagcgctgcaggacgtggaagacgaaaatcagtgagacataagccaacaagagaaaccatctctgaccaccccctcctccccatcccaccctttggaaactccccattgtcactgagaaccaccaaatctgacttttacatttggtctcagaatttaggttcctgccctgttggttttttttttttttttttaaacagttttcaaaagttcttaaaggcaagagtgaatttctgtggattttactggtcccagcttttaggttctttaagacactaacaggactacatagaggctttttcagcattactgtgtcgtctccgtgccagatgtggcaagatcaccattagcaaatggaaattacatttgaaagccattagacttataggtgatgcaagcatctaagagagaggttaatcacactatagaggcataagtggtatcagttttcatttttctaattgtttaaactgtgttttataccagtgtttgcaagtaattgggtgttagcttgagatggttaaaggtggtttggggagggacttcgttgtaatggttttgctgtaaaaaatgtttccaactccgctgaaatgttgctgaaaagcatggtgctggtaacagttcaacaatccgtggctgctcattcttgcctactttactctcccactgaagcaggttagcgttgaaggtggtatggaaaagcctgcatgcctgttcaattcttttgtttcttctccttccccctccccctacctccttcccctcactcctcccctccttcgctcgctcaacctcttttgttcagtatgtgtaacttgaagctaatttgtactactggatatctgactggagccacagatacagaatctgtattgttcttactgaaacacagcatggaattaacattaaacttaaataaaacaaacctaaattaaaaatgccaaa

SEQ ID NO: 196693 - DNA, 732 bp, Homo sapiens
  Payload ID: 18796
  Gene Name: tyrosine 3-monooxygenase/tryptophan 5-monooxygenase activation protein, epsilon
  ENST ID: ENST00000496706
  CDS Start-End: 1-348
ggggactaccacaggtatctggcagaatttgccacaggaaacgacaggaaggaggctgcggagaacagcctagtggcttataaagctgctagtgatattgcaatgacagaacttccaccaacgcatcctattcgcttaggtcttgctctcaatttttccgtattctactacgaaattcttaattcccctgaccgtgcctgcaggttggcaaaagcagcttttgatgatgcaattgcagaactggatacgctgagtgaagaaagctataaggactctacacttatcatgcagttgttacgtgataatctgacactatggacttcagacatgcagggtgacgattcctaaaggaaaacccaactcttcctttcctaaaaactctactttgtgaagagcagaataaagaagcgctgcaggacgtggaagacgaaaatcagtgagacataagccaacaagagaaaccatctctgaccaccccctcctccccatcccaccctttggaaactccccattgtcactgagaaccaccaaatctgacttttacatttggtctcagaatttaggttcctgccctgttggttttttttttttttttttaaacagttttcaaaagttcttaaaggcaagagtgaatttctgtggattttactggtcccagcttttaggttctttaagacactaacaggactacatagaggctttttcagcattactgtgtcgtctccgtgccag

SEQ ID NO: 196694 - DNA, 1818 bp, Homo sapiens; identical to SEQ ID NO: 196690
  Payload ID: 18796
  Gene Name: tyrosine 3-monooxygenase/tryptophan 5-monooxygenase activation protein, epsilon
  Uniprot ID: P62258
  ENST ID: ENST00000616643
  CDS Start-End: 210-911

SEQ ID NO: 196695 - DNA, 739 bp, Homo sapiens; identical to SEQ ID NO: 196691
  Payload ID: 18796
  Gene Name: tyrosine 3-monooxygenase/tryptophan 5-monooxygenase activation protein, epsilon
  ENST ID: ENST00000630606
  CDS Start-End: 97-381

SEQ ID NO: 196696 - DNA, 780 bp, Homo sapiens; identical to SEQ ID NO: 196688
  Payload ID: 18796
  Gene Name: tyrosine 3-monooxygenase/tryptophan 5-monooxygenase activation protein, epsilon
  ENST ID: ENST00000628106
  CDS Start-End: 72-188

SEQ ID NO: 196697 - DNA, 1377 bp, Homo sapiens; identical to SEQ ID NO: 196692
  Payload ID: 18796
  Gene Name: tyrosine 3-monooxygenase/tryptophan 5-monooxygenase activation protein, epsilon
  ENST ID: ENST00000629090
  CDS Start-End: 1-329

SEQ ID NO: 196698 - DNA, 2208 bp, Homo sapiens
  Payload ID: 18796
  Gene Name: tyrosine 3-monooxygenase/tryptophan 5-monooxygenase activation protein, epsilon
  Uniprot ID: P62258
  ENST ID: ENST00000627231
  CDS Start-End: 269-1036
gctccggcgcccgctgagccgacagaggagaggcgtctcgtgcgctcgttccagccgcttcgggcgccgagttccaggacccgccccccgcgccagttgccagggagcggttgccatagagctgagcagttgtccgcgtgcgcaggcggaagtcccggattgaggcgccgccatttttgctgcccggacgcggagcgagaggctgagagagtcggagacactatccgcttccatccgtcgcgcagaccctgccggagccgctgccgctatggatgatcgagaggatctggtgtaccaggcgaagctggccgagcaggctgagcgatacgacgaaatggtggagtcaatgaagaaagtagcagggatggatgtggagctgacagttgaagaaagaaacctcctatctgttgcatataagaatgtgattggagctagaagagcctcctggagaataatcagcagcattgaacagaaagaagaaaacaagggaggagaagacaagctaaaaatgattcgggaatatcggcaaatggttgagactgagctaaagttaatctgttgtgacattctggatgtactggacaaacacctcattccagcagctaacactggcgagtccaaggttttctattataaaatgaaaggggactaccacaggtatctggcagaatttgccacaggaaacgacaggaaggaggctgcggagaacagcctagtggcttataaagctgctagtgatattgcaatgacagaacttccaccaacgcatcctattcgcttaggtcttgctctcaatttttccgtattctactacgaaattcttaattcccctgaccgtgcctgcaggttggcaaaagcagcttttgatgatgcaattgcagaactggatacgctgagtgaagaaagctataaggactctacacttatcatgcagttgttacgtgataatctgacactatggacttcagacatgcagggtgacggtgaagagcagaataaagaagcgctgcaggacgtggaagacgaaaatcagtgagacataagccaacaagagaaaccatctctgaccaccccctcctccccatcccaccctttggaaactccccattgtcactgagaaccaccaaatctgacttttacatttggtctcagaatttaggttcctgccctgttggttttttttttttttttttaaacagttttcaaaagttcttaaaggcaagagtgaatttctgtggattttactggtcccagcttttaggttctttaagacactaacaggactacatagaggctttttcagcattactgtgtcgtctccgtgccagatgtggcaagatcaccattagcaaatggaaattacatttgaaagccattagacttataggtgatgcaagcatctaagagagaggttaatcacactatagaggcataagtggtatcagttttcatttttctaattgtttaaactgtgttttataccagtgtttgcaagtaattgggtgttagcttgagatggttaaaggtggtttggggagggacttcgttgtaatggttttgctgtaaaaaatgtttccaactccgctgaaatgttgctgaaaagcatggtgctggtaacagttcaacaatccgtggctgctcattcttgcctactttactctcccactgaagcaggttagcgttgaaggtggtatggaaaagcctgcatgcctgttcaattcttttgtttcttctccttccccctccccctacctccttcccctcactcctcccctccttcgctcgctcaacctcttttgttcagtatgtgtaacttgaagctaatttgtactactggatatctgactggagccacagatacagaatctgtattgttcttactgaaacacagcatggaattaacattaaacttaaataaaacaaacctaaattaaaaatgccaaatatcgcgcctccatcctttatacttctaaaataaaatctctagtccaaacacactgacagtattatgtttgcctgaatgtgaaacattcctccttttttcttccataaataatttgtttgcttcccaaagatgtatgttttggaaaaaaattgcctgtagtctggttgtgaagaacactgagtcagttgatggtgtgtcttgtcctccagaccaggcagcaacatggtatttattttaatcattaaagtacaacatgagtagta

SEQ ID NO: 196699 - DNA, 732 bp, Homo sapiens; identical to SEQ ID NO: 196693
  Payload ID: 18796
  Gene Name: tyrosine 3-monooxygenase/tryptophan 5-monooxygenase activation protein, epsilon
  ENST ID: ENST00000628059
  CDS Start-End: 1-348

SEQ ID NO: 196700 - DNA, 540 bp, Homo sapiens; identical to SEQ ID NO: 196689
  Payload ID: 18796
  Gene Name: tyrosine 3-monooxygenase/tryptophan 5-monooxygenase activation protein, epsilon
  ENST ID: ENST00000626999
  CDS Start-End: 105-428

SEQ ID NO: 196701 - DNA, 1825 bp, Homo sapiens
  Payload ID: 18797
  Gene Name: tyrosine 3-monooxygenase/tryptophan 5-monooxygenase activation protein, eta
  Uniprot ID: Q04917
  ENST ID: ENST00000248975
  CDS Start-End: 274-1014
gcaggcgtcgtcccgtcctcccatcccccagcgcggccgcgtctcctccctcggcgttgtccgcggcgcgagccacagcgcgcggggcgagccagcgagagggcgcgagcggcggcgctgcctgcagcctgcagcctgcagcctccggccggccggcgagccagtgcgcgtgcgcggcggcggcctccgcagcgaccggggagcggactgaccggcgggagggctagcgagccagcggtgtgaggcgcgaggcgaggccgagccgcgagcgacatgggggaccgggagcagctgctgcagcgggcgcggctggccgagcaggcggagcgctacgacgacatggcctccgctatgaaggcggtgacagagctgaatgaacctctctccaatgaagatcgaaatctcctctctgtggcctacaagaatgtggttggtgccaggcgatcttcctggagggtcattagcagcattgagcagaaaaccatggctgatggaaacgaaaagaaattggagaaagttaaagcttaccgggagaagattgagaaggagctggagacagtttgcaatgatgtcctgtctctgcttgacaagttcctgatcaagaactgcaatgatttccagtatgagagcaaggtgttttacctgaaaatgaagggtgattactaccgctacttagcagaggtcgcttctggggagaagaaaaacagtgtggtcgaagcttctgaagctgcctacaaggaagcctttgaaatcagcaaagagcagatgcaacccacgcatcccatccggctgggcctggccctcaacttctccgtgttctactatgagatccagaatgcacctgagcaagcctgcctcttagccaaacaagccttcgatgatgccatagctgagctggacacactaaacgaggattcctataaggactccacgctgatcatgcagttgctgcgagacaacctcaccctctggacgagcgaccagcaggatgaagaagcaggagaaggcaactgaagatccttcaggtcccctggcccttccttcacccaccacccccatcatcaccgattcttccttgccacaatcactaaatatctagtgctaaacctatctgtattggcagcacagctactcagatctgcactcctgtctcttgggaagcagtttcagataaatcatgggcattgctggactgatggttgctttgagcccacaggagctccctttttgaattgtgtggagaagtgtgttctgatgaggcattttactatgcctgttgatctatgggaaatctaggcgaaagtaatggggaagattagaaagaattagccaaccaggctacagttgatatttaaaagatccatttaaaacaagctgatagtgtttcgttaagcagtacatcttgtgcatgcaaaaatgaattcacccctcccacctctttcttcaattaatggaaaactgttaagggaagctgatacagagagacaacttgctcctttccatcagctttataataaactgtttaacgtgaggtttcagtagctccttggttttgcctctttaaattatgacgtgcacaaaccttcttttcaatgcaatgcatctgaaagttttgatacttgtaacttttttttttttttggttgcaattgtttaagaatcatggatttattttttgtaactctttggctattgtccttgtgtatcctgacagcgccatgtgtgtcagcccatgtcaatcaagatgggtgattatgaaatgccagacttctaaaataaatgttttggaattcaatgggtaaataaatgctgctttggggatatta

SEQ ID NO: 196702 - DNA, 1879 bp, Homo sapiens
  Payload ID: 18797
  Gene Name: tyrosine 3-monooxygenase/tryptophan 5-monooxygenase activation protein, eta
  ENST ID: ENST00000397492
  CDS Start-End: 213-431
cgcggcgcgagccacagcgcgcggggcgagccagcgagagggcgcgagcggcggcgctgcctgcagcctgcagcctgcagcctccggccggccggcgagccagtgcgcgtgcgcggcggcggcctccgcagcgaccggggagcggactgaccggcgggagggctagcgagccagcggtgtgaggcgcgaggcgaggccgagccgcgagcgacatgggggaccgggagcagctgctgcagcgggcgcggctggccgagcaggcggagcgctacgacgacatggcctccgctatgaaggcggttgctggtaaaattcctcctagtgtccaagtggaggcagcttgtcttctgtcccagcattttggtgctcctcccgcccctactcctggctgcagtggcattcccttctgcggtggtgacagagctgaatgaacctctctccaatgaagatcgaaatctcctctctgtggcctacaagaatgtggttggtgccaggcgatcttcctggagggtcattagcagcattgagcagaaaaccatggctgatggaaacgaaaagaaattggagaaagttaaagcttaccgggagaagattgagaaggagctggagacagtttgcaatgatgtcctgtctctgcttgacaagttcctgatcaagaactgcaatgatttccagtatgagagcaaggtgttttacctgaaaatgaagggtgattactaccgctacttagcagaggtcgcttctggggagaagaaaaacagtgtggtcgaagcttctgaagctgcctacaaggaagcctttgaaatcagcaaagagcagatgcaacccacgcatcccatccggctgggcctggccctcaacttctccgtgttctactatgagatccagaatgcacctgagcaagcctgcctcttagccaaacaagccttcgatgatgccatagctgagctggacacactaaacgaggattcctataaggactccacgctgatcatgcagttgctgcgagacaacctcaccctctggacgagcgaccagcaggatgaagaagcaggagaaggcaactgaagatccttcaggtcccctggcccttccttcacccaccacccccatcatcaccgattcttccttgccacaatcactaaatatctagtgctaaacctatctgtattggcagcacagctactcagatctgcactcctgtctcttgggaagcagtttcagataaatcatgggcattgctggactgatggttgctttgagcccacaggagctccctttttgaattgtgtggagaagtgtgttctgatgaggcattttactatgcctgttgatctatgggaaatctaggcgaaagtaatggggaagattagaaagaattagccaaccaggctacagttgatatttaaaagatccatttaaaacaagctgatagtgtttcgttaagcagtacatcttgtgcatgcaaaaatgaattcacccctcccacctctttcttcaattaatggaaaactgttaagggaagctgatacagagagacaacttgctcctttccatcagctttataataaactgtttaacgtgaggtttcagtagctccttggttttgcctctttaaattatgacgtgcacaaaccttcttttcaatgcaatgcatctgaaagttttgatacttgtaacttttttttttttttggttgcaattgtttaagaatcatggatttattttttgtaactctttggctattgtccttgtgtatcctgacagcgccatgtgtgtcagcccatgtcaatcaagatgggtgattatgaaatgccagacttctaaaataaatgttttggaattcaatgggtaaataaatgctgctttggggatatta

SEQ ID NO: 196703 - DNA, 502 bp, Homo sapiens
  Payload ID: 18797
  Gene Name: tyrosine 3-monooxygenase/tryptophan 5-monooxygenase activation protein, eta
  ENST ID: ENST00000420430
  CDS Start-End: 17-502
atactgccttcctgtaatgattgatgttcctcattctaccagcgtcacctggaggacagtgttggtgacagagctgaatgaacctctctccaatgaagatcgaaatctcctctctgtggcctacaagaatgtggttggtgccaggcgatcttcctggagggtcattagcagcattgagcagaaaaccatggctgatggaaacgaaaagaaattggagaaagttaaagcttaccgggagaagattgagaaggagctggagacagtttgcaatgatgtcctgtctctgcttgacaagttcctgatcaagaactgcaatgatttccagtatgagagcaaggtgttttacctgaaaatgaagggtgattactaccgctacttagcagaggtcgcttctggggagaagaaaaacagtgtggtcgaagcttctgaagctgcctacaaggaagcctttgaaatcagcaaagagcagatgcaacccacgcatcccatccggctgggcctg

SEQ ID NO: 196704 - DNA, 822 bp, Homo sapiens
  Payload ID: 18797
  Gene Name: tyrosine 3-monooxygenase/tryptophan 5-monooxygenase activation protein, eta
  ENST ID: ENST00000443669
  CDS Start-End: 213-332
cgcggcgcgagccacagcgcgcggggcgagccagcgagagggcgcgagcggcggcgctgcctgcagcctgcagcctgcagcctccggccggccggcgagccagtgcgcgtgcgcggcggcggcctccgcagcgaccggggagcggactgaccggcgggagggctagcgagccagcggtgtgaggcgcgaggcgaggccgagccgcgagcgacatgggggaccgggagcagctgctgcagcgggcgcggctggccgagcaggcggagcgctacgacgacatggcctccgctatgaaggcggtgagacgaatctgtgtgtctttgcattcctgagaccctcataaatcgattctgcagcttctccggtggatgagtcgtgcccagccacaccctagcaaaataccgtgggtcacacaccacctgcatttctgagttccggttaccatctcactctctctccacgttattttacgttttctgtgacagagctgaatgaacctctctccaatgaagatcgaaatctcctctctgtggcctacaagaatgtggttggtgccaggcgatcttcctggagggtcattagcagcattgagcagaaaaccatggctgatggaaacgaaaagaaattggagaaagttaaagcttaccgggagaagattgagaaggagctggagacagtttgcaatgatgtcctgtctctgcttgacaagttcctgatcaagaactgcaatgatttccagtatgagagcaaggtgttttacctgaaaatgaagggtgattactaccgctacttagcagaggtcgcttctggggagaagaaaaa

SEQ ID NO: 196705 - DNA, 3750 bp, Homo sapiens
  Payload ID: 18798
  Gene Name: tyrosine 3-monooxygenase/tryptophan 5-monooxygenase activation protein, gamma
  Uniprot ID: P61981
  ENST ID: ENST00000307630
  CDS Start-End: 224-967
ggccgcagggggttgtccgtcagtggcacgcacagcagccgcagccgcctcgcgcccggtcccgcggtcgcagctccagccgcctcctccgcgcagccgccgcctcagctgctcgctctgtgggtcggtcctctccggcacttgggctccagtcgcgccctccaagcccttcaggccgccccagtgtcctcctccttctccggccagacccagccccgcgaagatggtggaccgcgagcaactggtgcagaaagcccggctggccgagcaggcggagcgctacgacgacatggccgcggccatgaagaacgtgacagagctgaatgagccactgtcgaatgaggaacgaaaccttctgtctgtggcctacaagaacgttgtgggggcacgccgctcttcctggagggtcatcagtagcattgagcagaagacatctgcagacggcaatgagaagaagattgagatggtccgtgcgtaccgggagaagatagagaaggagttggaggctgtgtgccaggatgtgctgagcctgctggataactacctgatcaagaattgcagcgagacccagtacgagagcaaagtgttctacctgaagatgaaaggggactactaccgctacctggctgaagtggccaccggagagaaaagggcgacggtggtggagtcctccgagaaggcctacagcgaagcccacgagatcagcaaagagcacatgcagcccacccaccccatccgattaggcctggctcttaactactccgtcttctactatgagatccagaacgccccagagcaagcgtgccacttggccaagaccgcgttcgacgacgccatcgccgagcttgacaccctcaacgaggactcctacaaggactccacgctcatcatgcagctcctccgcgacaacctcacgctctggacgagcgaccagcaggacgacgatggcggcgaaggcaacaattaaggccccaggggaactggcagcgcacgcggatgctactactgcagtctttatttttttcccatgagttgggggtcgggtgggggagggaaagggagggatgaccttcccagggagaaacccacgacctgtcctgtctttgatcgcctctttgacatttttgccaaaataccactagtggaaagtcaggctagctgtgctggtattggaatagcagcctcacactggcgtctggactgttctgtagattcatgcaagtggagctgtctgtctctaatttaacttattgctagataatagggttttcagatgaaaagaaaacttaaagaggaatggccctcattcagtaagttctgtggttccagtaaggatttttatgtacatacgctctcgtctctcgttttgggtactttctatctcatctgtctcggctctgcatgttttccagggtgtagcctacagacatggaacagtgtaaatcccagactgacagacttagaacctgaggtctcattcatccttatggtttaggccttgccagttttccgaagtctctgattagttgacagtattaacactaaattgcagtttacagtatttctacattacagccatatgtaacatcaagccatcgattgtgtacttttcctttgctagttgtttgggctttaacatccttattcagccttatccaggttggttttgctgttgatcggtctcctaggctaaatgagaatgaaagcgacttcaggtcaggtggctgtgggattttttttttttggtccttctttcctcttaacgtaaatccaccaccaaaattattaatcctcttgagagaaacgtgaaacgccacaaaaatagagaaaattcaggtctgtatgtcatggatcgtgttggtattttcagagaacatcccgcttctgaagctgctgcagctccctcctcagggatcacactgccgtcacccactctgcactggggcgtttcctactgcgcctcgtgctggcggacgcagctgggtgcagaagctgtggggtcggagaggcgtttggagaaggtctgtggtgcagtgtgtgaaaattcaggtgctagaagcctactggtagaaaaacccaaaaggaagagctatatccttaaccattctgtccaatttcgggagccttgtcagtgtgtcagtttttcctccccgaagacactccttccccaagtaattgtaggaagataaaaaaactgttaccagataacaaacactgaactcctatttgaccagaactttttcctctcgagatagttttttctttttaatgaaaaaagcataggaattggagattggcttgtctcacgcagccagtgcacatttggaattgacggaaacaacgttgctatttccacccatttgttttcggcagccttaaggccctcattctcatttcgggtgaatctgtctatctgtgaacgtggcccgcatgtgcattcttttttttatatatataaagtcagtgacgaggaactcccgagacgtgtaatgacaccacacttgttttctttgtttctttgttttatttaggcaagaagaggtgtgagtaattgaggaaaaactgacagatgcttttgctaataccaaaattgagcttacaattaggaactgagtatgtgtaacaggatacaggtgacagtgaagatagaagaaccacgatgaccacagactcaatgtgctctgtaacatcgcacagtttacccagcatgactttccttaggaggccccctcctcacgctagagtaaaagtcccagttaagtgaagcctaccagaagaactagtagaagaagctttgccgcttttgtgcctctcacaggcgcctaaagtcattgccatgggaggaagacgatttggggggggaggggggggggggcagggtaggtggggctttccctaatttatcttcatgtccagtgagcagtgttgcgtttttccttgtagcatttggaaatgatttactggaattacaaaacctatttttcctttaaatttcagctttggctctggctgctttttagaataatgcaagataaaaatcacacctgagggctgaaaacggagagggaatgggagacttgatatttaagcagcttgaatggtttttcttttctttatttttaaagaaatgcacttgcctatgatactgtctctccagtgaaatgattactcctccattactctattgatacaatattgtgcatgctagtgttgtatttctatacagtagcttgaaattgattaacttatactgtaggtgttatgtattcctatgacaaaaaaaattaagtcttcaaattttttaaaggttttttttttttaatttaatttttccttttgggggtaaagtttgctctaccaaatagtgattgtaacaaattgatctgttttggatgttgctatagtgacatgcagttatatattttgtttttaaaagggggggagcaaaagaaacaccagtgttagcttaatcttaatgtctggtgtttgtcatggtgaaattataactattacagtgttggagaacaacaaatatgttctctgaatgagcctttgtgctttttgtcatgttatgcagtgaactatttttaaggtctaatcagtgattatttttccagctccgtgtttctctaaggaattatttcacacacggaccatctttagcagtttcctcagtgatggaatatcatgaatgtgagtcattatgtagctgtcgtacattgagcaaataaacttacagatctgacgcca

SEQ ID NO: 196706 - DNA, 2208 bp, Homo sapiens
  Payload ID: 18799
  Gene Name: tyrosine 3-monooxygenase/tryptophan 5-monooxygenase activation protein, theta
  Uniprot ID: P27348
  ENST ID: ENST00000238081
  CDS Start-End: 157-894
cgggagggtcctcagctaaagccaaaagcagatcaaagtggtgggactcgcgtcgcggccgcggagacgtgaagctctcgaggctcctcccgctgcgggtcggcgctcgccctcgctctcctcgccctccgccccggccccggccccgcgcccgccatggagaagactgagctgatccagaaggccaagctggccgagcaggccgagcgctacgacgacatggccacctgcatgaaggcagtgaccgagcagggcgccgagctgtccaacgaggagcgcaacctgctctccgtggcctacaagaacgtggtcgggggccgcaggtccgcctggagggtcatctctagcatcgagcagaagaccgacacctccgacaagaagttgcagctgattaaggactatcgggagaaagtggagtccgagctgagatccatctgcaccacggtgctggaattgttggataaatatttaatagccaatgcaactaatccagagagtaaggtcttctatctgaaaatgaagggtgattacttccggtaccttgctgaagttgcgtgtggtgatgatcgaaaacaaacgatagataattcccaaggagcttaccaagaggcatttgatataagcaagaaagagatgcaacccacacacccaatccgcctggggcttgctcttaacttttctgtattttactatgagattcttaataacccagagcttgcctgcacgctggctaaaacggcttttgatgaggccattgctgaacttgatacactgaatgaagactcatacaaagacagcaccctcatcatgcagttgcttagagacaacctaacactttggacatcagacagtgcaggagaagaatgtgatgcggcagaaggggctgaaaactaaatccatacagggtgtcatccttctttccttcaagaaacctttttacacatctccattccttattccacttggatttcctatagcaaagaaacccattcatgtgtatggaatcaactgtttatagtcttttcacactgcagctttgggaaaacttcattccttgatttgtgtttgtcttggccttcctggtgtgcagtactgctgtagaaaagtattaatagcttcatttcatataaacataagtaactcccaaacacttatgtagaggactaaaaatgtatctggtatttaagtaatctgaaccagttctgcaagtgactgtgttttgtattactgtgaaaataagaaaatgtagttaattacaatttaaagagtattccacataacttcttaatttctacattccctcccttactcttcgggggtttcctttcagtaagcaacttttccatgctcttaatgtattcctttttagtaggaatccggaagtattagattgaatggaaaagcacttgccatctctgtctaggggtcacaaattgaaatggctcctgtatcacatacggaggtcttgtgtatctgtggcaacagggagtttccttattcactctttatttgctgctgtttaagttgccaacctcccctcccaataaaaattcacttacacctcctgcctttgtagttctggtattcactttactatgtgatagaagtagcatgttgctgccagaatacaagcattgcttttggcaaattaaagtgcatgtcatttcttaatacactagaaaggggaaataaattaaagtacacaagtccaagtctaaaactttagtacttttccatgcagatttgtgcacatgtgagagggtgtccagtttgtctagtgattgttatttagagagttggaccactattgtgtgttgctaatcattgactgtagtcccaaaaaagccttgtgaaaatgttatgccctatgtaacagcagagtaacataaaataaaagtacattttataaaccatttactatggctttgtaacaattgcatacccatattttaagggacaggtgaatttactactttctaaagtttattgatacttcccttttatgtaaaatgtagtagtgatacctatatttccacattgtgcattgtgacacacttgtctagggatgcctggaagtgtataaaattggactgcatttcttagagtgttttactatagatcagtctcatgggccatctcttcctcagatgtaaatgatatctggttaagtgttatatggaataaagtggacattttaaaactagcaaa

SEQ ID NO: 196707 - DNA, 2216 bp, Homo sapiens
  Payload ID: 18799
  Gene Name: tyrosine 3-monooxygenase/tryptophan 5-monooxygenase activation protein, theta
  Uniprot ID: P27348
  ENST ID: ENST00000381844
  CDS Start-End: 165-902
aaaagcgggcggcgggccgcattgtctgacggcgctccctctctgctttttgttctcgcctcgccgccccgcccctccgcagctctcgaggctcctcccgctgcgggtcggcgctcgccctcgctctcctcgccctccgccccggccccggccccgcgcccgccatggagaagactgagctgatccagaaggccaagctggccgagcaggccgagcgctacgacgacatggccacctgcatgaaggcagtgaccgagcagggcgccgagctgtccaacgaggagcgcaacctgctctccgtggcctacaagaacgtggtcgggggccgcaggtccgcctggagggtcatctctagcatcgagcagaagaccgacacctccgacaagaagttgcagctgattaaggactatcgggagaaagtggagtccgagctgagatccatctgcaccacggtgctggaattgttggataaatatttaatagccaatgcaactaatccagagagtaaggtcttctatctgaaaatgaagggtgattacttccggtaccttgctgaagttgcgtgtggtgatgatcgaaaacaaacgatagataattcccaaggagcttaccaagaggcatttgatataagcaagaaagagatgcaacccacacacccaatccgcctggggcttgctcttaacttttctgtattttactatgagattcttaataacccagagcttgcctgcacgctggctaaaacggcttttgatgaggccattgctgaacttgatacactgaatgaagactcatacaaagacagcaccctcatcatgcagttgcttagagacaacctaacactttggacatcagacagtgcaggagaagaatgtgatgcggcagaaggggctgaaaactaaatccatacagggtgtcatccttctttccttcaagaaacctttttacacatctccattccttattccacttggatttcctatagcaaagaaacccattcatgtgtatggaatcaactgtttatagtcttttcacactgcagctttgggaaaacttcattccttgatttgtgtttgtcttggccttcctggtgtgcagtactgctgtagaaaagtattaatagcttcatttcatataaacataagtaactcccaaacacttatgtagaggactaaaaatgtatctggtatttaagtaatctgaaccagttctgcaagtgactgtgttttgtattactgtgaaaataagaaaatgtagttaattacaatttaaagagtattccacataacttcttaatttctacattccctcccttactcttcgggggtttcctttcagtaagcaacttttccatgctcttaatgtattcctttttagtaggaatccggaagtattagattgaatggaaaagcacttgccatctctgtctaggggtcacaaattgaaatggctcctgtatcacatacggaggtcttgtgtatctgtggcaacagggagtttccttattcactctttatttgctgctgtttaagttgccaacctcccctcccaataaaaattcacttacacctcctgcctttgtagttctggtattcactttactatgtgatagaagtagcatgttgctgccagaatacaagcattgcttttggcaaattaaagtgcatgtcatttcttaatacactagaaaggggaaataaattaaagtacacaagtccaagtctaaaactttagtacttttccatgcagatttgtgcacatgtgagagggtgtccagtttgtctagtgattgttatttagagagttggaccactattgtgtgttgctaatcattgactgtagtcccaaaaaagccttgtgaaaatgttatgccctatgtaacagcagagtaacataaaataaaagtacattttataaaccatttactatggctttgtaacaattgcatacccatattttaagggacaggtgaatttactactttctaaagtttattgatacttcccttttatgtaaaatgtagtagtgatacctatatttccacattgtgcattgtgacacacttgtctagggatgcctggaagtgtataaaattggactgcatttcttagagtgttttactatagatcagtctcatgggccatctcttcctcagatgtaaatgatatctggttaagtgttatatggaataaagtggacattttaaaactagcaaa

SEQ ID NO: 196708 - DNA, 665 bp, Homo sapiens
  Payload ID: 18799
  Gene Name: tyrosine 3-monooxygenase/tryptophan 5-monooxygenase activation protein, theta
  ENST ID: ENST00000446619
  CDS Start-End: 217-665
gtgaaggtgagcgcctgggtcggcccgcgggcttcctccggccgcgctcggattgagggccgggcggaggtgccgcccttgagagcagccggttgtcgatgccgctcccctcagggacggctccgggcgggaagctctcgaggctcctcccgctgcgggtcggcgctcgccctcgctctcctcgccctccgccccggccccggccccgcgcccgccatggagaagactgagctgatccagaaggccaagctggccgagcaggccgagcgctacgacgacatggccacctgcatgaaggcagtgaccgagcagggcgccgagctgtccaacgaggagcgcaacctgctctccgtggcctacaagaacgtggtcgggggccgcaggtccgcctggagggtcatctctagcatcgagcagaagaccgacacctccgacaagaagttgcagctgattaaggactatcgggagaaagtggagtccgagctgagatccatctgcaccacggtgctggaattgttggataaatatttaatagccaatgcaactaatccagagagtaaggtcttctatctgaaaatgaagggtgattacttccggtaccttgctgaagttgcgtgtggtgatgatcgaaaacaaacgatagataattcccaaggagcttacca

SEQ ID NO: 196709 - DNA, 2829 bp, Homo sapiens
  Payload ID: 18800
  Gene Name: tyrosine 3-monooxygenase/tryptophan 5-monooxygenase activation protein, zeta
  Uniprot ID: P63104
  ENST ID: ENST00000353245
  CDS Start-End: 85-822
gcccactcccaccgccagctggaaccctggggactacgacgtccctcaaaccttgcttctaggagataaaaagaacatccagtcatggataaaaatgagctggttcagaaggccaaactggccgagcaggctgagcgatatgatgacatggcagcctgcatgaagtctgtaactgagcaaggagctgaattatccaatgaggagaggaatcttctctcagttgcttataaaaatgttgtaggagcccgtaggtcatcttggagggtcgtctcaagtattgaacaaaagacggaaggtgctgagaaaaaacagcagatggctcgagaatacagagagaaaattgagacggagctaagagatatctgcaatgatgtactgtctcttttggaaaagttcttgatccccaatgcttcacaagcagagagcaaagtcttctatttgaaaatgaaaggagattactaccgttacttggctgaggttgccgctggtgatgacaagaaagggattgtcgatcagtcacaacaagcataccaagaagcttttgaaatcagcaaaaaggaaatgcaaccaacacatcctatcagactgggtctggcccttaacttctctgtgttctattatgagattctgaactccccagagaaagcctgctctcttgcaaagacagcttttgatgaagccattgctgaacttgatacattaagtgaagagtcatacaaagacagcacgctaataatgcaattactgagagacaacttgacattgtggacatcggatacccaaggagacgaagctgaagcaggagaaggaggggaaaattaaccggccttccaacttttgtctgcctcattctaaaatttacacagtagaccatttgtcatccatgctgtcccacaaatagttttttgtttacgatttatgacaggtttatgttacttctatttgaatttctatatttcccatgtggtttttatgtttaatattaggggagtagagccagttaacatttagggagttatctgttttcatcttgaggtggccaatatggggatgtggaatttttatacaagttataagtgtttggcatagtacttttggtacattgtggcttcaaaagggccagtgtaaaactgcttccatgtctaagcaaagaaaactgcctacatactggtttgtcctggcggggaataaaagggatcattggttccagtcacaggtgtagtaattgtgggtactttaaggtttggagcacttacaaggctgtggtagaatcataccccatggataccacatattaaaccatgtatatctgtggaatactcaatgtgtacacctttgactacagctgcagaagtgttcctttagacaaagttgtgacccattttactctggataagggcagaaacggttcacattccattatttgtaaagttacctgctgttagctttcattatttttgctacactcattttatttgtatttaaatgttttaggcaacctaagaacaaatgtaaaagtaaagatgcaggaaaaatgaattgcttggtattcattacttcatgtatatcaagcacagcagtaaaacaaaaacccatgtatttaacttttttttaggatttttgcttttgtgatttttttttttttgatacttgcctaacatgcatgtgctgtaaaaatagttaacagggaaataacttgagatgatggctagctttgtttaatgtcttatgaaattttcatgaacaatccaagcataattgttaagaacacgtgtattaaattcatgtaagtggaataaaagttttatgaatggacttttcaactactttctctacagcttttcatgtaaattagtcttggttctgaaacttctctaaaggaaattgtacattttttgaaatttattccttattccctcttggcagctaatgggctcttaccaagtttaaacacaaaatttatcataacaaaaatactactaatataactactgtttccatgtcccatgatcccctctcttcctccccaccctgaaaaaaatgagttcctattttttctgggagagggggggattgattagaaaaaaatgtagtgtgttccatttaaaattttggcatatggcattttctaacttaggaagccacaatgttcttggcccatcatgacattgggtagcattaactgtaagttttgtgcttccaaatcactttttggtttttaagaatttcttgatactcttatagcctgccttcaattttgatcctttattctttctatttgtcaggtgcacaagattaccttcctgttttagccttctgtcttgtcaccaaccattcttacttggtggccatgtacttggaaaaaggccgcatgatctttctggctccactcagtgtctaaggcaccctgcttcctttgcttgcatcccacagactatttccctcatcctatttactgcagcaaatctctccttagttgatgagactgtgtttatctccctttaaaaccctacctatcctgaatggtctgtcattgtctgcctttaaaatccttcctctttcttcctcctctattctctaaataatgatggggctaagttatacccaaagctcactttacaaaatatttcctcagtactttgcagaaaacaccaaacaaaaatgccattttaaaaaaggtgtattttttcttttagaatgtaagctcctcaagagcagggacaatgttttctgtatgttctattgtgcctagtacactgtaaatgctcaataaatattgatgatgggaggcagtgagtcttgatgataagggtgagaaactgaaatccc

SEQ ID NO: 196710 - DNA, 812 bp, Homo sapiens
  Payload ID: 18800
  Gene Name: tyrosine 3-monooxygenase/tryptophan 5-monooxygenase activation protein, zeta
  ENST ID: ENST00000395948
  CDS Start-End: 216-722
cccctcgcgcagtcaccgagcgcagatcccgcgctctcgattggaacgcctccccatcactcagccacactcaggggctggacgcctcactcccgtttccgagccataaaaggtctaggaccgcttcccccgagccagcaggagcccgtaggtcatcttggagggtcgtctcaagtattgaacaaaagacggaaggtgctgagaaaaaacagcagatggctcgagaatacagagagaaaattgagacggagctaagagatatctgcaatgatgtactgtctcttttggaaaagttcttgatccccaatgcttcacaagcagagagcaaagtcttctatttgaaaatgaaaggagattactaccgttacttggctgaggttgccgctggtgatgacaagaaagggattgtcgatcagtcacaacaagcataccaagaagcttttgaaatcagcaaaaaggaaatgcaaccaacacatcctatcagactgggtctggcccttaacttctctgtgttctattatgagattctgaactccccagagaaagcctgctctcttgcaaagacagcttttgatgaagccattgctgaacttgatacattaagtgaagagtcatacaaagacagcacgctaataatgcaattactgagagacaacttgacattgtggacatcggatacccaaggagacgaagctgaagcaggagaaggaggggaaaattaaccggccttccaacttttgtctgcctcattctaaaatttacacagtagaccatttgtcatccatgctgtcccacaaatagttttttgttta

SEQ ID NO: 196711 - DNA, 964 bp, Homo sapiens
  Payload ID: 18800
  Gene Name: tyrosine 3-monooxygenase/tryptophan 5-monooxygenase activation protein, zeta
  Uniprot ID: P63104
  ENST ID: ENST00000395951
  CDS Start-End: 164-901
atgacaaaggaggagagtcggggacttgagccgtggctccgacttgggcggagcctggaggggggtggttgcgatacgcggaccggagaatttgcactttaaagtccgggtctgcccgttttcgtttcacagtaaccgacgtctcaagtcagaacatccagtcatggataaaaatgagctggttcagaaggccaaactggccgagcaggctgagcgatatgatgacatggcagcctgcatgaagtctgtaactgagcaaggagctgaattatccaatgaggagaggaatcttctctcagttgcttataaaaatgttgtaggagcccgtaggtcatcttggagggtcgtctcaagtattgaacaaaagacggaaggtgctgagaaaaaacagcagatggctcgagaatacagagagaaaattgagacggagctaagagatatctgcaatgatgtactgtctcttttggaaaagttcttgatccccaatgcttcacaagcagagagcaaagtcttctatttgaaaatgaaaggagattactaccgttacttggctgaggttgccgctggtgatgacaagaaagggattgtcgatcagtcacaacaagcataccaagaagcttttgaaatcagcaaaaaggaaatgcaaccaacacatcctatcagactgggtctggcccttaacttctctgtgttctattatgagattctgaactccccagagaaagcctgctctcttgcaaagacagcttttgatgaagccattgctgaacttgatacattaagtgaagagtcatacaaagacagcacgctaataatgcaattactgagagacaacttgacattgtggacatcggatacccaaggagacgaagctgaagcaggagaaggaggggaaaattaaccggccttccaacttttgtctgcctcattctaaaatttacacagtagaccatttgtcatccat

SEQ ID NO: 196712 - DNA, 994 bp, Homo sapiens
  Payload ID: 18800
  Gene Name: tyrosine 3-monooxygenase/tryptophan 5-monooxygenase activation protein, zeta
  Uniprot ID: P63104
  ENST ID: ENST00000395953
  CDS Start-End: 151-888
gcatggccggggcgccgccggccgcgatccatccccacccttgtctctgcgggcttccaccccctccctcgccgcccttctcgcttccgcccgagataatgactcggcggcggcggcggcgggcatcgcagtggcgcagaacatccagtcatggataaaaatgagctggttcagaaggccaaactggccgagcaggctgagcgatatgatgacatggcagcctgcatgaagtctgtaactgagcaaggagctgaattatccaatgaggagaggaatcttctctcagttgcttataaaaatgttgtaggagcccgtaggtcatcttggagggtcgtctcaagtattgaacaaaagacggaaggtgctgagaaaaaacagcagatggctcgagaatacagagagaaaattgagacggagctaagagatatctgcaatgatgtactgtctcttttggaaaagttcttgatccccaatgcttcacaagcagagagcaaagtcttctatttgaaaatgaaaggagattactaccgttacttggctgaggttgccgctggtgatgacaagaaagggattgtcgatcagtcacaacaagcataccaagaagcttttgaaatcagcaaaaaggaaatgcaaccaacacatcctatcagactgggtctggcccttaacttctctgtgttctattatgagattctgaactccccagagaaagcctgctctcttgcaaagacagcttttgatgaagccattgctgaacttgatacattaagtgaagagtcatacaaagacagcacgctaataatgcaattactgagagacaacttgacattgtggacatcggatacccaaggagacgaagctgaagcaggagaaggaggggaaaattaaccggccttccaacttttgtctgcctcattctaaaatttacacagtagaccatttgtcatccatgctgtcccacaaatagttttttgtttacgatttatgacaggtt

SEQ ID NO: 196713 - DNA, 2974 bp, Homo sapiens
  Payload ID: 18800
  Gene Name: tyrosine 3-monooxygenase/tryptophan 5-monooxygenase activation protein, zeta
  Uniprot ID: P63104
  ENST ID: ENST00000395956
  CDS Start-End: 227-964
ccgccccctcccctctccctcggccgccccctcctttccctccccctcgcgcagcctccgcgctgggcgctgcggcggcgggacccggccctcccccaccccgggaggcggtggcgcggcggggaggggccgggggcctcggggacccaagcgcgagggaaaggcctggccgagagcgggccggagcccaggcctggcgcggcggcgcccgccagaacatccagtcatggataaaaatgagctggttcagaaggccaaactggccgagcaggctgagcgatatgatgacatggcagcctgcatgaagtctgtaactgagcaaggagctgaattatccaatgaggagaggaatcttctctcagttgcttataaaaatgttgtaggagcccgtaggtcatcttggagggtcgtctcaagtattgaacaaaagacggaaggtgctgagaaaaaacagcagatggctcgagaatacagagagaaaattgagacggagctaagagatatctgcaatgatgtactgtctcttttggaaaagttcttgatccccaatgcttcacaagcagagagcaaagtcttctatttgaaaatgaaaggagattactaccgttacttggctgaggttgccgctggtgatgacaagaaagggattgtcgatcagtcacaacaagcataccaagaagcttttgaaatcagcaaaaaggaaatgcaaccaacacatcctatcagactgggtctggcccttaacttctctgtgttctattatgagattctgaactccccagagaaagcctgctctcttgcaaagacagcttttgatgaagccattgctgaacttgatacattaagtgaagagtcatacaaagacagcacgctaataatgcaattactgagagacaacttgacattgtggacatcggatacccaaggagacgaagctgaagcaggagaaggaggggaaaattaaccggccttccaacttttgtctgcctcattctaaaatttacacagtagaccatttgtcatccatgctgtcccacaaatagttttttgtttacgatttatgacaggtttatgttacttctatttgaatttctatatttcccatgtggtttttatgtttaatattaggggagtagagccagttaacatttagggagttatctgttttcatcttgaggtggccaatatggggatgtggaatttttatacaagttataagtgtttggcatagtacttttggtacattgtggcttcaaaagggccagtgtaaaactgcttccatgtctaagcaaagaaaactgcctacatactggtttgtcctggcggggaataaaagggatcattggttccagtcacaggtgtagtaattgtgggtactttaaggtttggagcacttacaaggctgtggtagaatcataccccatggataccacatattaaaccatgtatatctgtggaatactcaatgtgtacacctttgactacagctgcagaagtgttcctttagacaaagttgtgacccattttactctggataagggcagaaacggttcacattccattatttgtaaagttacctgctgttagctttcattatttttgctacactcattttatttgtatttaaatgttttaggcaacctaagaacaaatgtaaaagtaaagatgcaggaaaaatgaattgcttggtattcattacttcatgtatatcaagcacagcagtaaaacaaaaacccatgtatttaacttttttttaggatttttgcttttgtgatttttttttttttgatacttgcctaacatgcatgtgctgtaaaaatagttaacagggaaataacttgagatgatggctagctttgtttaatgtcttatgaaattttcatgaacaatccaagcataattgttaagaacacgtgtattaaattcatgtaagtggaataaaagttttatgaatggacttttcaactactttctctacagcttttcatgtaaattagtcttggttctgaaacttctctaaaggaaattgtacattttttgaaatttattccttattccctcttggcagctaatgggctcttaccaagtttaaacacaaaatttatcataacaaaaatactactaatataactactgtttccatgtcccatgatcccctctcttcctccccaccctgaaaaaaatgagttcctattttttctgggagagggggggattgattagaaaaaaatgtagtgtgttccatttaaaattttggcatatggcattttctaacttaggaagccacaatgttcttggcccatcatgacattgggtagcattaactgtaagttttgtgcttccaaatcactttttggtttttaagaatttcttgatactcttatagcctgccttcaattttgatcctttattctttctatttgtcaggtgcacaagattaccttcctgttttagccttctgtcttgtcaccaaccattcttacttggtggccatgtacttggaaaaaggccgcatgatctttctggctccactcagtgtctaaggcaccctgcttcctttgcttgcatcccacagactatttccctcatcctatttactgcagcaaatctctccttagttgatgagactgtgtttatctccctttaaaaccctacctatcctgaatggtctgtcattgtctgcctttaaaatccttcctctttcttcctcctctattctctaaataatgatggggctaagttatacccaaagctcactttacaaaatatttcctcagtactttgcagaaaacaccaaacaaaaatgccattttaaaaaaggtgtattttttcttttagaatgtaagctcctcaagagcagggacaatgttttctgtatgttctattgtgcctagtacactgtaaatgctcaataaatattgatgatgggaggcagtgagtcttgatgataagggtgagaaactgaaatcccaaa

SEQ ID NO: 196714 - DNA, 5248 bp, Homo sapiens
  Payload ID: 18800
  Gene Name: tyrosine 3-monooxygenase/tryptophan 5-monooxygenase activation protein, zeta
  Uniprot ID: P63104
  ENST ID: ENST00000395957
  CDS Start-End: 343-1080
cgcagtcaccgagcgcagatcccgcgctctcgattggaacgcctccccatcactcagccacactcaggggctggacgcctcactcccgtttccgagccataaaaggtctaggaccgcttcccccgagccagcagcgtttgacgtcatcgtgcgtgtggtgcccctgctgccggggctggtgattggaggaaaccccgtgtctgcggagcggctgtagcctgtgagcagcgagatccagggacagagtctcagcctcgccgctgctgccgccgccgccgcccagagactgctgagcccgtccgtccgccgccaccacccactccggacacagaacatccagtcatggataaaaatgagctggttcagaaggccaaactggccgagcaggctgagcgatatgatgacatggcagcctgcatgaagtctgtaactgagcaaggagctgaattatccaatgaggagaggaatcttctctcagttgcttataaaaatgttgtaggagcccgtaggtcatcttggagggtcgtctcaagtattgaacaaaagacggaaggtgctgagaaaaaacagcagatggctcgagaatacagagagaaaattgagacggagctaagagatatctgcaatgatgtactgtctcttttggaaaagttcttgatccccaatgcttcacaagcagagagcaaagtcttctatttgaaaatgaaaggagattactaccgttacttggctgaggttgccgctggtgatgacaagaaagggattgtcgatcagtcacaacaagcataccaagaagcttttgaaatcagcaaaaaggaaatgcaaccaacacatcctatcagactgggtctggcccttaacttctctgtgttctattatgagattctgaactccccagagaaagcctgctctcttgcaaagacagcttttgatgaagccattgctgaacttgatacattaagtgaagagtcatacaaagacagcacgctaataatgcaattactgagagacaacttgacattgtggacatcggatacccaaggagacgaagctgaagcaggagaaggaggggaaaattaaccggccttccaacttttgtctgcctcattctaaaatttacacagtagaccatttgtcatccatgctgtcccacaaatagttttttgtttacgatttatgacaggtttatgttacttctatttgaatttctatatttcccatgtggtttttatgtttaatattaggggagtagagccagttaacatttagggagttatctgttttcatcttgaggtggccaatatggggatgtggaatttttatacaagttataagtgtttggcatagtacttttggtacattgtggcttcaaaagggccagtgtaaaactgcttccatgtctaagcaaagaaaactgcctacatactggtttgtcctggcggggaataaaagggatcattggttccagtcacaggtgtagtaattgtgggtactttaaggtttggagcacttacaaggctgtggtagaatcataccccatggataccacatattaaaccatgtatatctgtggaatactcaatgtgtacacctttgactacagctgcagaagtgttcctttagacaaagttgtgacccattttactctggataagggcagaaacggttcacattccattatttgtaaagttacctgctgttagctttcattatttttgctacactcattttatttgtatttaaatgttttaggcaacctaagaacaaatgtaaaagtaaagatgcaggaaaaatgaattgcttggtattcattacttcatgtatatcaagcacagcagtaaaacaaaaacccatgtatttaacttttttttaggatttttgcttttgtgatttttttttttttgatacttgcctaacatgcatgtgctgtaaaaatagttaacagggaaataacttgagatgatggctagctttgtttaatgtcttatgaaattttcatgaacaatccaagcataattgttaagaacacgtgtattaaattcatgtaagtggaataaaagttttatgaatggacttttcaactactttctctacagcttttcatgtaaattagtcttggttctgaaacttctctaaaggaaattgtacattttttgaaatttattccttattccctcttggcagctaatgggctcttaccaagtttaaacacaaaatttatcataacaaaaatactactaatataactactgtttccatgtcccatgatcccctctcttcctccccaccctgaaaaaaatgagttcctattttttctgggagagggggggattgattagaaaaaaatgtagtgtgttccatttaaaattttggcatatggcattttctaacttaggaagccacaatgttcttggcccatcatgacattgggtagcattaactgtaagttttgtgcttccaaatcactttttggtttttaagaatttcttgatactcttatagcctgccttcaattttgatcctttattctttctatttgtcaggtgcacaagattaccttcctgttttagccttctgtcttgtcaccaaccattcttacttggtggccatgtacttggaaaaaggccgcatgatctttctggctccactcagtgtctaaggcaccctgcttcctttgcttgcatcccacagactatttccctcatcctatttactgcagcaaatctctccttagttgatgagactgtgtttatctccctttaaaaccctacctatcctgaatggtctgtcattgtctgcctttaaaatccttcctctttcttcctcctctattctctaaataatgatggggctaagttatacccaaagctcactttacaaaatatttcctcagtactttgcagaaaacaccaaacaaaaatgccattttaaaaaaggtgtattttttcttttagaatgtaagctcctcaagagcagggacaatgttttctgtatgttctattgtgcctagtacactgtaaatgctcaataaatattgatgatgggaggcagtgagtcttgatgataagggtgagaaactgaaatcccaaacactgttttgttgcttgttttattatgacctcagattaaattgggaaatattggcccttttgaataattgtcccaaatattacattcaaataaaagtgcaatggagaccttggggtctttatttccaggagaaaagataccttctgcatctagggcaacaatccttttccctcgcagctctttcttttacctcacttactgatttctcctgacccccaagccaaggaggtaaaataattatatatatatatatatatatatatatatatatataaagtaattatattttatagctagactgaagaggtgggaatttttttgttgttttttttttttttggagacaagagtcttgctctgtcacccaggcttgagtgcagtggtgcgatctcggctgagtgcaacctccgcctgctgggttcaagcgattctcctgcctcagcctcccaagtagctgggattacaggtgcccgccaccacacctggctaatttttgtgtttttagtagagacagggtttcaccatgttgtccaggctggtcttgaattcccgacctcaggcaatccgcccatctcaacctcccaaagtgctgggattacaggcataagccaccgcgcccagtagagatgtgatattattcaagtaaataaaacctgaaacttggcacatttgcctatttaatgtgcatcagtcatctgaactaggttgatcctggaataatgaaaacacttcactagtattaactaatgttttctacatagtagttcccaatagattaaggaaaatttccaacctgagattctttgttttggaatttgaataatgtgtttgtaactattccttgattgtcccaaatccaggctttacgtctgcttttgtcaatgtaacatcctagtgccaggaaattggaaaatccaatgactttttgtgtgtaaagtactggaatttttttgttcgtttgtttttaagacggagtgtcaactctcgcccaggctggggtgcagtggcctgatctcggctcactgcaaccttctcctcccaggctgaagtgattctcctgcctcagcctcgcaagtagctgggactgcaggcatgtgccaccactcctggctaattatttgtatttttagtagagagagggtttcaccgtgttagccatgatggtctcattctcctgaccttgtgatccgcccacctcggcctcccaaagtgctgggattacaggcgtgagccactgtgcccaccctggtatgttttttttaaattggccacttaagagttgtccttcagaaagtggagcagcagtgtgattagtaaaaacgatgggctttcctgcagctctggcttatggtctttgtttttccagttaacagctgttacttcatgctgttatagggggtggggggagaaagagaaagaatatgtctagtggcttaattttggggctcaatttgtttattatgtttttcctgcaaaagagtcaccagtcttgtcatggctcaatgcatattttaaaatgagtcaaagccaatttggaagctgctatcttaggttatttgtagtcaggcttcaaatggagagtgaaactttgactttgaaaactggtgctctatgctcaatgatggtcttacacattcctctagggaaaggtcaagaaataaatttggcttgattgtattctctcatttaccatataggaaatactatggtagaactgaaaatatgtacaatagtaaagtggtggctgagactgggcacttggaaaatagacttggattcttttctaagtgtgaaactaattaaatacttttatgtgactggtagtagtcacagtctccttgattgattctagttccttttcaaagtggagagacctgaatatagattgtaacaggatgtccaaccttgccagacaagcaggcatatatgtctctgggatgcagaagcagttacaagttaatatatttaagcataatgttagccaatcctaggtgataccagagatgtgaatatttgatcatatttgagttcattccttgaaagtccaaacctaactggtcttaattgattacttcttagtattccgaattttagaatttaaaaccctatgaattttcagtttgtgcttacattttctaacattggatgtttgctttggc

SEQ ID NO: 196715 - DNA, 3066 bp, Homo sapiens
  Payload ID: 18800
  Gene Name: tyrosine 3-monooxygenase/tryptophan 5-monooxygenase activation protein, zeta
  Uniprot ID: P63104
  ENST ID: ENST00000395958
  CDS Start-End: 213-950
gcagcgtttgacgtcatcgtgcgtgtggtgcccctgctgccggggctggtgattggaggaaaccccgtgtctgcggagcggctgtagcctgtgagcagcgagatccagggacagagtctcagcctcgccgctgctgccgccgccgccgcccagagactgctgagcccgtccgtccgccgccaccacccactccggacacagaacatccagtcatggataaaaatgagctggttcagaaggccaaactggccgagcaggctgagcgatatgatgacatggcagcctgcatgaagtctgtaactgagcaaggagctgaattatccaatgaggagaggaatcttctctcagttgcttataaaaatgttgtaggagcccgtaggtcatcttggagggtcgtctcaagtattgaacaaaagacggaaggtgctgagaaaaaacagcagatggctcgagaatacagagagaaaattgagacggagctaagagatatctgcaatgatgtactgtctcttttggaaaagttcttgatccccaatgcttcacaagcagagagcaaagtcttctatttgaaaatgaaaggagattactaccgttacttggctgaggttgccgctggtgatgacaagaaagggattgtcgatcagtcacaacaagcataccaagaagcttttgaaatcagcaaaaaggaaatgcaaccaacacatcctatcagactgggtctggcccttaacttctctgtgttctattatgagattctgaactccccagagaaagcctgctctcttgcaaagacagcttttgatgaagccattgctgaacttgatacattaagtgaagagtcatacaaagacagcacgctaataatgcaattactgagagacaacttgacattgtggacatcggatacccaaggagacgaagctgaagcaggagaaggaggggaaaattaaccggccttccaacttttgtctgcctcattctaaaatttacacagtagaccatttgtcatccatgctgtcccacaaatagttttttgtttacgatttatgacaggtttatgttacttctatttgaatttctatatttcccatgtggtttttatgtttaatattaggggagtagagccagttaacatttagggagttatctgttttcatcttgaggtggccaatatggggatgtggaatttttatacaagttataagtgtttggcatagtacttttggtacattgtggcttcaaaagggccagtgtaaaactgcttccatgtctaagcaaagaaaactgcctacatactggtttgtcctggcggggaataaaagggatcattggttccagtcacaggtgtagtaattgtgggtactttaaggtttggagcacttacaaggctgtggtagaatcataccccatggataccacatattaaaccatgtatatctgtggaatactcaatgtgtacacctttgactacagctgcagaagtgttcctttagacaaagttgtgacccattttactctggataagggcagaaacggttcacattccattatttgtaaagttacctgctgttagctttcattatttttgctacactcattttatttgtatttaaatgttttaggcaacctaagaacaaatgtaaaagtaaagatgcaggaaaaatgaattgcttggtattcattacttcatgtatatcaagcacagcagtaaaacaaaaacccatgtatttaacttttttttaggatttttgcttttgtgatttttttttttttgatacttgcctaacatgcatgtgctgtaaaaatagttaacagggaaataacttgagatgatggctagctttgtttaatgtcttatgaaattttcatgaacaatccaagcataattgttaagaacacgtgtattaaattcatgtaagtggaataaaagttttatgaatggacttttcaactactttctctacagcttttcatgtaaattagtcttggttctgaaacttctctaaaggaaattgtacattttttgaaatttattccttattccctcttggcagctaatgggctcttaccaagtttaaacacaaaatttatcataacaaaaatactactaatataactactgtttccatgtcccatgatcccctctcttcctccccaccctgaaaaaaatgagttcctattttttctgggagagggggggattgattagaaaaaaatgtagtgtgttccatttaaaattttggcatatggcattttctaacttaggaagccacaatgttcttggcccatcatgacattgggtagcattaactgtaagttttgtgcttccaaatcactttttggtttttaagaatttcttgatactcttatagcctgccttcaattttgatcctttattctttctatttgtcaggtgcacaagattaccttcctgttttagccttctgtcttgtcaccaaccattcttacttggtggccatgtacttggaaaaaggccgcatgatctttctggctccactcagtgtctaaggcaccctgcttcctttgcttgcatcccacagactatttccctcatcctatttactgcagcaaatctctccttagttgatgagactgtgtttatctccctttaaaaccctacctatcctgaatggtctgtcattgtctgcctttaaaatccttcctctttcttcctcctctattctctaaataatgatggggctaagttatacccaaagctcactttacaaaatatttcctcagtactttgcagaaaacaccaaacaaaaatgccattttaaaaaaggtgtattttttcttttagaatgtaagctcctcaagagcagggacaatgttttctgtatgttctattgtgcctagtacactgtaaatgctcaataaatattgatgatgggaggcagtgagtcttgatgataagggtgagaaactgaaatcccaaacactgttttgttgcttgttttattatgacctcagattaaattgggaaatattggcccttttgaataattgtcccaaatattacattcaaataaaagtgcaatggag

SEQ ID NO: 196716 - DNA, 701 bp, Homo sapiens
  Payload ID: 18800
  Gene Name: tyrosine 3-monooxygenase/tryptophan 5-monooxygenase activation protein, zeta
  ENST ID: ENST00000437293
  CDS Start-End: 426-701
aaaaggtctaggaccgcttcccccgagccagcaggtgcactcgggacaagcgtagaggagctggaagccgagcggggtgggaggagtggcggctgcgggcgaggacgcgcgcgcctccgctcgccctccagcgcgggcgggcaggacgagcgccggggagcggcggttacgcggggccccgatcgctgtgggcaccaatcaacggttgccatagcagcgtttgacgtcatcgtgcgtgtggtgcccctgctgccggggctggtgattggaggaaaccccgtgtctgcggagcggctgtagcctgtgagcagcgagatccagggacagagtctcagcctcgccgctgctgccgccgccgccgcccagagactgctgagcccgtccgtccgccgccaccacccactccggacacagaacatccagtcatggataaaaatgagctggttcagaaggccaaactggccgagcaggctgagcgatatgatgacatggcagcctgcatgaagtctgtaactgagcaaggagctgaattatccaatgaggagaggaatcttctctcagttgcttataaaaatgttgtaggagcccgtaggtcatcttggagggtcgtctcaagtattgaacaaaagacggaaggtgctgagaaaaaacagcagatggctcgagaatacagagagaaaattgagacggagctaagagat

SEQ ID NO: 196717 - DNA, 891 bp, Homo sapiens
  Payload ID: 18800
  Gene Name: tyrosine 3-monooxygenase/tryptophan 5-monooxygenase activation protein, zeta
  Uniprot ID: P63104
  ENST ID: ENST00000419477
  CDS Start-End: 103-840
gagcgggccggagcccaggcctggcgcggcggcgcccgccaggtagaccggggcgaggctgcgcgccggcgggaggggagtccactgcgggaacatccagtcatggataaaaatgagctggttcagaaggccaaactggccgagcaggctgagcgatatgatgacatggcagcctgcatgaagtctgtaactgagcaaggagctgaattatccaatgaggagaggaatcttctctcagttgcttataaaaatgttgtaggagcccgtaggtcatcttggagggtcgtctcaagtattgaacaaaagacggaaggtgctgagaaaaaacagcagatggctcgagaatacagagagaaaattgagacggagctaagagatatctgcaatgatgtactgtctcttttggaaaagttcttgatccccaatgcttcacaagcagagagcaaagtcttctatttgaaaatgaaaggagattactaccgttacttggctgaggttgccgctggtgatgacaagaaagggattgtcgatcagtcacaacaagcataccaagaagcttttgaaatcagcaaaaaggaaatgcaaccaacacatcctatcagactgggtctggcccttaacttctctgtgttctattatgagattctgaactccccagagaaagcctgctctcttgcaaagacagcttttgatgaagccattgctgaacttgatacattaagtgaagagtcatacaaagacagcacgctaataatgcaattactgagagacaacttgacattgtggacatcggatacccaaggagacgaagctgaagcaggagaaggaggggaaaattaaccggccttccaacttttgtctgcctcattctaaaatttacacagtagacca

SEQ ID NO: 196718 - DNA, 3007 bp, Homo sapiens
  Payload ID: 18800
  Gene Name: tyrosine 3-monooxygenase/tryptophan 5-monooxygenase activation protein, zeta
  Uniprot ID: P63104
  ENST ID: ENST00000457309
  CDS Start-End: 156-893
tgtcccctcgcgcagtcaccgagcgcagatcccgcgctctcgattggaacgcctccccatcactcagccacactcaggggctggacgcctcactcccgtttccgagccataaaaggtctaggaccgcttcccccgagccagcagaacatccagtcatggataaaaatgagctggttcagaaggccaaactggccgagcaggctgagcgatatgatgacatggcagcctgcatgaagtctgtaactgagcaaggagctgaattatccaatgaggagaggaatcttctctcagttgcttataaaaatgttgtaggagcccgtaggtcatcttggagggtcgtctcaagtattgaacaaaagacggaaggtgctgagaaaaaacagcagatggctcgagaatacagagagaaaattgagacggagctaagagatatctgcaatgatgtactgtctcttttggaaaagttcttgatccccaatgcttcacaagcagagagcaaagtcttctatttgaaaatgaaaggagattactaccgttacttggctgaggttgccgctggtgatgacaagaaagggattgtcgatcagtcacaacaagcataccaagaagcttttgaaatcagcaaaaaggaaatgcaaccaacacatcctatcagactgggtctggcccttaacttctctgtgttctattatgagattctgaactccccagagaaagcctgctctcttgcaaagacagcttttgatgaagccattgctgaacttgatacattaagtgaagagtcatacaaagacagcacgctaataatgcaattactgagagacaacttgacattgtggacatcggatacccaaggagacgaagctgaagcaggagaaggaggggaaaattaaccggccttccaacttttgtctgcctcattctaaaatttacacagtagaccatttgtcatccatgctgtcccacaaatagttttttgtttacgatttatgacaggtttatgttacttctatttgaatttctatatttcccatgtggtttttatgtttaatattaggggagtagagccagttaacatttagggagttatctgttttcatcttgaggtggccaatatggggatgtggaatttttatacaagttataagtgtttggcatagtacttttggtacattgtggcttcaaaagggccagtgtaaaactgcttccatgtctaagcaaagaaaactgcctacatactggtttgtcctggcggggaataaaagggatcattggttccagtcacaggtgtagtaattgtgggtactttaaggtttggagcacttacaaggctgtggtagaatcataccccatggataccacatattaaaccatgtatatctgtggaatactcaatgtgtacacctttgactacagctgcagaagtgttcctttagacaaagttgtgacccattttactctggataagggcagaaacggttcacattccattatttgtaaagttacctgctgttagctttcattatttttgctacactcattttatttgtatttaaatgttttaggcaacctaagaacaaatgtaaaagtaaagatgcaggaaaaatgaattgcttggtattcattacttcatgtatatcaagcacagcagtaaaacaaaaacccatgtatttaacttttttttaggatttttgcttttgtgatttttttttttttgatacttgcctaacatgcatgtgctgtaaaaatagttaacagggaaataacttgagatgatggctagctttgtttaatgtcttatgaaattttcatgaacaatccaagcataattgttaagaacacgtgtattaaattcatgtaagtggaataaaagttttatgaatggacttttcaactactttctctacagcttttcatgtaaattagtcttggttctgaaacttctctaaaggaaattgtacattttttgaaatttattccttattccctcttggcagctaatgggctcttaccaagtttaaacacaaaatttatcataacaaaaatactactaatataactactgtttccatgtcccatgatcccctctcttcctccccaccctgaaaaaaatgagttcctattttttctgggagagggggggattgattagaaaaaaatgtagtgtgttccatttaaaattttggcatatggcattttctaacttaggaagccacaatgttcttggcccatcatgacattgggtagcattaactgtaagttttgtgcttccaaatcactttttggtttttaagaatttcttgatactcttatagcctgccttcaattttgatcctttattctttctatttgtcaggtgcacaagattaccttcctgttttagccttctgtcttgtcaccaaccattcttacttggtggccatgtacttggaaaaaggccgcatgatctttctggctccactcagtgtctaaggcaccctgcttcctttgcttgcatcccacagactatttccctcatcctatttactgcagcaaatctctccttagttgatgagactgtgtttatctccctttaaaaccctacctatcctgaatggtctgtcattgtctgcctttaaaatccttcctctttcttcctcctctattctctaaataatgatggggctaagttatacccaaagctcactttacaaaatatttcctcagtactttgcagaaaacaccaaacaaaaatgccattttaaaaaaggtgtattttttcttttagaatgtaagctcctcaagagcagggacaatgttttctgtatgttctattgtgcctagtacactgtaaatgctcaataaatattgatgatgggaggcagtgagtcttgatgataagggtgagaaactgaaatcccaaacactgttttgttgcttgttttattatgacctcagattaaattgggaaatattggcccttttgaataattgtcccaaatattacattcaaataaaagtgcaatgg

SEQ ID NO: 196719 - DNA, 996 bp, Homo sapiens
  Payload ID: 18800
  Gene Name: tyrosine 3-monooxygenase/tryptophan 5-monooxygenase activation protein, zeta
  ENST ID: ENST00000418997
  CDS Start-End: 703-996
agttactaccgcgaagcacggagggtggggcgggccgggcctcggggaggggtggggggatgtgaaaggtcccggatgttgctgaacgggagccccttccagagggagtgactggggcaagcgcagacgggctgagcgaaagctaaggtgggggtagggagagaacgccttcccgccggctgagaggaagagtgggccggcagaggctgcaggggagagggagagagagggcgttggggacccaaagggaaggcgaggagtgggggatttgcgttggggaggaaaaggaaaaaagcagcctcctgccctaggtgcactcgggacaagcgtagaggagctggaagccgagcggggtgggaggagtggcggctgcgggcgaggacgcgcgcgcctccgctcgccctccagcgcgggcgggcaggacgagcgccggggagcggcggttacgcggggccccgatcgctgtgggcaccaatcaacggttgccatagcagcgtttgacgtcatcgtgcgtgtggtgcccctgctgccggggctggtgattggaggaaaccccgtgtctgcggagcggctgtagcctgtgagcagcgagatccagggacagagtctcagcctcgccgctgctgccgccgccgccgcccagagactgctgagcccgtccgtccgccgccaccacccactccggacacagaacatccagtcatggataaaaatgagctggttcagaaggccaaactggccgagcaggctgagcgatatgatgacatggcagcctgcatgaagtctgtaactgagcaaggagctgaattatccaatgaggagaggaatcttctctcagttgcttataaaaatgttgtaggagcccgtaggtcatcttggagggtcgtctcaagtattgaacaaaagacggaaggtgctgagaaaaaacagcagatggctcgagaatacagagagaaaattgagacggagctaagagatatctgcaatgatgtactg

SEQ ID NO: 196720 - DNA, 567 bp, Homo sapiens
  Payload ID: 18800
  Gene Name: tyrosine 3-monooxygenase/tryptophan 5-monooxygenase activation protein, zeta
  ENST ID: ENST00000523131
  CDS Start-End: 341-567
gcacggagggtggggcgggccgggcctcggggaggggtggggggatgtgaaaggtcccggatgttgctgaacgggagccccttccagagggagtgactggggcaagcgcagacgggctgagcgaaagctaagcgtttgacgtcatcgtgcgtgtggtgcccctgctgccggggctggtgattggaggaaaccccgtgtctgcggagcggctgtagcctgtgagcagcgagatccagggacagagtctcagcctcgccgctgctgccgccgccgccgcccagagactgctgagcccgtccgtccgccgccaccacccactccggacacagaacatccagtcatggataaaaatgagctggttcagaaggccaaactggccgagcaggctgagcgatatgatgacatggcagcctgcatgaagtctgtaactgagcaaggagctgaattatccaatgaggagaggaatcttctctcagttgcttataaaaatgttgtaggagcccgtaggtcatcttggagggtcgtctcaagtattgaacaaaagacggaaggtgctgagaaaaaaca

SEQ ID NO: 196721 - DNA, 875 bp, Homo sapiens
  Payload ID: 18800
  Gene Name: tyrosine 3-monooxygenase/tryptophan 5-monooxygenase activation protein, zeta
  ENST ID: ENST00000522819
  CDS Start-End: 331-708
tcagcctcccgagtagctgggattacagtcgtgtgccaccacatccaatttttttttttttcccagtagagacggggtgtcacccaggctggtaatctttattttaaattgtacttgctcctaagaatttaggtgttaagagcatagcatgtagaaggaaaaaataaagctgctgtaacctcatcctgccttcttggagatgagaatctgagacccaggaagatttcagagttttgtcaaggtgacagagtttgaatttaggcatctcttttggaaaagttcttgatccccaatgcttcacaagcagagagcaaagtcttctatttgaaaatgaaaggagattactaccgttacttggctgaggttgccgctggtgatgacaagaaagggattgtcgatcagtcacaacaagcataccaagaagcttttgaaatcagcaaaaaggaaatgcaaccaacacatcctatcagactgggtctggcccttaacttctctgtgttctattatgagattctgaactccccagagaaagcctgctctcttgcaaagacagcttttgatgaagccattgctgaacttgatacattaagtgaagagtcatacaaagacagcacgctaataatgcaattactgagagacaacttgacattgtggacatcggatacccaaggagacgaagctgaagcaggagaaggaggggaaaattaaccggccttccaacttttgtctgcctcattctaaaatttacacagtagaccatttgtcatccatgctgtcccacaaatagttttttgtttacgatttatgacaggtttatgttacttctatttgaatttctatatttcccatgtggtttttatgtttaatattagggg

SEQ ID NO: 196722 - DNA, 664 bp, Homo sapiens
  Payload ID: 18800
  Gene Name: tyrosine 3-monooxygenase/tryptophan 5-monooxygenase activation protein, zeta
  ENST ID: ENST00000523848
  CDS Start-End: 1-393
gtcttctatttgaaaatgaaaggagattactaccgttacttggctgaggttgccgctggtgatgacaagaaagggattgtcgatcagtcacaacaagcataccaagaagcttttgaaatcagcaaaaaggaaatgcaaccaacacatcctatcagactgggtctggcccttaacttctctgtgttctattatgagattctgaactccccagagaaagcctgctctcttgcaaagacagcttttgatgaagccattgctgaacttgatacattaagtgaagagtcatacaaagacagcacgctaataatgcaattactgagagacaacttgacattgtggacatcggatacccaaggagacgaagctgaagcaggagaaggaggggaaaattaaccggccttccaacttttgtctgcctcattctaaaatttacacagtagaccatttgtcatccatgctgtcccacaaatagttttttgtttacgatttatgacaggtgcacaagattaccttcctgttttagccttctgtcttgtcaccaaccattcttacttggtggccatgtacttggaaaaaggccgcatgatctttctggctccactcagtgtctaaggcaccctgcttcctttgcttgcatcccacagactatttccctcatcctatt

SEQ ID NO: 196723 - DNA, 511 bp, Homo sapiens
  Payload ID: 18800
  Gene Name: tyrosine 3-monooxygenase/tryptophan 5-monooxygenase activation protein, zeta
  ENST ID: ENST00000521328
  CDS Start-End: 100-511
agcccgcagtcggctcccgtgcttgatggactagaactggagggtccctgcgctcggtttggggacgcatatcctgctttgggggcggaacatccagtcatggataaaaatgagctggttcagaaggccaaactggccgagcaggctgagcgatatgatgacatggcagcctgcatgaagtctgtaactgagcaaggagctgaattatccaatgaggagaggaatcttctctcagttgcttataaaaatgttgtaggagcccgtaggtcatcttggagggtcgtctcaagtattgaacaaaagacggaaggtgctgagaaaaaacagcagatggctcgagaatacagagagaaaattgagacggagctaagagatatctgcaatgatgtactgtctcttttggaaaagttcttgatccccaatgcttcacaagcagagagcaaagtcttctatttgaaaatgaaaggagattactaccgttacttggctgaggttgccgctggtgatgaca

SEQ ID NO: 196724 - DNA, 1399 bp, Homo sapiens
  Payload ID: 18800
  Gene Name: tyrosine 3-monooxygenase/tryptophan 5-monooxygenase activation protein, zeta
  ENST ID: ENST00000521309
  CDS Start-End: 158-535
acagagtctcagcctcgccgctgctgccgccgccgccgcccagagactgctgagcccgtccgtccgccgccaccacccactccggacacagtctcttttggaaaagttcttgatccccaatgcttcacaagcagagagcaaagtcttctatttgaaaatgaaaggagattactaccgttacttggctgaggttgccgctggtgatgacaagaaagggattgtcgatcagtcacaacaagcataccaagaagcttttgaaatcagcaaaaaggaaatgcaaccaacacatcctatcagactgggtctggcccttaacttctctgtgttctattatgagattctgaactccccagagaaagcctgctctcttgcaaagacagcttttgatgaagccattgctgaacttgatacattaagtgaagagtcatacaaagacagcacgctaataatgcaattactgagagacaacttgacattgtggacatcggatacccaaggagacgaagctgaagcaggagaaggaggggaaaattaaccggccttccaacttttgtctgcctcattctaaaatttacacagtagaccatttgtcatccatgctgtcccacaaatagttttttgtttacgatttatgacaggtttatgttacttctatttgaatttctatatttcccatgtggtttttatgtttaatattaggggagtagagccagttaacatttagggagttatctgttttcatcttgaggtggccaatatggggatgtggaatttttatacaagttataagtgtttggcatagtacttttggtacattgtggcttcaaaagggccagtgtaaaactgcttccatgtctaagcaaagaaaactgcctacatactggtttgtcctggcggggaataaaagggatcattggttccagtcacaggtgtagtaattgtgggtactttaaggtttggagcacttacaaggctgtggtagaatcataccccatggataccacatattaaaccatgtatatctgtggaatactcaatgtgtacacctttgactacagctgcagaagtgttcctttagacaaagttgtgacccattttactctggataagggcagaaacggttcacattccattatttgtaaagttacctgctgttagctttcattatttttgctacactcattttatttgtatttaaatgttttaggcaacctaagaacaaatgtaaaagtaaagatgcaggaaaaatgaattgcttggtattcattacttcatgtatatcaagcacagcagtaaaacaaaaacccatgtatttaacttttttttaggatttttgcttttgtgatttttttttttttgatacttgcctaacatgcatgtgctgtaaaaatagttaaca

SEQ ID NO: 196725 - DNA, 750 bp, Homo sapiens
  Payload ID: 18800
  Gene Name: tyrosine 3-monooxygenase/tryptophan 5-monooxygenase activation protein, zeta
  ENST ID: ENST00000521607
  CDS Start-End: 12-750
aacatccagtcatggataaaaatgagctggttcagaaggccaaactggccgagcaggctgagcgatatgatgacatggcagcctgcatgaagtctgtaactgagcaaggagctgaattatccaatgaggagaggaatcttctctcagttgcttataaaaatgttgtaggagcccgtaggtcatcttggagggtcgtctcaagtattgaacaaaagacggaaggtgctgagaaaaaacagcagatggctcgagaatacagagagaaaattgagacggagctaagagatatctgcaatgatgtactgtctcttttggaaaagttcttgatccccaatgcttcacaagcagagagcaaagtcttctatttgaaaatgaaaggagattactaccgttacttggctgaggttgccgctggtgatgacaagaaagtacgttttggtgtgtcttatccagggattgtcgatcagtcacaacaagcataccaagaagcttttgaaatcagcaaaaaggaaatgcaaccaacacatcctatcagactgggtctggcccttaacttctctgtgttctattatgagattctgaactccccagagaaagcctgctctcttgcaaagacagcttttgatgaagccattgctgaacttgatacattaagtgaagagtcatacaaagacagcacgctaataatgcaattactgagagacaacttgacattgtggacatcggatacccaaggagacgaagctgaag

SEQ ID NO: 196726 - DNA, 1394 bp, Homo sapiens
  Payload ID: 18800
  Gene Name: tyrosine 3-monooxygenase/tryptophan 5-monooxygenase activation protein, zeta
  Uniprot ID: P63104
  ENST ID: ENST00000522542
  CDS Start-End: 18-530
gctataatgttaatgtaatgagtcaaccatgcagaaaactctggcgtcacaactatgaaacctcttcctgcattgaattcttgaagtctcttttggaaaagttcttgatccccaatgcttcacaagcagagagcaaagtcttctatttgaaaatgaaaggagattactaccgttacttggctgaggttgccgctggtgatgacaagaaagggattgtcgatcagtcacaacaagcataccaagaagcttttgaaatcagcaaaaaggaaatgcaaccaacacatcctatcagactgggtctggcccttaacttctctgtgttctattatgagattctgaactccccagagaaagcctgctctcttgcaaagacagcttttgatgaagccattgctgaacttgatacattaagtgaagagtcatacaaagacagcacgctaataatgcaattactgagagacaacttgacattgtggacatcggatacccaaggagacgaagctgaagcaggagaaggaggggaaaattaaccggccttccaacttttgtctgcctcattctaaaatttacacagtagaccatttgtcatccatgctgtcccacaaatagttttttgtttacgatttatgacaggtttatgttacttctatttgaatttctatatttcccatgtggtttttatgtttaatattaggggagtagagccagttaacatttagggagttatctgttttcatcttgaggtggccaatatggggatgtggaatttttatacaagttataagtgtttggcatagtacttttggtacattgtggcttcaaaagggccagtgtaaaactgcttccatgtctaagcaaagaaaactgcctacatactggtttgtcctggcggggaataaaagggatcattggttccagtcacaggtgtagtaattgtgggtactttaaggtttggagcacttacaaggctgtggtagaatcataccccatggataccacatattaaaccatgtatatctgtggaatactcaatgtgtacacctttgactacagctgcagaagtgttcctttagacaaagttgtgacccattttactctggataagggcagaaacggttcacattccattatttgtaaagttacctgctgttagctttcattatttttgctacactcattttatttgtatttaaatgttttaggcaacctaagaacaaatgtaaaagtaaagatgcaggaaaaatgaattgcttggtattcattacttcatgtatatcaagcacagcagtaaaacaaaaacccatgtatttaacttttttttaggatttttgcttttgtgatttttttttttttgatacttgcctaacatgcatgtgctgtaaaaatagttaaca

SEQ ID NO: 196727 - DNA, 626 bp, Homo sapiens
  Payload ID: 18800
  Gene Name: tyrosine 3-monooxygenase/tryptophan 5-monooxygenase activation protein, zeta
  ENST ID: ENST00000523938
  CDS Start-End: 472-626
ggtcccggatgttgctgaacgggagccccttccagagggagtgactggggcaagcgcagacgggctgagcgaaagctaaggtgcactcgggacaagcgtagaggagctggaagccgagcggggtgggaggagtggcggctgcgggcgaggacgcgcgcgcctccgctcgccctccagcgcgggcgggcaggacgagcgccggggagcggcggttacgcggggccccgatcgctgtgggcaccaatcaacggttgccatagcagcgtttgacgtcatcgtgcgtgtggtgcccctgctgccggggctggtgattggaggaaaccccgtgtctgcggagcggctgtagcctgtgagcagcgagatccagggacagagtctcagcctcgccgctgctgccgccgccgccgcccagagactgctgagcccgtccgtccgccgccaccacccactccggacacagaacatccagtcatggataaaaatgagctggttcagaaggccaaactggccgagcaggctgagcgatatgatgacatggcagcctgcatgaagtctgtaactgagcaaggagctgaattatccaatgaggagaggaatcttctctcagttgcttataaaaatgttgt

SEQ ID NO: 196728 - DNA, 3983 bp, Homo sapiens
  Payload ID: 18801
  Gene Name: tyrosine aminotransferase
  Uniprot ID: P17735
  ENST ID: ENST00000355962
  CDS Start-End: 135-1499
ggagactatttcaggagttaggatttgcatctgagttcattgcccctgtaacctgtcaaagaagagctaagggagctttcggggttggcttcttggaggctgctttctcctttacttggaaggcttcgctagtgatggacccatacatgattcagatgagcagcaaaggcaacctcccctcaattctggacgtgcatgtcaacgttggtgggagaagctctgtgccgggaaaaatgaaaggcagaaaggccaggtggtctgtgaggccctcagacatggccaagaaaactttcaaccccatccgagccattgtggacaacatgaaggtgaaaccaaatccaaacaaaaccatgatttccctgtccattggggaccctactgtgtttggaaacctgcctacagaccctgaagttacccaggcaatgaaagatgccctggactcgggcaaatataatggctatgccccatccatcggcttcctatccagtcgggaggagattgcttcttattaccactgtcctgaggcacccctagaagctaaggacgtcattctgacaagtggctgcagccaagctattgacctttgtttagctgtgttggccaacccagggcaaaacatcctggttccaagacctggtttctctctctacaagactctggctgagtctatgggaattgaggtcaaactctacaatttgttgccagagaaatcttgggaaattgacctgaaacaactggaatatctaattgatgaaaagacagcttgtctcattgtcaataatccatcaaacccctgtgggtcagtgttcagcaaacgtcatcttcagaagattctggcagtggctgcacggcagtgtgtccccatcttagctgatgagatctatggagacatggtgttttcggattgcaaatatgaaccactggccaccctcagcaccgatgtccccatcctgtcctgtggagggctggccaagcgctggctggttcctggctggaggttgggctggatcctcattcatgaccgaagagacatttttggcaatgagatccgagatgggctggtgaagctgagtcagcgcattttgggaccctgtaccattgtccagggagctctgaaaagcatcctatgtcgcaccccgggagagttttaccacaacactctgagcttcctcaagtccaatgctgatctctgttatggggcgttggctgccatccctggactccggccagtccgcccttctggggctatgtacctcatggttggaattgagatggaacatttcccagaatttgagaacgatgtggagttcacggagcggttagttgctgagcagtctgtccactgcctcccagcaacgtgctttgagtacccgaatttcatccgagtggtcatcacagtccccgaggtgatgatgctggaggcgtgcagccggatccaggagttctgtgagcagcactaccattgtgctgaaggcagccaggaggagtgtgataaataggcctgcatccattctcctgaggatgtgtcccatctagggaaggctggactaggccttgcggctcctcagggactcaggtggccctactgggagaggggcctcaaatgcaccatgtcaagggttcaagattgttcctgcttttccccaagtacaaccacacccacactcagatcctcctcattcacatcgcagattctcccttgctctgcgctgctagagtgactcactaattcattaatctgcctccctctcgtaagatttccttctttttttcttgaaagtaccaggtgaacaaagtttaccagaaagcagttgagacaagaaaataagagctcaggatgagggaaaagaaaaagattgagagaatttgtgcccccaaccatttcctcagactctaagaaagaacacgctctctccaggcaggtctgaagctcaactctcttattgcctcacttcaggtatacctcactttacacaatagaattataactggaaagaagttggggacacatgtatttggtgattacattttaaacacattaggaaaagttgctatttgaactttttattgatttttggggggagtaaagaattattttgtgatgcaaataaatatcctttaattgatcgacttgccaaatttagatttgtgtgcatcaggctttcttttttttctttttttagagaagttcaatataagcttttcttttctttgtttctttctttctttattttgagatggagtcttgctctgtcgcccatgctggagtgcagtggcgcgatctcggctcactgcaacctccacctcctgggttcaagcgattctcttgcctcaacctcccaagcagttgggactacaggcgtgagccaccatgcccggctaatttttgtatttttagtagagacagggtttcaccatgttagccaggctggtctcaaactcctgacctcaggcaatctgcccgcctgggtctcctaaagtactgggattacaggcgtgagccacctcgcccagcggcatcaggctttcttaaagtgagagcacgcctgtactagagcaagcaggaatcagagaccttccagaaatactactgtgtaagggccagaaatatcttcacttgtcattgttatataatcattattacttttgctgtaatgttaatattgatttattaatatatattatcttttcatacattttctaagaaacatttatattgataagatcttttattttgccaagggcataaattattgtttttctttttttttttttaataaatttcaccaagtatggctcttctgtgatgtgtttttttctccgtttgggaatttctaatcccaggcactcctcagtctcattgtttcattacctatgaggtttcatttacttctttgtaaatgtactgacttttggagttacttaagaaccacagttcctaaaacattttatttgggagctcaacttctggcttcctacttaccaagaggcagtaagttataacctctggcctttgtctttacattttcaactttctggatccctaacctctggtcccaagttactacgcttgcctatatccactaaccactcactaggtcacaaagttgatggctctggcttgacccagtgaatgagaagtgtcctagatgtttttttttttttttttttttcgcaaatcttcataggcacagttgcctgtttaattttttcttcagcccttcccttagaggagggagccttaagttacctttcaaggttgggggttaggaatctatcataactagtctagagatttctcaccaagggaaattttccttatctaaaagaggaacttcaggtctcaaccctgccagtcacacccaattaatgtccttcacaaaaataaacagcatatgttccctttcaatttgagttcagtgagctcacagcaaaatttaccttttaattttcttcagcaaatccaagacgaatatacaaaggatgagattagataaagatttcagtttcccgtatgccaccgctgccgccaattttccaaaaaagcctggctcctcttttcctgttcctccatccaagcccccaaagatctctaaccagaaataaacaggaagactcagtgatttacaaaagacattttagttttacacgtacagaaaattctacccagcattacagaattcttagacttcttaaattcctgattttccttggtatttacattttgataagggagccaatggttcttcaaacatttgaaaagaacacatacacactggacaatttcaaacgatacaaacaaacgcaactgtccttctttctcattcctgtccttcagccacccagtttcttctcccctgagggaatcagttatcatttgctggtcatacttccagattatactgtgcctatgtaagtgtgtgtgtgtgtgtgtgtgtgtgcacttttcattttttcaaataaagtattactcaactttgtaa

SEQ ID NO: 196729 - DNA, 1115 bp, Homo sapiens
  Payload ID: 18802
  Gene Name: tyrosine hydroxylase
  ENST ID: ENST00000324155
  CDS Start-End: 20-154
cggacctccacactgagccatgcccacccccgacgccaccacgccacaggccaagggcttccgcagggccgtgtctgagctggacgccaagcaggcagaggccatcatgggccaccaagccctcggcgctgtcccgagctgtgaaggtgtttgagacgtttgaagccaaaatccaccatctagagacccggcccgcccagaggccgcgagctgggggcccccacctggagtacttcgtgcgcctcgaggtgcgccgaggggacctggccgccctgctcagtggtgtgcgccaggtgtcagaggacgtgcgcagccccgcggggcccaaggtcccctggttcccaagaaaagtgtcagagctggacaagtgtcatcacctggtcaccaagttcgaccctgacctggacttggaccacccgggcttctcggaccaggtgtaccgccagcgcaggaagctgattgctgagatcgccttccagtacaggcacggcgacccgattccccgtgtggagtacaccgccgaggagattgccacctggaaggaggtctacaccacgctgaagggcctctacgccacgcacgcctgcggggagcacctggaggcctttgctttgctggagcgcttcagcggctaccgggaagacaatatcccccagctggaggacgtctcccgcttcctgaaggagcgcacgggcttccagctgcggcctgtggccggcctgctgtccgcccgggacttcctggccagcctggccttccgcgtgttccagtgcacccagtatatccgccacgcgtcctcgcccatgcactcccctgagccggactgctgccacgagctgctggggcacgtgcccatgctggccgaccgcaccttcgcgcagttctcgcaggacattggcctggcgtccctgggggcctcggatgaggaaattgagaagctgtccacgctgtactggttcacggtggagttcgggctgtgtaagcagaacggggaggtgaaggcctatggtgccgggctgctgtcctcctacggggagctcctgcactgcctgtctgaggagcctgagattcgggccttcgaccctgaggctgcggccgtgcagccctaccaagac

SEQ ID NO: 196730 - DNA, 1889 bp, Homo sapiens
  Payload ID: 18802
  Gene Name: tyrosine hydroxylase
  Uniprot ID: P07101
  ENST ID: ENST00000352909
  CDS Start-End: 92-1585
ggacccagagggggctttgacgtcagctcagcttataagaggctgctgggccagggctgtggagacggagcccggacctccacactgagccatgcccacccccgacgccaccacgccacaggccaagggcttccgcagggccgtgtctgagctggacgccaagcaggcagaggccatcatgtccccgcggttcattgggcgcaggcagagcctcatcgaggacgcccgcaaggagcgggaggcggcggtggcagcagcggccgctgcagtcccctcggagcccggggaccccctggaggctgtggcctttgaggagaaggaggggaaggccgtgctaaacctgctcttctccccgagggccaccaagccctcggcgctgtcccgagctgtgaaggtgtttgagacgtttgaagccaaaatccaccatctagagacccggcccgcccagaggccgcgagctgggggcccccacctggagtacttcgtgcgcctcgaggtgcgccgaggggacctggccgccctgctcagtggtgtgcgccaggtgtcagaggacgtgcgcagccccgcggggcccaaggtcccctggttcccaagaaaagtgtcagagctggacaagtgtcatcacctggtcaccaagttcgaccctgacctggacttggaccacccgggcttctcggaccaggtgtaccgccagcgcaggaagctgattgctgagatcgccttccagtacaggcacggcgacccgattccccgtgtggagtacaccgccgaggagattgccacctggaaggaggtctacaccacgctgaagggcctctacgccacgcacgcctgcggggagcacctggaggcctttgctttgctggagcgcttcagcggctaccgggaagacaatatcccccagctggaggacgtctcccgcttcctgaaggagcgcacgggcttccagctgcggcctgtggccggcctgctgtccgcccgggacttcctggccagcctggccttccgcgtgttccagtgcacccagtatatccgccacgcgtcctcgcccatgcactcccctgagccggactgctgccacgagctgctggggcacgtgcccatgctggccgaccgcaccttcgcgcagttctcgcaggacattggcctggcgtccctgggggcctcggatgaggaaattgagaagctgtccacgctgtactggttcacggtggagttcgggctgtgtaagcagaacggggaggtgaaggcctatggtgccgggctgctgtcctcctacggggagctcctgcactgcctgtctgaggagcctgagattcgggccttcgaccctgaggctgcggccgtgcagccctaccaagaccagacgtaccagtcagtctacttcgtgtctgagagcttcagtgacgccaaggacaagctcaggagctatgcctcacgcatccagcgccccttctccgtgaagttcgacccgtacacgctggccatcgacgtgctggacagcccccaggccgtgcggcgctccctggagggtgtccaggatgagctggacacccttgcccatgcgctgagtgccattggctaggtgcacggcgtccctgagggcccttcccaacctcccctggtcctgcactgtcccggagctcaggccctggtgaggggctgggtcccgggtgccccccatgccctccctgctgccaggctcccactgcccctgcacctgcttctcagcgcaacagctgtgtgtgcccgtggtgaggttgtgctgcctgtggtgaggtcctgtcctggctcccagggtcctgggggctgctgcactgccctccgcccttccctgacactgtctgctgccccaatcaccgtcacaataaaagaaactgtggtctcta

SEQ ID NO: 196731 - DNA, 1535 bp, Homo sapiens
  Payload ID: 18802
  Gene Name: tyrosine hydroxylase
  Uniprot ID: P07101
  ENST ID: ENST00000333684
  CDS Start-End: 20-1231
cggacctccacactgagccatgcccacccccgacgccaccacgccacaggccaagggcttccgcagggccgtgtctgagctggacgccaagcaggcagaggccatcatgtccccgcggttcattgggcgcaggcagagcctcatcgaggacgcccgcaaggagcgggaggcggcggtggcagcagcggccgctgcagtcccctcggagcccggggaccccctggaggctgtggcctttgaggagaaggaggggaaggccgtgctaaacctgctcttctccccgagggccaccaagccctcggcgctgtcccgagctgtgaaggtgtttgagacgtttgaagccaaaatccaccatctagagacccggcccgcccagaggccgcgagctgggggcccccacctggagtacttcgtgcgcctcgaggtgcgccgaggggacctggccgccctgctcagtggtgtgcgccaggtgtcagaggacgtgcgcagccccgcggggcccaaggtcccctggttcccaagaaaagtgtcagagctggacaagtgtcatcacctggtcaccaagttcgaccctgacctggacttggaccacccgggcttctcggaccaggtgtaccgccagcgcaggaagctgattgctgagatcgccttccagtacaggcacggcgacccgattccccgtgtggagtacaccgccgaggagattgccacctgggactgctgccacgagctgctggggcacgtgcccatgctggccgaccgcaccttcgcgcagttctcgcaggacattggcctggcgtccctgggggcctcggatgaggaaattgagaagctgtccacgctgtactggttcacggtggagttcgggctgtgtaagcagaacggggaggtgaaggcctatggtgccgggctgctgtcctcctacggggagctcctgcactgcctgtctgaggagcctgagattcgggccttcgaccctgaggctgcggccgtgcagccctaccaagaccagacgtaccagtcagtctacttcgtgtctgagagcttcagtgacgccaaggacaagctcaggagctatgcctcacgcatccagcgccccttctccgtgaagttcgacccgtacacgctggccatcgacgtgctggacagcccccaggccgtgcggcgctccctggagggtgtccaggatgagctggacacccttgcccatgcgctgagtgccattggctaggtgcacggcgtccctgagggcccttcccaacctcccctggtcctgcactgtcccggagctcaggccctggtgaggggctgggtcccgggtgccccccatgccctccctgctgccaggctcccactgcccctgcacctgcttctcagcgcaacagctgtgtgtgcccgtggtgaggttgtgctgcctgtggtgaggtcctgtcctggctcccagggtcctgggggctgctgcactgccctccgcccttccctgacactgtctgctgccccaatcaccgtcacaataaaagaaactgtggtctcta

SEQ ID NO: 196732 - DNA, 985 bp, Homo sapiens
  Payload ID: 18802
  Gene Name: tyrosine hydroxylase
  ENST ID: ENST00000381168
  CDS Start-End: 20-166
cggacctccacactgagccatgcccacccccgacgccaccacgccacaggccaagggcttccgcagggccgtgtctgagctggacgccaagcaggcagaggccatcatggtaagagggcagggccaccaagccctcggcgctgtcccgagctgtgaaggtgtttgagacgtttgaagccaaaatccaccatctagagacccggcccgcccagaggccgcgagctgggggcccccacctggagtacttcgtgcgcctcgaggtgcgccgaggggacctggccgccctgctcagtggtgtgcgccaggtgtcagaggacgtgcgcagccccgcggggcccaaggtcccctggttcccaagaaaagtgtcagagctggacaagtgtcatcacctggtcaccaagttcgaccctgacctggacttggaccacccgggcttctcggaccaggtgtaccgccagcgcaggaagctgattgctgagatcgccttccagtacaggcagggacctgctgaccactggccccctccccagcggcgacccgattccccgtgtggagtacaccgccgaggagattgccacctggaaggaggtctacaccacgctgaagggcctctacgccacgcacgcctgcggggagcacctggaggcctttgctttgctggagcgcttcagcggctaccgggaagacaatatcccccagctggaggacgtctcccgcttcctgaaggagcgcacgggcttccagctgcggcctgtggccggcctgctgtccgcccgggacttcctggccagcctggccttccgcgtgttccagtgcacccagtatatccgccacgcgtcctcgcccatgcactcccctgagccggactgctgccacgagctgctggggcacgtgcccatgctggccgaccgcaccttcgcgcagttctcgcaggacattggcctggcgtccctgggggcctcggatgaggaaattgagaagctgt

SEQ ID NO: 196733 - DNA, 1898 bp, Homo sapiens
  Payload ID: 18802
  Gene Name: tyrosine hydroxylase
  Uniprot ID: P07101
  ENST ID: ENST00000381175
  CDS Start-End: 20-1594
cggacctccacactgagccatgcccacccccgacgccaccacgccacaggccaagggcttccgcagggccgtgtctgagctggacgccaagcaggcagaggccatcatgggcgccccggggcccagcctcacaggctctccgtggcctggaactgcagccccagctgcatcctacacccccaccccaaggtccccgcggttcattgggcgcaggcagagcctcatcgaggacgcccgcaaggagcgggaggcggcggtggcagcagcggccgctgcagtcccctcggagcccggggaccccctggaggctgtggcctttgaggagaaggaggggaaggccgtgctaaacctgctcttctccccgagggccaccaagccctcggcgctgtcccgagctgtgaaggtgtttgagacgtttgaagccaaaatccaccatctagagacccggcccgcccagaggccgcgagctgggggcccccacctggagtacttcgtgcgcctcgaggtgcgccgaggggacctggccgccctgctcagtggtgtgcgccaggtgtcagaggacgtgcgcagccccgcggggcccaaggtcccctggttcccaagaaaagtgtcagagctggacaagtgtcatcacctggtcaccaagttcgaccctgacctggacttggaccacccgggcttctcggaccaggtgtaccgccagcgcaggaagctgattgctgagatcgccttccagtacaggcacggcgacccgattccccgtgtggagtacaccgccgaggagattgccacctggaaggaggtctacaccacgctgaagggcctctacgccacgcacgcctgcggggagcacctggaggcctttgctttgctggagcgcttcagcggctaccgggaagacaatatcccccagctggaggacgtctcccgcttcctgaaggagcgcacgggcttccagctgcggcctgtggccggcctgctgtccgcccgggacttcctggccagcctggccttccgcgtgttccagtgcacccagtatatccgccacgcgtcctcgcccatgcactcccctgagccggactgctgccacgagctgctggggcacgtgcccatgctggccgaccgcaccttcgcgcagttctcgcaggacattggcctggcgtccctgggggcctcggatgaggaaattgagaagctgtccacgctgtactggttcacggtggagttcgggctgtgtaagcagaacggggaggtgaaggcctatggtgccgggctgctgtcctcctacggggagctcctgcactgcctgtctgaggagcctgagattcgggccttcgaccctgaggctgcggccgtgcagccctaccaagaccagacgtaccagtcagtctacttcgtgtctgagagcttcagtgacgccaaggacaagctcaggagctatgcctcacgcatccagcgccccttctccgtgaagttcgacccgtacacgctggccatcgacgtgctggacagcccccaggccgtgcggcgctccctggagggtgtccaggatgagctggacacccttgcccatgcgctgagtgccattggctaggtgcacggcgtccctgagggcccttcccaacctcccctggtcctgcactgtcccggagctcaggccctggtgaggggctgggtcccgggtgccccccatgccctccctgctgccaggctcccactgcccctgcacctgcttctcagcgcaacagctgtgtgtgcccgtggtgaggttgtgctgcctgtggtgaggtcctgtcctggctcccagggtcctgggggctgctgcactgccctccgcccttccctgacactgtctgctgccccaatcaccgtcacaataaaagaaactgtggtctcta

SEQ ID NO: 196734 - DNA, 1910 bp, Homo sapiens
  Payload ID: 18802
  Gene Name: tyrosine hydroxylase
  Uniprot ID: P07101
  ENST ID: ENST00000381178
  CDS Start-End: 20-1606
cggacctccacactgagccatgcccacccccgacgccaccacgccacaggccaagggcttccgcagggccgtgtctgagctggacgccaagcaggcagaggccatcatggtaagagggcagggcgccccggggcccagcctcacaggctctccgtggcctggaactgcagccccagctgcatcctacacccccaccccaaggtccccgcggttcattgggcgcaggcagagcctcatcgaggacgcccgcaaggagcgggaggcggcggtggcagcagcggccgctgcagtcccctcggagcccggggaccccctggaggctgtggcctttgaggagaaggaggggaaggccgtgctaaacctgctcttctccccgagggccaccaagccctcggcgctgtcccgagctgtgaaggtgtttgagacgtttgaagccaaaatccaccatctagagacccggcccgcccagaggccgcgagctgggggcccccacctggagtacttcgtgcgcctcgaggtgcgccgaggggacctggccgccctgctcagtggtgtgcgccaggtgtcagaggacgtgcgcagccccgcggggcccaaggtcccctggttcccaagaaaagtgtcagagctggacaagtgtcatcacctggtcaccaagttcgaccctgacctggacttggaccacccgggcttctcggaccaggtgtaccgccagcgcaggaagctgattgctgagatcgccttccagtacaggcacggcgacccgattccccgtgtggagtacaccgccgaggagattgccacctggaaggaggtctacaccacgctgaagggcctctacgccacgcacgcctgcggggagcacctggaggcctttgctttgctggagcgcttcagcggctaccgggaagacaatatcccccagctggaggacgtctcccgcttcctgaaggagcgcacgggcttccagctgcggcctgtggccggcctgctgtccgcccgggacttcctggccagcctggccttccgcgtgttccagtgcacccagtatatccgccacgcgtcctcgcccatgcactcccctgagccggactgctgccacgagctgctggggcacgtgcccatgctggccgaccgcaccttcgcgcagttctcgcaggacattggcctggcgtccctgggggcctcggatgaggaaattgagaagctgtccacgctgtactggttcacggtggagttcgggctgtgtaagcagaacggggaggtgaaggcctatggtgccgggctgctgtcctcctacggggagctcctgcactgcctgtctgaggagcctgagattcgggccttcgaccctgaggctgcggccgtgcagccctaccaagaccagacgtaccagtcagtctacttcgtgtctgagagcttcagtgacgccaaggacaagctcaggagctatgcctcacgcatccagcgccccttctccgtgaagttcgacccgtacacgctggccatcgacgtgctggacagcccccaggccgtgcggcgctccctggagggtgtccaggatgagctggacacccttgcccatgcgctgagtgccattggctaggtgcacggcgtccctgagggcccttcccaacctcccctggtcctgcactgtcccggagctcaggccctggtgaggggctgggtcccgggtgccccccatgccctccctgctgccaggctcccactgcccctgcacctgcttctcagcgcaacagctgtgtgtgcccgtggtgaggttgtgctgcctgtggtgaggtcctgtcctggctcccagggtcctgggggctgctgcactgccctccgcccttccctgacactgtctgctgccccaatcaccgtcacaataaaagaaactgtggtctcta

SEQ ID NO: 196735 - DNA, 483 bp, Homo sapiens
  Payload ID: 18802
  Gene Name: tyrosine hydroxylase
  ENST ID: ENST00000416223
  CDS Start-End: 1-136
ggacttggaccacccgggcttctcggaccaggtgtaccgccagcgcaggaagctgattgctgagatcgccttccagtacaggcacggcgacccgattccccgtgtggagtacaccgccgaggagattgccacctgagcgcacgggcttccagctgcggcctgtggccggcctgctgtccgcccgggacttcctggccagcctggccttccgcgtgttccagtgcacccagtatatccgccacgcgtcctcgcccatgcactcccctgagccggactgctgccacgagctgctggggcacgtgcccatgctggccgaccgcaccttcgcgcagttctcgcaggacattggcctggcgtccctgggggcctcggatgaggaaattgagaagctgtccacgctgtactggttcacggtggagttcgggctgtgtaagcagaacggggaggtgaaggcctatggtgccgggctgctgtcctcctacg

SEQ ID NO: 196736 - DNA, 347 bp, Homo sapiens
  Payload ID: 18802
  Gene Name: tyrosine hydroxylase
  ENST ID: ENST00000412076
  CDS Start-End: 1-347
ggacttggaccacccgggcttctcggaccaggtgtaccgccagcgcaggaagctgattgctgagatcgccttccagtacaggcacggcgacccgattccccgtgtggagtacaccgccgaggagattgccacctgggactgctgccacgagctgctggggcacgtgcccatgctggccgaccgcaccttcgcgcagttctcgcaggacattggcctggcgtccctgggggcctcggatgaggaaattgagaagctgtccacgctgtactggttcacggtggagttcgggctgtgtaagcagaacggggaggtgaaggcctatggtgccgggctgctgtcctcctacg

SEQ ID NO: 196737 - DNA, 3971 bp, Homo sapiens
  Payload ID: 18803
  Gene Name: tyrosine kinase 2
  Uniprot ID: P29597
  ENST ID: ENST00000264818
  CDS Start-End: 103-3666
agctggggtgggtggaaggttgaagagctaacaggggtctctgggctgagacttgggagctgacagattgtcccctttccagctgagccacctgccgggagcatgcctctgcgccactgggggatggccaggggcagtaagcccgttggggatggagcccagcccatggctgccatgggaggcctgaaggtgcttctgcactgggctggtccaggcggcggggagccctgggtcactttcagtgagtcatcgctgacagctgaggaagtctgcatccacattgcacataaagttggtatcactcctccttgcttcaatctctttgccctcttcgatgctcaggcccaagtctggttgcccccaaaccacatcctagagatccccagagatgcaagcctgatgctatatttccgcataaggttttatttccggaactggcatggcatgaatcctcgggaaccggctgtgtaccgttgtgggcccccaggaaccgaggcatcctcagatcagacagcacaggggatgcaactcctggacccagcctcatttgagtacctctttgagcagggcaagcatgagtttgtgaatgacgtggcatcactgtgggagctgtcgaccgaggaggagatccaccactttaagaatgagagcctgggcatggcctttctgcacctctgtcacctcgctctccgccatggcatccccctggaggaggtggccaagaagaccagcttcaaggactgcatcccgcgctccttccgccggcatatccggcagcacagcgccctgacccggctgcgccttcggaacgtcttccgcaggttcctgcgggacttccagccgggccgactctcccagcagatggtcatggtcaaatacctagccacactcgagcggctggcaccccgcttcggcacagagcgtgtgcccgtgtgccacctgaggctgctggcccaggccgagggggagccctgctacatccgggacagtggggtggcccctacagaccctggccctgagtctgctgctgggcccccaacccacgaggtgctggtgacaggcactggtggcatccagtggtggccagtagaggaggaggtgaacaaggaggagggttctagtggcagcagtggcaggaacccccaagccagcctgtttgggaagaaggccaaggctcacaaggcagtcggccagccggcagacaggccgcgggagccactgtgggcctacttctgtgacttccgggacatcacccacgtggtgctgaaagagcactgtgtcagcatccaccggcaggacaacaagtgcctggagctgagcttgccttcccgggctgcggcgctgtccttcgtgtcgctggtggacggctatttccgcctgacggccgactccagccactacctgtgccacgaggtggctcccccacggctggtgatgagcatccgggatgggatccacggacccctgctggagccatttgtgcaggccaagctgcggcccgaggacggcctgtacctcattcactggagcaccagccacccctaccgcctgatcctcacagtggcccagcgtagccaggcaccagacggcatgcagagcttgcggctccgaaagttccccattgagcagcaggacggggccttcgtgctggagggctggggccggtccttccccagcgttcgggaacttggggctgccttgcagggctgcttgctgagggccggggatgactgcttctctctgcgtcgctgttgcctgccccaaccaggagaaacctccaatctcatcatcatgcggggggctcgggccagccccaggacactcaacctcagccagctcagcttccaccgggttgaccagaaggagatcacccagctgtcccacttgggccagggcacaaggaccaacgtgtatgagggccgcctgcgagtggagggcagcggggaccctgaggagggcaagatggatgacgaggaccccctcgtgcctggcagggaccgtgggcaggagctacgagtggtgctcaaagtgctggaccctagtcaccatgacatcgccctggccttctacgagacagccagcctcatgagccaggtctcccacacgcacctggccttcgtgcatggcgtctgtgtgcgcggccctgaaaatatcatggtgacagagtacgtggagcacggacccctggatgtgtggctgcggagggagcggggccatgtgcccatggcttggaagatggtggtggcccagcagctggccagcgccctcagctacctggagaacaagaacctggttcatggtaatgtgtgtggccggaacatcctgctggcccggctggggttggcagagggcaccagccccttcatcaagctgagtgatcctggcgtgggcctgggcgccctctccagggaggagcgggtggagaggatcccctggctggcccccgaatgcctaccaggtggggccaacagcctaagcaccgccatggacaagtgggggtttggcgccaccctcctggagatctgctttgacggagaggcccctctgcagagccgcagtccctccgagaaggagcatttctaccagaggcagcaccggctgcccgagccctcctgcccacagctggccacactcaccagccagtgtctgacctatgagccaacccagaggccatcattccgcaccatcctgcgtgacctcacccggctgcagccccacaatcttgctgacgtcttgactgtgaacccggactcaccggcgtcggaccctacggttttccacaagcgctatttgaaaaagatccgagatctgggcgagggtcacttcggcaaggtcagcttgtactgctacgatccgaccaacgacggcactggcgagatggtggcggtgaaagccctcaaggcagactgcggcccccagcaccgctcgggctggaagcaggagattgacattctgcgcacgctctaccacgagcacatcatcaagtacaagggctgctgcgaggaccaaggcgagaagtcgctgcagctggtcatggagtacgtgcccctgggcagcctccgagactacctgccccggcacagcatcgggctggcccagctgctgctcttcgcccagcagatctgcgagggcatggcctatctgcacgcgcagcactacatccaccgagacctagccgcgcgcaacgtgctgctggacaacgacaggctggtcaagatcggggactttggcctagccaaggccgtgcccgaaggccacgagtactaccgcgtgcgcgaggatggggacagccccgtgttctggtatgccccagagtgcctgaaggagtataagttctactatgcgtcagatgtctggtccttcggggtgaccctgtatgagctgctgacgcactgtgactccagccagagcccccccacgaaattccttgagctcataggcattgctcagggtcagatgacagttctgagactcactgagttgctggaacgaggggagaggctgccacggcccgacaaatgtccctgtgaggtctatcatctcatgaagaactgctgggagacagaggcgtcctttcgcccaaccttcgagaacctcatacccattctgaagacagtccatgagaagtaccaaggccaggccccttcagtgttcagcgtgtgctgaggcacaatggcagccctgcctgggaggactggaccaggcagtggctgcagagggagcctcctgctccctgctccaggatgaaaccaagagggggatgtcagcctcacccacaccgtgtgccttactcctgtctagagaccccacctctgtgaacttatttttctttcttggccgtgagcctaaccatgatcttgagggacccaacatttgtaggggcactaatccagcccttaaatcccccagcttccaaacttgaggcccaccatctccaccatctggtaataaactcatgttttctctgctgg

SEQ ID NO: 196738 - DNA, 4347 bp, Homo sapiens
  Payload ID: 18803
  Gene Name: tyrosine kinase 2
  Uniprot ID: P29597
  ENST ID: ENST00000525621
  CDS Start-End: 483-4046
aaaaaaaaaaaaatccaatggtgacgagcagggagaacagagcagctgccaatgggcgtgtgcgtttcaggcggccaatgggaggaggcgtctcggcgggggacaagcagtagctacccgcgggagcggggaggggtccgggttcgagcttgtgttcccccggaagggtgagtctggacgcgggcgcggaaggagcgcggccggaggtcctcaggaagaagccgcggggactggctgcgcttgacaggctgcacttggatgggagcacctggtgcctcgggactgctccgatgcccgggtctgtgctgaatgtgtaatatgcggaactatattgaaacattacaaccatcttttgatggcaacaccctgaggacctcccttttccagatggggaaactgaggcccagaattgctaagtggcttgcttgagttgacacagggagctccaggactcaccctcagctgagccacctgccgggagcatgcctctgcgccactgggggatggccaggggcagtaagcccgttggggatggagcccagcccatggctgccatgggaggcctgaaggtgcttctgcactgggctggtccaggcggcggggagccctgggtcactttcagtgagtcatcgctgacagctgaggaagtctgcatccacattgcacataaagttggtatcactcctccttgcttcaatctctttgccctcttcgatgctcaggcccaagtctggttgcccccaaaccacatcctagagatccccagagatgcaagcctgatgctatatttccgcataaggttttatttccggaactggcatggcatgaatcctcgggaaccggctgtgtaccgttgtgggcccccaggaaccgaggcatcctcagatcagacagcacaggggatgcaactcctggacccagcctcatttgagtacctctttgagcagggcaagcatgagtttgtgaatgacgtggcatcactgtgggagctgtcgaccgaggaggagatccaccactttaagaatgagagcctgggcatggcctttctgcacctctgtcacctcgctctccgccatggcatccccctggaggaggtggccaagaagaccagcttcaaggactgcatcccgcgctccttccgccggcatatccggcagcacagcgccctgacccggctgcgccttcggaacgtcttccgcaggttcctgcgggacttccagccgggccgactctcccagcagatggtcatggtcaaatacctagccacactcgagcggctggcaccccgcttcggcacagagcgtgtgcccgtgtgccacctgaggctgctggcccaggccgagggggagccctgctacatccgggacagtggggtggcccctacagaccctggccctgagtctgctgctgggcccccaacccacgaggtgctggtgacaggcactggtggcatccagtggtggccagtagaggaggaggtgaacaaggaggagggttctagtggcagcagtggcaggaacccccaagccagcctgtttgggaagaaggccaaggctcacaaggcagtcggccagccggcagacaggccgcgggagccactgtgggcctacttctgtgacttccgggacatcacccacgtggtgctgaaagagcactgtgtcagcatccaccggcaggacaacaagtgcctggagctgagcttgccttcccgggctgcggcgctgtccttcgtgtcgctggtggacggctatttccgcctgacggccgactccagccactacctgtgccacgaggtggctcccccacggctggtgatgagcatccgggatgggatccacggacccctgctggagccatttgtgcaggccaagctgcggcccgaggacggcctgtacctcattcactggagcaccagccacccctaccgcctgatcctcacagtggcccagcgtagccaggcaccagacggcatgcagagcttgcggctccgaaagttccccattgagcagcaggacggggccttcgtgctggagggctggggccggtccttccccagcgttcgggaacttggggctgccttgcagggctgcttgctgagggccggggatgactgcttctctctgcgtcgctgttgcctgccccaaccaggagaaacctccaatctcatcatcatgcggggggctcgggccagccccaggacactcaacctcagccagctcagcttccaccgggttgaccagaaggagatcacccagctgtcccacttgggccagggcacaaggaccaacgtgtatgagggccgcctgcgagtggagggcagcggggaccctgaggagggcaagatggatgacgaggaccccctcgtgcctggcagggaccgtgggcaggagctacgagtggtgctcaaagtgctggaccctagtcaccatgacatcgccctggccttctacgagacagccagcctcatgagccaggtctcccacacgcacctggccttcgtgcatggcgtctgtgtgcgcggccctgaaaatatcatggtgacagagtacgtggagcacggacccctggatgtgtggctgcggagggagcggggccatgtgcccatggcttggaagatggtggtggcccagcagctggccagcgccctcagctacctggagaacaagaacctggttcatggtaatgtgtgtggccggaacatcctgctggcccggctggggttggcagagggcaccagccccttcatcaagctgagtgatcctggcgtgggcctgggcgccctctccagggaggagcgggtggagaggatcccctggctggcccccgaatgcctaccaggtggggccaacagcctaagcaccgccatggacaagtgggggtttggcgccaccctcctggagatctgctttgacggagaggcccctctgcagagccgcagtccctccgagaaggagcatttctaccagaggcagcaccggctgcccgagccctcctgcccacagctggccacactcaccagccagtgtctgacctatgagccaacccagaggccatcattccgcaccatcctgcgtgacctcacccggctgcagccccacaatcttgctgacgtcttgactgtgaacccggactcaccggcgtcggaccctacggttttccacaagcgctatttgaaaaagatccgagatctgggcgagggtcacttcggcaaggtcagcttgtactgctacgatccgaccaacgacggcactggcgagatggtggcggtgaaagccctcaaggcagactgcggcccccagcaccgctcgggctggaagcaggagattgacattctgcgcacgctctaccacgagcacatcatcaagtacaagggctgctgcgaggaccaaggcgagaagtcgctgcagctggtcatggagtacgtgcccctgggcagcctccgagactacctgccccggcacagcatcgggctggcccagctgctgctcttcgcccagcagatctgcgagggcatggcctatctgcacgcgcagcactacatccaccgagacctagccgcgcgcaacgtgctgctggacaacgacaggctggtcaagatcggggactttggcctagccaaggccgtgcccgaaggccacgagtactaccgcgtgcgcgaggatggggacagccccgtgttctggtatgccccagagtgcctgaaggagtataagttctactatgcgtcagatgtctggtccttcggggtgaccctgtatgagctgctgacgcactgtgactccagccagagcccccccacgaaattccttgagctcataggcattgctcagggtcagatgacagttctgagactcactgagttgctggaacgaggggagaggctgccacggcccgacaaatgtccctgtgaggtctatcatctcatgaagaactgctgggagacagaggcgtcctttcgcccaaccttcgagaacctcatacccattctgaagacagtccatgagaagtaccaaggccaggccccttcagtgttcagcgtgtgctgaggcacaatggcagccctgcctgggaggactggaccaggcagtggctgcagagggagcctcctgctccctgctccaggatgaaaccaagagggggatgtcagcctcacccacaccgtgtgccttactcctgtctagagaccccacctctgtgaacttatttttctttcttggccgtgagcctaaccatgatcttgagggacccaacatttgtaggggcactaatccagcccttaaatcccccagcttccaaacttgaggcccaccatctccaccatctggtaataaactcatgttttctctg

SEQ ID NO: 196739 - DNA, 725 bp, Homo sapiens
  Payload ID: 18803
  Gene Name: tyrosine kinase 2
  ENST ID: ENST00000533334
  CDS Start-End: 1-247
gcgagtggagggcagcggggaccctgaggagggcaagatggatgacgaggaccccctcgtgcctggcagggaccgtgggcaggagctacgagtggtgctcaaagtgctggaccctagtcaccatgacatcgccctggccttctacgagacagccagcctcatgagccaggtctcccacacgcacctggccttcgtgcatggcgtctgtgtgcgcggccctgaaagtagctcaaaactccttgtataggctaggtgtggtggctcacacctatcccagcactttgggaggcagaggtgggaggatcgcttaaacccaggagttcaagaccagcctggatatcatggtgacagagtacgtggagcacggacccctggatgtgtggctgcggagggagcggggccatgtgcccatggcttggaagatggtggtggcccagcagctggccagcgccctcagctacctggagaacaagaacctggttcatggtaatgtgtgtggccggaacatcctgctggcccggctggggttggcagagggcaccagccccttcatcaagctgagtgatcctggcgtgggcctgggcgccctctccagggaggagcgggtggagaggatcccctggctggcccccgaatgcctaccaggtggggccaacagcctaagcaccgccatggacaagtgggggtttggcgccaccctcctggagatctgctttgacggagag

SEQ ID NO: 196740 - DNA, 3176 bp, Homo sapiens
  Payload ID: 18803
  Gene Name: tyrosine kinase 2
  ENST ID: ENST00000529370
  CDS Start-End: 332-3097
gtgttcccccggaagggtgagtctggacgcgggcgcggaaggagcgcggccggaggtcctcaggaagaagccgcggggactggctgcgcttgacaggctgcacttggatgggagcacctggtgcctcgggactgctccgatgcccgggtctgtgctgaatgtgtaatatgcggaactatattgaaacattacaaccatcttttgatggcaacaccctgaggacctcccttttccagatggggaaactgaggcccagaattgctaagtggcttgcttgagttgacacagggagctccaggactcaccctcagctgagccacctgccgggagcatgcctctgcgccactgggggatggccaggggcagtaagcccgttggggatggagcccagcccatggctgccatgggaggcctgaaggtgcttctgcactgggctggtccaggcggcggggagccctgggtcactttcagtgagtcatcgctgacagctgaggaagtctgcatccacattgcacataaagttggtatcactcctccttgcttcaatctctttgccctcttcgatgctcaggcccaagtctggttgcccccaaaccacatcctagagatccccagagatgcaagcctgatgctatatttccgcataaggttttatttccggaactggcatggcatgaatcctcgggaaccggctgtgtaccgttgtgggcccccaggaaccgaggcatcctcagatcagacagcacaggggatgcaactcctggacccagcctcatttgagtacctctttgagcagggcaagcatgagtttgtgaatgacgtggcatcactgtgggagctgtcgaccgaggaggagatccaccactttaagaatgagagcctgggcatggcctttctgcacctctgtcacctcgctctccgccatggcatccccctggaggaggtggccaagaagaccagcttcaaggactgcatcccgcgctccttccgccggcatatccggcagcacagcgccctgacccggctgcgccttcggaacgtcttccgcaggttcctgcgggacttccagccgggccgactctcccagcagatggtcatggtcaaatacctagccacactcgagcggctggcaccccgcttcggcacagagcgtgtgcccgtgtgccacctgaggctgctggcccaggccgagggggagccctgctacatccgggacagtggggtggcccctacagaccctggccctgagtctgctgctgggcccccaacccacgaggtgctggtgacaggcactggtggcatccagtggtggccagtagaggaggaggtgaacaaggaggagggttctagtggcagcagtggcaggaacccccaagccagcctgtttgggaagaaggccaaggctcacaaggcagtcggccagccggcagacaggccgcgggagccactgtgggcctacttctgtgacttccgggacatcacccacgtggtgctgaaagagcactgtgtcagcatccaccggcaggacaacaagtgcctggagctgagcttgccttcccgggctgcggcgctgtccttcgtgtcgctggtggacggctatttccgcctgacggccgactccagccactacctgtgccacgaggtggctcccccacggctggtgatgagcatccgggatgggatccacggacccctgctggagccatttgtgcaggccaagctgcggcccgaggacggcctgtacctcattcactggagcaccagccacccctaccgcctgatcctcacagtggcccagcgtagccaggcaccagacggcatgcagagcttgcggctccgaaagttccccattgagcagcaggacggggccttcgtgctggagggctggggccggtccttccccagcgttcgggaacttggggctgccttgcagggctgcttgctgagggccggggatgactgcttctctctgcgtcgctgttgcctgccccaaccaggagaaacctccaatctcatcatcatgcggggggctcgggccagccccaggacactcaacctcagccagctcagcttccaccgggttgaccagaaggagatcacccagctgtcccacttgggccagggcacaaggaccaacgtgtatgagggccgcctgcgagtggagggcagcggggaccctgaggagggcaagatggatgacgaggaccccctcgtgcctggcagggaccgtgggcaggagctacgagtggtgctcaaagtgctggaccctagtcaccatgacatcgccctggccttctacgagacagccagcctcatgagccaggtctcccacacgcacctggccttcgtgcatggcgtctgtgtgcgcggccctgaaaatatcatggtgacagagtacgtggagcacggacccctggatgtgtggctgcggagggagcggggccatgtgcccatggcttggaagatggtggtggcccagcagctggccagcgccctcagctacctggagaacaagaacctggttcatggtaatgtgtgtggccggaacatcctgctggcccggctggggttggcagagggcaccagccccttcatcaagctgagtgatcctggcgtgggcctgggcgccctctccagggaggagcgggtggagaggatcccctggctggcccccgaatgcctaccaggtggggccaacagcctaagcaccgccatggacaagtgggggtttggcgccaccctcctggagatctgctttgacggagaggcccctctgcagagccgcagtccctccgaggtatgtctaggagacccttgggccctccccgcagtgggggcccctccaagaaatccagaggacagaatcagagctcaaagctgcatcccttctggcctcgtgacttcaagtctctctgggctaccagcaggtgggccactcgctggggctcaatgtagtcccagcctttttaggtccttgtggaagtcacttgtgcctggcacacagaaggcaagtaagagacttgatttcagttttaggcagagtgaccagggcagcgatgggagacgcccaggctgcagagtggggaagaagggctgaggatgcgcctcacccagcagtggggtcagacaaggcttcccaaaggaggttcatgagtgtggtggttttattttgagac

SEQ ID NO: 196741 - DNA, 3456 bp, Homo sapiens
  Payload ID: 18803
  Gene Name: tyrosine kinase 2
  ENST ID: ENST00000524462
  CDS Start-End: 147-3155
agctacccgcgggagcggggaggggtccgggttcgagcttgtgttcccccggaaggggcaagcatgagtttgtgaatgacgtggcatcactgtgggagctgtcgaccgaggaggagatccaccactttaagaatgagagcctgggcatggcctttctgcacctctgtcacctcgctctccgccatggcatccccctggaggaggtggccaagaagaccagcttcaaggactgcatcccgcgctccttccgccggcatatccggcagcacagcgccctgacccggctgcgccttcggaacgtcttccgcaggttcctgcgggacttccagccgggccgactctcccagcagatggtcatggtcaaatacctagccacactcgagcggctggcaccccgcttcggcacagagcgtgtgcccgtgtgccacctgaggctgctggcccaggccgagggggagccctgctacatccgggacagtggggtggcccctacagaccctggccctgagtctgctgctgggcccccaacccacgaggtgctggtgacaggcactggtggcatccagtggtggccagtagaggaggaggtgaacaaggaggagggttctagtggcagcagtggcaggaacccccaagccagcctgtttgggaagaaggccaaggctcacaaggcagtcggccagccggcagacaggccgcgggagccactgtgggcctacttctgtgacttccgggacatcacccacgtggtgctgaaagagcactgtgtcagcatccaccggcaggacaacaagtgcctggagctgagcttgccttcccgggctgcggcgctgtccttcgtgtcgctggtggacggctatttccgcctgacggccgactccagccactacctgtgccacgaggtggctcccccacggctggtgatgagcatccgggatgggatccacggacccctgctggagccatttgtgcaggccaagctgcggcccgaggacggcctgtacctcattcactggagcaccagccacccctaccgcctgatcctcacagtggcccagcgtagccaggcaccagacggcatgcagagcttgcggctccgaaagttccccattgagcagcaggacggggccttcgtgctggagggctggggccggtccttccccagcgttcgggaacttggggctgccttgcagggctgcttgctgagggccggggatgactgcttctctctgcgtcgctgttgcctgccccaaccaggagaaacctccaatctcatcatcatgcggggggctcgggccagccccaggacactcaacctcagccagctcagcttccaccgggttgaccagaaggagatcacccagctgtcccacttgggccagggcacaaggaccaacgtgtatgagggccgcctgcgagtggagggcagcggggaccctgaggagggcaagatggatgacgaggaccccctcgtgcctggcagggaccgtgggcaggagctacgagtggtgctcaaagtgctggaccctagtcaccatgacatcgccctggccttctacgagacagccagcctcatgagccaggtctcccacacgcacctggccttcgtgcatggcgtctgtgtgcgcggccctgaaaatatcatggtgacagagtacgtggagcacggacccctggatgtgtggctgcggagggagcggggccatgtgcccatggcttggaagatggtggtggcccagcagctggccagcgccctcagctacctggagaacaagaacctggttcatggtaatgtgtgtggccggaacatcctgctggcccggctggggttggcagagggcaccagccccttcatcaagctgagtgatcctggcgtgggcctgggcgccctctccagggaggagcgggtggagaggatcccctggctggcccccgaatgcctaccaggtggggccaacagcctaagcaccgccatggacaagtgggggtttggcgccaccctcctggagatctgctttgacggagaggcccctctgcagagccgcagtccctccgagaaggagcatttctaccagaggcagcaccggctgcccgagccctcctgcccacagctggccacactcaccagccagtgtctgacctatgagccaacccagaggccatcattccgcaccatcctgcgtgacctcacccggctgcagccccacaatcttgctgacgtcttgactgtgaacccggactcaccggcgtcggaccctacggttttccacaagcgctatttgaaaaagatccgagatctgggcgagggtcacttcggcaaggtcagcttgtactgctacgatccgaccaacgacggcactggcgagatggtggcggtgaaagccctcaaggcagactgcggcccccagcaccgctcgggctggaagcaggagattgacattctgcgcacgctctaccacgagcacatcatcaagtacaagggctgctgcgaggaccaaggcgagaagtcgctgcagctggtcatggagtacgtgcccctgggcagcctccgagactacctgccccggcacagcatcgggctggcccagctgctgctcttcgcccagcagatctgcgagggcatggcctatctgcacgcgcagcactacatccaccgagacctagccgcgcgcaacgtgctgctggacaacgacaggctggtcaagatcggggactttggcctagccaaggccgtgcccgaaggccacgagtactaccgcgtgcgcgaggatggggacagccccgtgttctggtatgccccagagtgcctgaaggagtataagttctactatgcgtcagatgtctggtccttcggggtgaccctgtatgagctgctgacgcactgtgactccagccagagcccccccacgaaattccttgagctcataggcattgctcagggtcagatgacagttctgagactcactgagttgctggaacgaggggagaggctgccacggcccgacaaatgtccctgtgaggtctatcatctcatgaagaactgctgggagacagaggcgtcctttcgcccaaccttcgagaacctcatacccattctgaagacagtccatgagaagtaccaaggccaggccccttcagtgttcagcgtgtgctgaggcacaatggcagccctgcctgggaggactggaccaggcagtggctgcagagggagcctcctgctccctgctccaggatgaaaccaagagggggatgtcagcctcacccacaccgtgtgccttactcctgtctagagaccccacctctgtgaacttatttttctttcttggccgtgagcctaaccatgatcttgagggacccaacatttgtaggggcactaatccagcccttaaatcccccagcttccaaacttgaggcccaccatctccaccatctggtaataaactcatgttttctctg

SEQ ID NO: 196742 - DNA, 495 bp, Homo sapiens
  Payload ID: 18803
  Gene Name: tyrosine kinase 2
  ENST ID: ENST00000525976
  CDS Start-End: 1-194
tcggggtgaccctgtatgagctgctgacgcactgtgactccagccagagcccccccacggtctatcatctcatgaagaactgctgggagacagaggcgtcctttcgcccaaccttcgagaacctcatacccattctgaagacagtccatgagaagtaccaaggccaggccccttcagtgttcagcgtgtgctgaggcacaatggcagccctgcctgggaggactggaccaggcagtggctgcagagggagcctcctgctccctgctccaggatgaaaccaagagggggatgtcagcctcacccacaccgtgtgccttactcctgtctagagaccccacctctgtgaacttatttttctttcttggccgtgagcctaaccatgatcttgagggacccaacatttgtaggggcactaatccagcccttaaatcccccagcttccaaacttgaggcccaccatctccaccatctggtaataaactcatgttttctctg

SEQ ID NO: 196743 - DNA, 583 bp, Homo sapiens
  Payload ID: 18803
  Gene Name: tyrosine kinase 2
  ENST ID: ENST00000525220
  CDS Start-End: 1-583
atatccggcagcacagcgccctgacccggctgcgccttcggaacgtcttccgcaggttcctgcgggacttccagccgggccgactctcccagcagatggtcatggtcaaatacctagccacactcgagcggctggcaccccgcttcggcacagagcgtgtgcccgtgtgccacctgaggctgctggcccaggccgagggggagccctgctacatccgggacagtggggtggcccctacagaccctggccctgagtctgctgctgggcccccaacccacgaggtgctggtgacaggcactggtggcatccagtggtggccagtagaggaggaggtgaacaaggaggaggagctgagcttgccttcccgggctgcggcgctgtccttcgtgtcgctggtggacggctatttccgcctgacggccgactccagccactacctgtgccacgaggtggctcccccacggctggtgatgagcatccgggatgggatccacggacccctgctggagccatttgtgcaggccaagctgcggcccgaggacggcctgtacctcattcactggagcaccagccacccctaccg

SEQ ID NO: 196744 - DNA, 842 bp, Homo sapiens
  Payload ID: 18803
  Gene Name: tyrosine kinase 2
  ENST ID: ENST00000529739
  CDS Start-End: 456-842
cacatcatcaagtacaagggctgctgcgaggaccaaggtgggcgggacccggcgagtcctagagacttgagggggcgtggttagagcgtgggtgtggccttgtgggcggggccagtctggcctagccaattagagactctcaaccccaggctgcagtacgcggttcttggcatctgggtgagcgtggctgggctgcctccttcccatctggggggtgctacctgctggggccaggatggacgggagccaccagcagctccctcaagtgagaatggggttctggatgggtccatcccacctgagaactgggtctagtgtgcgcgggtcttggccttccctcccgaccttggaggggctctgctgggctcaaggtaggcggtccccggcccgccctctatcgtcccccaccggggccgcccctctccgcggcaggcgagaagtcgctgcagctggtcatggagtacgtgcccctgggcagcctccgagactacctgccccggcacagcatcgggctggcccagctgctgctcttcgcccagcagatctgcgagggcatggcctatctgcacgcgcagcactacatccaccgagacctagccgcgcgcaacgtgctgctggacaacgacaggctggtcaagatcggggactttggcctagccaaggccgtgcccgaaggccacgagtactaccgcgtgcgcgaggatggggacagccccgtgttctggtatgccccagagtgcctgaaggagtataagttctactatgcgtcagatgtctggtccttcggggtgaccctgtatgagctgctgacgcactgtgactccagccagagcccccccacg

SEQ ID NO: 196745 - DNA, 644 bp, Homo sapiens
  Payload ID: 18803
  Gene Name: tyrosine kinase 2
  ENST ID: ENST00000531836
  CDS Start-End: 289-644
aagcagtagctacccgcgggagcggggaggggtccgggttcgagcttgtgttcccccggaagggtgagtctggacgcgggcgcggaaggagcgcggccggaggtcctcaggaagaagccgcggggactggctgcgcttgacaggctgcacttggatgggagcacctggtgcctcgggactgctccgatgcccgatggggaaactgaggcccagaattgctaagtggcttgcttgagttgacacagggagctccaggactcaccctcagctgagccacctgccgggagcatgcctctgcgccactgggggatggccaggggcagtaagcccgttggggatggagcccagcccatggctgccatgggaggcctgaaggtgcttctgcactgggctggtccaggcggcggggagccctgggtcactttcagtgagtcatcgctgacagctgaggaagtctgcatccacattgcacataaagttggtatcactcctccttgcttcaatctctttgccctcttcgatgctcaggcccaagtctggttgcccccaaaccacatcctagagatccccagagatgcaagcctgatgctatatttccgcataaggttttatttccggaactggcatggcatgaatcctcggga

SEQ ID NO: 196746 - DNA, 720 bp, Homo sapiens
  Payload ID: 18803
  Gene Name: tyrosine kinase 2
  ENST ID: ENST00000530829
  CDS Start-End: 317-720
ggtgagtctggacgcgggcgcggaaggagcgcggccggaggtcctcaggaagaagccgcggggactggctgcgcttgacaggctgcacttggatgggagcacctggtgcctcgggactgctccgatgcccgggtctgtgctgaatgtgtaatatgcggaactatattgaaacattacaaccatcttttgatggcaacaccctgaggacctcccttttccagatggggaaactgaggcccagaattgctaagtggcttgcttgagttgacacagggagctccaggactcaccctcagctgagccacctgccgggagcatgcctctgcgccactgggggatggccaggggcagtaagcccgttggggatggagcccagcccatggctgccatgggaggcctgaaggtgcttctgcactgggctggtccaggcggcggggagccctgggtcactttcagtgagtcatcgctgacagctgaggaagtctgcatccacattgcacataaagttgtagagacggggtttcaccatgttagccaagatggtcttgatctcctgacctcgtggtctgcccacctcagcctcccaaagtgctgggattataggcgtgagccactgcgcccggccgacaggtatcactcctccttgcttcaatctctttgccctcttcgatgctcaggcccaagtctggttgcccccaaaccacatcctagagatcccca

SEQ ID NO: 196747 - DNA, 558 bp, Homo sapiens
  Payload ID: 18803
  Gene Name: tyrosine kinase 2
  ENST ID: ENST00000530560
  CDS Start-End: 1-429
tcattccgcaccatcctgcgtgacctcacccggctgcagccccacaatcttgctgacgtcttgactgtgaacccggactcaccggcgtcggaccctacggttttccacaagcgctatttgaaaaagatccgagatctgggcgagggtcacttcggcaaggtcagcttgtactgctacgatccgaccaacgacggcactggcgagatggtggcggtgaaagccctcaaggcagactgcggcccccagcaccgctcgggctggaagcaggagattgacattctgcgcacgctctaccacgagcacatcatcaagtacaagggctgctgcgaggaccaaggtctatcatctcatgaagaactgctgggagacagaggcgtcctttcgcccaaccttcgagaacctcatacccattctgaagacagtccatgagaagtaccaaggccaggccccttcagtgttcagcgtgtgctgaggcacaatggcagccctgcctgggaggactggaccaggcagtggctgcagagggagcctcctgctccctgctccaggatgaaacca

SEQ ID NO: 196748 - DNA, 628 bp, Homo sapiens
  Payload ID: 18803
  Gene Name: tyrosine kinase 2
  ENST ID: ENST00000527481
  CDS Start-End: 1-407
atctgggcgagggtcacttcggcaaggtcagcttgtactgctacgatccgaccaacgacggcactggcgagatggtggcggtgaaagccctcaaggcagactgcggcccccagcaccgctcgggctggaagcaggagattgacattctgcgcacgctctaccacgagcacatcatcaagtacaagggctgctgcgaggaccaagggcatggcctatctgcacgcgcagcactacatccaccgagacctagccgcgcgcaacgtgctgctggacaacgacaggctggtcaagatcggggactttggcctagccaaggccgtgcccgaaggccacgagtactaccgcgtgcgcgaggatggggacagccccgtgttctggtatgccccagagtgcctgaaggagtataagttctactatgcgtcagatgtctggtccttcggggtgaccctgtatgagctgctgacgcactgtgactccagccagagcccccccacgaaattccttgagctcataggcattgctcagggtcagatgacagttctgagactcactgagttgctggaacgaggggagaggctgccacggcccgacaaatgtccctgtgaggtctatcatctcatgaagaact

SEQ ID NO: 196749 - DNA, 368 bp, Homo sapiens
  Payload ID: 18803
  Gene Name: tyrosine kinase 2
  ENST ID: ENST00000525824
  CDS Start-End: 58-368
ccttcatcatacctcgggtggtgaaggtggcaagagaatttatttccaggcttggaaatgtacccagccctttggccagaaaccagcagtgcaattggctccatcctagctgcaagggaggctgggaaatgtagtcctcctgtgaggccacagcatgggcaacatacgcactgtcctctgcccaggggcaacgtgagactgaagctgcaggcccaagtctggttgcccccaaaccacatcctagagatccccagagatgcaagcctgatgctatatttccgcataaggttttatttccggaactggcatggcatgaatcctcgggaaccggctgtgtaccgttgtgggcccccaggaaccgaggcatc

SEQ ID NO: 196750 - DNA, 3882 bp, Homo sapiens
  Payload ID: 18804
  Gene Name: tyrosine kinase with immunoglobulin-like and EGF-like domains 1
  Uniprot ID: P35590
  ENST ID: ENST00000372476
  CDS Start-End: 80-3496
cacaggctgagcagtcaggcccacagcatctgaccccaggcccagctcgtcctggctggcctgggtcggcctctggagtatggtctggcgggtgccccctttcttgctccccatcctcttcttggcttctcatgtgggcgcggcggtggacctgacgctgctggccaacctgcggctcacggacccccagcgcttcttcctgacttgcgtgtctggggaggccggggcggggaggggctcggacgcctggggcccgcccctgctgctggagaaggacgaccgtatcgtgcgcaccccgcccgggccacccctgcgcctggcgcgcaacggttcgcaccaggtcacgcttcgcggcttctccaagccctcggacctcgtgggcgtcttctcctgcgtgggcggtgctggggcgcggcgcacgcgcgtcatctacgtgcacaacagccctggagcccacctgcttccagacaaggtcacacacactgtgaacaaaggtgacaccgctgtactttctgcacgtgtgcacaaggagaagcagacagacgtgatctggaagagcaacggatcctacttctacaccctggactggcatgaagcccaggatgggcggttcctgctgcagctcccaaatgtgcagccaccatcgagcggcatctacagtgccacttacctggaagccagccccctgggcagcgccttctttcggctcatcgtgcggggttgtggggctgggcgctgggggccaggctgtaccaaggagtgcccaggttgcctacatggaggtgtctgccacgaccatgacggcgaatgtgtatgcccccctggcttcactggcacccgctgtgaacaggcctgcagagagggccgttttgggcagagctgccaggagcagtgcccaggcatatcaggctgccggggcctcaccttctgcctcccagacccctatggctgctcttgtggatctggctggagaggaagccagtgccaagaagcttgtgcccctggtcattttggggctgattgccgactccagtgccagtgtcagaatggtggcacttgtgaccggttcagtggttgtgtctgcccctctgggtggcatggagtgcactgtgagaagtcagaccggatcccccagatcctcaacatggcctcagaactggagttcaacttagagacgatgccccggatcaactgtgcagctgcagggaaccccttccccgtgcggggcagcatagagctacgcaagccagacggcactgtgctcctgtccaccaaggccattgtggagccagagaagaccacagctgagttcgaggtgccccgcttggttcttgcggacagtgggttctgggagtgccgtgtgtccacatctggcggccaagacagccggcgcttcaaggtcaatgtgaaagtgccccccgtgcccctggctgcacctcggctcctgaccaagcagagccgccagcttgtggtctccccgctggtctcgttctctggggatggacccatctccactgtccgcctgcactaccggccccaggacagtaccatggactggtcgaccattgtggtggaccccagtgagaacgtgacgttaatgaacctgaggccaaagacaggatacagtgttcgtgtgcagctgagccggccaggggaaggaggagagggggcctgggggcctcccaccctcatgaccacagactgtcctgagcctttgttgcagccgtggttggagggctggcatgtggaaggcactgaccggctgcgagtgagctggtccttgcccttggtgcccgggccactggtgggcgacggtttcctgctgcgcctgtgggacgggacacgggggcaggagcggcgggagaacgtctcatccccccaggcccgcactgccctcctgacgggactcacgcctggcacccactaccagctggatgtgcagctctaccactgcaccctcctgggcccggcctcgccccctgcacacgtgcttctgccccccagtgggcctccagccccccgacacctccacgcccaggccctctcagactccgagatccagctgacatggaagcacccggaggctctgcctgggccaatatccaagtacgttgtggaggtgcaggtggctgggggtgcaggagacccactgtggatagacgtggacaggcctgaggagacaagcaccatcatccgtggcctcaacgccagcacgcgctacctcttccgcatgcgggccagcattcaggggctcggggactggagcaacacagtagaagagtccaccctgggcaacgggctgcaggctgagggcccagtccaagagagccgggcagctgaagagggcctggatcagcagctgatcctggcggtggtgggctccgtgtctgccacctgcctcaccatcctggctgcccttttaaccctggtgtgcatccgcagaagctgcctgcatcggagacgcaccttcacctaccagtcaggctcgggcgaggagaccatcctgcagttcagctcagggaccttgacacttacccggcggccaaaactgcagcccgagcccctgagctacccagtgctagagtgggaggacatcacctttgaggacctcatcggggaggggaacttcggccaggtcatccgggccatgatcaagaaggacgggctgaagatgaacgcagccatcaaaatgctgaaagagtatgcctctgaaaatgaccatcgtgactttgcgggagaactggaagttctgtgcaaattggggcatcaccccaacatcatcaacctcctgggggcctgtaagaaccgaggttacttgtatatcgctattgaatatgccccctacgggaacctgctagattttctgcggaaaagccgggtcctagagactgacccagcttttgctcgagagcatgggacagcctctacccttagctcccggcagctgctgcgtttcgccagtgatgcggccaatggcatgcagtacctgagtgagaagcagttcatccacagggacctggctgcccggaatgtgctggtcggagagaacctagcctccaagattgcagacttcggcctttctcggggagaggaggtttatgtgaagaagacgatggggcgtctccctgtgcgctggatggccattgagtccctgaactacagtgtctataccaccaagagtgatgtctggtcctttggagtccttctttgggagatagtgagccttggaggtacaccctactgtggcatgacctgtgccgagctctatgaaaagctgccccagggctaccgcatggagcagcctcgaaactgtgacgatgaagtgtacgagctgatgcgtcagtgctggcgggaccgtccctatgagcgacccccctttgcccagattgcgctacagctaggccgcatgctggaagccaggaaggcctatgtgaacatgtcgctgtttgagaacttcacttacgcgggcattgatgccacagctgaggaggcctgagctgccatccagccagaacgtggctctgctggccggagcaaactctgctgtctaacctgtgaccagtctgacccttacagcctctgacttaagctgcctcaaggaatttttttaacttaagggagaaaaaaagggatctggggatggggtgggcttaggggaactgggttcccatgctttgtaggtgtctcatagctatcctgggcatccttctttctagttcagctgccccacaggtgtgtttcccatcccactgctcccccaacacaaacccccactccagctccttcgcttaagccagcactcacaccactaacatgccctgttcagctactcccactcccggcctgtcattcagaaaaaaataaatgttctaataagctcca

SEQ ID NO: 196751 - DNA, 1140 bp, Homo sapiens
  Payload ID: 18804
  Gene Name: tyrosine kinase with immunoglobulin-like and EGF-like domains 1
  Uniprot ID: P35590
  ENST ID: ENST00000538015
  CDS Start-End: 1-1140
atggtctggcgggtgccccctttcttgctccccatcctcttcttggcttctcatgtgggcgcggcggtggacctgacgctgctggccaacctgcggctcacggacccccagcgcttcttcctgacttgcgtgtctggggaggccggggcggggaggggctcggacgcctggggcccgcccctgctgctggagaaggacgaccgtatcgtgcgcaccccgcccgggccacccctgcgcctggcgcgcaacggttcgcaccaggtcacgcttcgcggcttctccaagccctcggacctcgtgggcgtcttctcctgcgtgggcggtgctggggcgcggcgcacgcgcgtcatctacgtgcacaacagccctggagcccacctgcttccagacaaggtcacacacactgtgaacaaaggtgacaccgctgtactttctgcacgtgtgcacaaggagaagcagacagacgtgatctggaagagcaacggatcctacttctacaccctggactggcatgaagcccaggatgggcggttcctgctgcagctcccaaatgtgcagccaccatcgagcggcatctacagtgccacttacctggaagccagccccctgggcagcgccttctttcggctcatcgtgcggggttgtggggctgggcgctgggggccaggctgtaccaaggagtgcccaggttgcctacatggaggtgtctgccacgaccatgacggcgaatgtgtatgcccccctggcttcactggcacccgctgtgaacaggcctgcagagagggccgttttgggcagagctgccaggagcagtgcccaggcatatcaggctgccggggcctcaccttctgcctcccagacccctatggctgctcttgtggatctggctggagaggaagccagtgccaagaagcttgtgcccctggtcattttggggctgattgccgactccagtgccagtgtcagaatggtggcacttgtgaccggttcagtggttgtgtctgcccctctgggtggcatggagtgcactgtgagaagtcaggctggagggactgggtagatacctccactgagaaacagaacacggatgaggggcgctttggtggtcacgtgtctgcccctgtgggagctccaggatga

SEQ ID NO: 196752 - DNA, 3122 bp, Homo sapiens
  Payload ID: 18805
  Gene Name: tyrosine kinase, non-receptor, 1
  Uniprot ID: Q13470
  ENST ID: ENST00000570896
  CDS Start-End: 447-2432
aacagcttcaactgtagactctgtctaggccagggccaactctccgtaccagcatcaacatctctctgccctggccccattccagggttcattaagtaaagcctgctaggaagctctgaaccccctgccatggggcaggaactgtgtcctatttagccttatattccctgtgcgtggacaggatagctctatcgggcgcttattcatgtaagagggaactcggggtgcggccctcgccggccccgggccagcggccaggtccccgccctccgcgggatttactcctgtcccgcctcctcggatttagcccaggcagcctgggaggttccgcagtcgccgcttccgccttgaccaggtggagctggagacctggtctctctagggcctaccctgagctcaccatctgaaggagagtgccatcatccttaggaactccttctccagacatgcttcctgaggctggctccctgtggctactgaagctgctccgggacatccagttggcccagttttactggcccatccttgaggagcttaatgtcactcggccagagcacttcgactttgtaaagcctgaggacctggacggcattggcatgggccggcctgcccagcgcagactgtccgaagctctgaaaaggctacgttctgggcctaagtctaagaactgggtctacaagatccttggaggttttgcccctgagcacaaggagcccaccctgccctcggacagcccacggcacctccctgagccagaggggggcctcaagtgtctgatcccagagggtgctgtttgcagaggggagctgctgggttcaggctgcttcggtgtggtgcaccgagggctgtggacgctgcccagtggcaagagtgtcccagtggctgtcaagtccctccgggtaggtcccgaaggcccgatgggcacagaactgggggacttcctgcgagaggtatcggtcatgatgaacttggagcacccacacgtgctgcgtctgcacggccttgtactgggccagcctctgcagatggtgatggagctggcgccactgggctccctgcacgcgcgcctaacggccccggccccgacacccccgctgctcgtggccctgctctgcctcttcctgcggcagctggcgggagccatggcgtacctgggggcccgcgggctggtgcaccgagacctcgctacgcgcaacctactgctggcgtcgccgcgcaccatcaaggtggctgacttcgggctggtgcggcctctgggcggtgcccggggccgctacgtcatgggcgggccccgccctatcccctacgcctggtgtgccccagagagcctgcgccacggagccttctcgtctgcctcggacgtgtggatgtttggggtgacgctgtgggagatgttctccgggggcgaggaaccctgggccggggtcccaccgtacctcatcctgcagcggctggaggacagagcccggctgcctaggcctcccctctgctccagggccctctactccctcgccttgcgctgctgggccccccaccctgccgaccggcctagcttttcccacctggaggggctgctgcaagaggccgggccttcggaagcatgttgtgtgagggatgtcacagaaccaggcgccctgaggatggagactggtgaccccatcacagtcatcgagggcagccccgactccacaatctggaagggccagaatggtcgcaccttcaaagtgggcagcttcccagcctcggcagtgacgctggcagatgcggggggcttgccagccacccgtccagtccacagaggcacccctgcccggggagatcaacacccaggaagcatagatggagacagaaagaaggcaaatctttgggatgcgcccccagcacggggccagaggaggaacatgcccctggagaggatgaaaggcatttccaggagtctggagtcagttctgtccctcggtcctcgtcccacagggggtggttcaagcccccctgaaattcgacaagccagagctgtgccccagggacctccaggcctgcctccacgcccacctttatcctctagctctcctcagcccagccagccctctagggagaggcttccctggcccaaaagaaaacccccacacaatcaccccatgggaatgcctggagcccgtaaagccgctgccctctctggaggcctcttgtccgatcctgagttgcagaggaagattatggaggtggagctgagtgtgcatggggtcacccaccaggagtgccagacagcactaggagccactgggggagatgtggtttctgccatccggaacctcaaggtagatcagctcttccacctgagtagccggtccagagctgactgctggcgcatcctggagcattaccagtgggacctctcagctgccagccgctatgtcctggccaggccctgagctcagcttctgcgggcacagacaccagcatgaaaagcctaggcccctgagggcctggccacatgggaccaagcggaaccagaacaaggtcccgacaggggtagacgttccacctggggagatcccacctgccgtaggcacatggaggaggagcccagagttgggcactggcaaatgtctcctccctcccatgctccttggcttctgaaggctgaagctcctttggctgggccaagaaggatctagtctgcccactacattctcaaacaagaggacttggaagaaaagagctgctatacatcatatgcagaggaagcttctacgcgctagagaggatcaaggggccacactggaccatgtgaacagccatcctgaactgccatcagctaccacactggactctgcagggcagccatcctggatgatggaagccaccatattgacttggggtataggcccaaactgccttcgtttggtccagggccatcgtgggtgatgacgattgctctcttgcactcaaggacatttgatgctggtagtatggattatgagatggactagcccctgccccagcccagctctcacattcccctttgttttttcccataccaactgcttctaccctcccctattacatacatctttcaatgtccaaaaagttacaaagtttatatgaatgtaacatataaa

SEQ ID NO: 196753 - DNA, 3023 bp, Homo sapiens
  Payload ID: 18805
  Gene Name: tyrosine kinase, non-receptor, 1
  Uniprot ID: Q13470
  ENST ID: ENST00000576812
  CDS Start-End: 370-2370
attcggagaaggctggaaagacgtgaaggaagacgagcagaggagaagggaagggggcttctcacagtcggggcgatctggtctggaggagggaggggccgccagtcgccctggggaccgtcaccttgtcccactagggaactcggggtgcggccctcgccggccccgggccagcggccaggtccccgccctccgcgggatttactcctgtcccgcctcctcggatttagcccaggcagcctgggaggttccgcagtcgccgcttccgccttgaccaggtggagctggagacctggtctctctagggcctaccctgagctcaccatctgaaggagagtgccatcatccttaggaactccttctccagacatgcttcctgaggctggctccctgtggctactgaagctgctccgggacatccagttggcccagttttactggcccatccttgaggagcttaatgtcactcggccagagcacttcgactttgtaaagcctgaggacctggacggcattggcatgggccggcctgcccagcgcagactgtccgaagctctgaaaaggctacgttctgggcctaagtctaagaactgggtctacaagatccttggaggttttgcccctgagcacaaggagcccaccctgccctcggacagcccacggcacctccctgagccagaggggggcctcaagtgtctgatcccagagggtgctgtttgcagaggggagctgctgggttcaggctgcttcggtgtggtgcaccgagggctgtggacgctgcccagtggcaagagtgtcccagtggctgtcaagtccctccgggtaggtcccgaaggcccgatgggcacagaactgggggacttcctgcgagaggtatcggtcatgatgaacttggagcacccacacgtgctgcgtctgcacggccttgtactgggccagcctctgcagatggtgatggagctggcgccactgggctccctgcacgcgcgcctaacggccccggccccgacacccccgctgctcgtggccctgctctgcctcttcctgcggcagctggcgggagccatggcgtacctgggggcccgcgggctggtgcaccgagacctcgctacgcgcaacctactgctggcgtcgccgcgcaccatcaaggtggctgacttcgggctggtgcggcctctgggcggtgcccggggccgctacgtcatgggcgggccccgccctatcccctacgcctggtgtgccccagagagcctgcgccacggagccttctcgtctgcctcggacgtgtggatgtttggggtgacgctgtgggagatgttctccgggggcgaggaaccctgggccggggtcccaccgtacctcatcctgcagcggctggaggacagagcccggctgcctaggcctcccctctgctccagggccctctactccctcgccttgcgctgctgggccccccaccctgccgaccggcctagcttttcccacctggaggggctgctgcaagaggccgggccttcggaagcatgttgtgtgagggatgtcacagaaccaggcgccctgaggatggagactggtgaccccatcacagtcatcgagggcagctcctctttccacagccccgactccacaatctggaagggccagaatggtcgcaccttcaaagtgggcagcttcccagcctcggcagtgacgctggcagatgcggggggcttgccagccacccgtccagtccacagaggcacccctgcccggggagatcaacacccaggaagcatagatggagacagaaagaaggcaaatctttgggatgcgcccccagcacggggccagaggaggaacatgcccctggagaggatgaaaggcatttccaggagtctggagtcagttctgtccctcggtcctcgtcccacagggggtggttcaagcccccctgaaattcgacaagccagagctgtgccccagggacctccaggcctgcctccacgcccacctttatcctctagctctcctcagcccagccagccctctagggagaggcttccctggcccaaaagaaaacccccacacaatcaccccatgggaatgcctggagcccgtaaagccgctgccctctctggaggcctcttgtccgatcctgagttgcagaggaagattatggaggtggagctgagtgtgcatggggtcacccaccaggagtgccagacagcactaggagccactgggggagatgtggtttctgccatccggaacctcaaggtagatcagctcttccacctgagtagccggtccagagctgactgctggcgcatcctggagcattaccagtgggacctctcagctgccagccgctatgtcctggccaggccctgagctcagcttctgcgggcacagacaccagcatgaaaagcctaggcccctgagggcctggccacatgggaccaagcggaaccagaacaaggtcccgacaggggtagacgttccacctggggagatcccacctgccgtaggcacatggaggaggagcccagagttgggcactggcaaatgtctcctccctcccatgctccttggcttctgaaggctgaagctcctttggctgggccaagaaggatctagtctgcccactacattctcaaacaagaggacttggaagaaaagagctgctatacatcatatgcagaggaagcttctacgcgctagagaggatcaaggggccacactggaccatgtgaacagccatcctgaactgccatcagctaccacactggactctgcagggcagccatcctggatgatggaagccaccatattgacttggggtataggcccaaactgccttcgtttggtccagggccatcgtgggtgatgacgattgctctcttgcactcaaggacatttgatgctggtagtatggattatgagatggactagcccctgccccagcccagctctcacattcccctttgttttttcccataccaactgcttctaccctcccctattacatacatctttcaatgtcc

SEQ ID NO: 196754 - DNA, 253 bp, Homo sapiens
  Payload ID: 18805
  Gene Name: tyrosine kinase, non-receptor, 1
  ENST ID: ENST00000576716
  CDS Start-End: 1-253
acacccaggaagcatagatggagacagaaagaaggcaaatctttgggatgcgcccccagcacggggccagaggaggaacatgcccctggagaggatgaaagctctcctcagcccagccagccctctagggagaggcttccctggcccaaaagaaaacccccacacaatcaccccatgggaatgcctggagcccgtaaagccgctgccctctctggaggcctcttgtccgatcctgagttgcagaggaagatta

SEQ ID NO: 196755 - DNA, 463 bp, Homo sapiens
  Payload ID: 18805
  Gene Name: tyrosine kinase, non-receptor, 1
  ENST ID: ENST00000577009
  CDS Start-End: 1-11
acgcctggtgagagcgggtccgcgggcggtcgggctctgagccgggcggatccggagggcagcagccgagggagatcggagggggccgggcttctgagggaggcttggaccagaagggttatcctcctaggtgtgccccagagagcctgcgccacggagccttctcgtctgcctcggacgtgtggatgtttggggtgacgctgtgggagatgttctccgggggcgaggaaccctgggccggggtcccaccgtacctcatcctgcagcggctggaggacagagcccggctgcctaggcctcccctctgctccagggccctctactccctcgccttgcgctgctgggccccccaccctgccgaccggcctagcttttcccacctggaggggctgctgcaagaggccgggccttcggaagcatgttgtgtgagggatgtcacagaaccaggcgccctgaggatgga

SEQ ID NO: 196756 - DNA, 573 bp, Homo sapiens
  Payload ID: 18805
  Gene Name: tyrosine kinase, non-receptor, 1
  ENST ID: ENST00000576207
  CDS Start-End: 116-349
agtcgccgcttccgccttgaccaggtggagctggagacctggtctctctagggcctaccctgagctcaccatctgaaggagagtgccatcatccttaggaactccttctccagacatgcttcctgaggctggctccctgtggctactgaagctgctccgggacatccagttggcccagttttactggcccatccttgaggagcttaatgtcactcggccagagcacttcgactttgtaaagcctgaggacctggacggcattggcatgggccggcctgccctgattctggcctcccacagcccagcgcagactgtccgaagctctgaaaaggctacgttctgggcctaagtctaagaactgggtctacaagatccttggaggttttgcccctgagcacaaggagcccaccctgccctcggacagcccacggcacctccctgagccagaggggggcctcaagtgtctgatcccagagggtgctgtttgcagaggggagctgctgggttcaggctgcttcggtgtggtgcaccgagggctgtggacgctgcccagtggcaagagtgtcccagtgg

SEQ ID NO: 196757 - DNA, 4552 bp, Homo sapiens
  Payload ID: 18806
  Gene Name: tyrosine kinase, non-receptor, 2
  Uniprot ID: Q07912
  ENST ID: ENST00000333602
  CDS Start-End: 619-3735
gggagcccgcggaggctgctgcagcagcccgaaccggcgtccgagtccggggaaggcccccgcgagcgcagggaggggccggaaagttccggcgaactgggggagcggcagtgggagagcgtcgggcgggaggcggtggtcctgggagcggccccggcgccccgaagccgccccgagctggtggggagggcccggccggtggggccccgggggcctgcgggggaggggcgcctgggggtgcaagaggcgaattggctgcccggggtgcaggagggacaggtggtgcgggctgtccaggaaacctacctgaacgggaaggagccccaggagggagagggacccggcgaggggctcaggacccggaggcgccggcggaggaggaggtggtgactggcaggcccgggccccacggtacctccggggctgaaggggacgcaggatgtaggggcatggggagtcgggcgcagaagagtgcggggaaccgctgagctctgggagccactgcctgagggcaggccgcggccggcgggaacctcttctgccgtctcagcctgggcgtcgctgaagctgtgtctgcggggaggcagcggaaggcggcagaggctgggaggcggcagaatgcagccagaggagggcacaggctggctgctggagctgctgtccgaggtgcagctgcaacagtacttcctgcggctccgagatgacctcaacgtcacccgcctgtcccactttgagtacgtcaagaatgaggacctggagaagatcggcatgggtcggcctggccagcggcggctgtgggaggctgtgaagaggaggaaggccttgtgcaaacgcaagtcgtggatgagtaaggtgttcagtggaaagcgactggaggctgagttcccacctcatcactctcagagcaccttccggaagacctcgcccgcccctgggggcccagcaggggaggggcccctgcagagcctcacctgcctcattggggagaaggacctgcgcctcctggagaagctgggtgatggttcctttggcgtggtgcgcaggggcgagtgggacgcgccctcagggaagacggtgagtgtggctgtgaagtgcctgaagcccgatgtcctgagccagccagaagccatggacgacttcatccgggaggtcaatgccatgcactcgctcgaccaccgaaacctcatccgcctctacggggtggtgctcacgccgcccatgaagatggtgacagagctggcacctctgggatcgttgttggaccggctacgtaagcaccagggccacttcctcctggggactctgagccgctacgctgtgcaggtggctgagggcatgggctacctggagtccaagcgctttattcaccgtgacctggctgcccgcaatctgctgttggctacccgcgacctggtcaagatcggggactttgggctgatgcgagcactacctcagaatgacgaccattacgtcatgcaggaacatcgcaaggtgcccttcgcctggtgtgcccccgagagcctgaagacacgcaccttctcccatgccagcgacacctggatgttcggggtgacactgtgggaaatgttcacctacggccaggagccctggatcggcctcaacggcagtcagatcctgcataagatcgacaaggagggggagcggctgccccggcccgaggactgtccccaggacatctacaacgtcatggtccagtgctgggctcacaagccagaggacagacccacgtttgtggccctgcgggacttcctgctggaggcccagcccacagacatgcgggcccttcaggactttgaggaaccggacaagctgcacatccagatgaatgatgtcatcaccgtcatcgagggaagggccgagaactactggtggcgtggccagaacacacggacgctgtgtgtggggcccttccctcgcaacgtggtgacctccgtggccggcctgtcggcccaggacatcagccagcccctgcagaacagcttcatccacacagggcatggcgacagtgacccccgccactgctggggcttcccggacaggattgacgaactgtatctgggaaaccccatggacccccccgacctcctgagcgtggaactgagcacctcccggcccccccagcatctaggaggggtgaaaaaaccaacctatgaccctgtgagcgaggaccaagaccccttgtccagcgacttcaagaggctgggcctgcggaagccaggcctgccccgagggctgtggctggcgaagccctcggcgcgggtgccgggcaccaaggccagccgaggcagcggggctgaggtcacgctcatcgacttcggtgaggagcccgtggtcccggccctacggccctgcgcgccctccctggcgcagctggccatggacgcctgctccctgctggacgagaccccgcctcagagccccacgcgggcactgccccggcccctgcaccccacgcctgtggtggactgggacgcacgcccgctgccccccccgcccgcctatgacgacgtggcccaggatgaggatgactttgagatctgctccatcaacagcaccctcgtgggcgcgggggtccctgccgggcccagccagggccagaccaactacgcctttgtgcctgagcaggcgcggccgccccctcccctggaggacaacctgttcctcccgccccagggtgggggcaagccgcccagctccgcacagaccgcagagatcttccaggcgctacagcaggagtgcatgaggcaactgcaggctccggccggctccccggccccctctcccagcccggggggtgacgacaagccccaggtgcctcctcgggtacccatcccccctcggcccacgcgcccacacgtccagctgtctccagcccccccgggcgaggaggagaccagccagtggcctggacctgcttcccctccccgggtgcctccgcgggagcccctgtcccctcaaggctcgaggacacccagccccctggtaccacctggcagctccccgctgccaccccggctctcaagctcacctgggaagaccatgcccaccacccagagctttgcctcagaccccaagtacgccaccccccaggtgatccaggcccctggcccgcgggctggtccctgcatcctgcccatcgtccgggatggcaagaaggtcagcagcacccactattacttgctgcccgagcgaccatcctacctggagcgctaccagcgcttcctgcgtgaggcccagagccccgaggagcctacccccctgcctgtgcctctgctgctgcccccacccagcaccccagcccccgccgcccccacggccaccgtgcggccgatgccccaggctgccttggaccccaaggccaacttctccaccaacaacagcaacccaggggcccggccaccacccccgagggccactgctcggctgccacagaggggctgccctggcgatgggccagaggcgggccggccagcagacaagatccagatggccatggtgcatggggtgaccacagaggagtgccaggcggccctgcagtgccacggctggagcgtgcagagggctgcccagtatctgaaggtggagcagctcttcgggctgggtctgcggcccagaggggagtgccacaaagtgctggagatgttcgactggaacctggagcaggccggctgccaccttctgggctcctggggccctgcccaccacaagcgctgagatgcgtctggagagccagagggcctgcctgaaggaatcacctgagcctgtccgtccaccaggagtggggagatgcccccatccagtcctggaggacccgctgctcctgctgctcccggggatggagcaaggccaaggctgcgggaggctgggagccctgccctgcccatccctcctgcaccagcgctgtccctgcacactttggttcagtcccggtgcccctgccaagatgtggaaggggccgggtgaagacaggcttgagggctgccccagcaggctctgggtatgacctgcctctggccctggtcctgggcggggcctgtgggtggagtagtacccccaggccctgccctgggtgacagactgggaggaaaccaggctggacctgggcaggcgggatgtgttggccacagggagaggcggaccggcacccggtgggacctcctaggactgggccttcttccagggggcccctggcagcagctggggtgtcgggcagaatgtgacttgtggccttaccatggacttgaatgggacttggctggcctcaggatcttgtgcctggaaatagcctgaggtggctcaggaagcggagaaagggtgccagaccattctctggcggggaccagggcccaaggccccagggctggaaggagaccaaggggcagccgccctggagggacatcagtgcttcctcttccacccaattcccccacgcggttccatgttttcccaccagcctgttggcgaagttgctgctccggcattcagtacctgcttcttccagagaaataaagttagtttctattttatgtta

SEQ ID NO: 196758 - DNA, 4223 bp, Homo sapiens
  Payload ID: 18806
  Gene Name: tyrosine kinase, non-receptor, 2
  Uniprot ID: Q07912
  ENST ID: ENST00000381916
  CDS Start-End: 146-3406
ggagaggaggaacggagctgggacgggctgcaggagggaatggccgcaggccggcaggaggaggggcgcgaccacccggccgccggccgatggcggatgaggctatgggggctgagacgcagtagcggccctgcacttctggaggatgctcgaggcccggccccccaggacgcagggcagtgacgctgccggtgccgctgcggggcgggggctgcgggcgctgcttctctccctgaccgcagccgctgggatttggggctccatgggggagagatctgcttaccagcgcctggctgggggcgaggagggaccgcagaggctgggaggcggcagaatgcagccagaggagggcacaggctggctgctggagctgctgtccgaggtgcagctgcaacagtacttcctgcggctccgagatgacctcaacgtcacccgcctgtcccactttgagtacgtcaagaatgaggacctggagaagatcggcatgggtcggcctggccagcggcggctgtgggaggctgtgaagaggaggaaggccttgtgcaaacgcaagtcgtggatgagtaaggtgttcagtggaaagcgactggaggctgagttcccacctcatcactctcagagcaccttccggaagacctcgcccgcccctgggggcccagcaggggaggggcccctgcagagcctcacctgcctcattggggagaaggacctgcgcctcctggagaagctgggtgatggttcctttggcgtggtgcgcaggggcgagtgggacgcgccctcagggaagacggtgagtgtggctgtgaagtgcctgaagcccgatgtcctgagccagccagaagccatggacgacttcatccgggaggtcaatgccatgcactcgctcgaccaccgaaacctcatccgcctctacggggtggtgctcacgccgcccatgaagatggtgacagagctggcacctctgggatcgttgttggaccggctacgtaagcaccagggccacttcctcctggggactctgagccgctacgctgtgcaggtggctgagggcatgggctacctggagtccaagcgctttattcaccgtgacctggctgcccgcaatctgctgttggctacccgcgacctggtcaagatcggggactttgggctgatgcgagcactacctcagaatgacgaccattacgtcatgcaggaacatcgcaaggtgcccttcgcctggtgtgcccccgagagcctgaagacacgcaccttctcccatgccagcgacacctggatgttcggggtgacactgtgggaaatgttcacctacggccaggagccctggatcggcctcaacggcagtcagatcctgcataagatcgacaaggagggggagcggctgccccggcccgaggactgtccccaggacatctacaacgtcatggtccagtgctgggctcacaagccagaggacagacccacgtttgtggccctgcgggacttcctgctggaggcccagcccacagacatgcgggcccttcaggactttgaggaaccggacaagctgcacatccagatgaatgatgtcatcaccgtcatcgagggaagggccgagaactactggtggcgtggccagaacacacggacgctgtgtgtggggcccttccctcgcaacgtggtgacctccgtggccggcctgtcggcccaggacatcagccagcccctgcagaacagcttcatccacacagggcatggcgacagtgacccccgccactgctggggcttcccggacaggattgacgaactgtatctgggaaaccccatggacccccccgacctcctgagcgtggaactgagcacctcccggcccccccagcatctaggaggggtgaaaagggagcctccacctcgcccacctcagcctgccttcttcactcagaaaccaacctatgaccctgtgagcgaggaccaagaccccttgtccagcgacttcaagaggctgggcctgcggaagccaggcctgccccgagggctgtggctggcgaagccctcggcgcgggtgccgggcaccaaggccagccgaggcagcggggctgaggtcacgctcatcgacttcggtgaggagcccgtggtcccggccctacggccctgcgcgccctccctggcgcagctggccatggacgcctgctccctgctggacgagaccccgcctcagagccccacgcgggcactgccccggcccctgcaccccacgcctgtggtggactgggacgcacgcccgctgccccccccgcccgcctatgacgacgtggcccaggatgaggatgactttgagatctgctccatcaacagcaccctcgtgggcgcgggggtccctgccgggcccagccagggccagaccaactacgcctttgtgcctgagcaggcgcggccgccccctcccctggaggacaacctgttcctcccgccccagggtgggggcaagccgcccagctccgcacagaccgcagagatcttccaggcgctacagcaggagtgcatgaggcaactgcaggctccggccggctccccggccccctctcccagcccggggggtgacgacaagccccaggtgcctcctcgggtacccatcccccctcggcccacgcgcccacacgtccagctgtctccagcccccccgggcgaggaggagaccagccagtggcctggacctgcttcccctccccgggtgcctccgcgggagcccctgtcccctcaaggctcgaggacacccagccccctggtaccacctggcagctccccgctgccaccccggctctcaagctcacctgggaagaccatgcccaccacccagagctttgcctcagaccccaagtacgccaccccccaggtgatccaggcccctggcccgcgggctggtccctgcatcctgcccatcgtccgggatggcaagaaggtcagcagcacccactattacttgctgcccgagcgaccatcctacctggagcgctaccagcgcttcctgcgtgaggcccagagccccgaggagcctacccccctgcctgtgcctctgctgctgcccccacccagcaccccagcccccgccgcccccacggccaccgtgcggccgatgccccaggctgccttggaccccaaggccaacttctccaccaacaacagcaacccaggggcccggccaccacccccgagggccactgctcggctgccacagaggggctgccctggcgatgggccagaggcgggccggccagcagacaagatccagatggtggagcagctcttcgggctgggtctgcggcccagaggggagtgccacaaagtgctggagatgttcgactggaacctggagcaggccggctgccaccttctgggctcctggggccctgcccaccacaagcgctgagatgcgtctggagagccagagggcctgcctgaaggaatcacctgagcctgtccgtccaccaggagtggggagatgcccccatccagtcctggaggacccgctgctcctgctgctcccggggatggagcaaggccaaggctgcgggaggctgggagccctgccctgcccatccctcctgcaccagcgctgtccctgcacactttggttcagtcccggtgcccctgccaagatgtggaaggggccgggtgaagacaggcttgagggctgccccagcaggctctgggtatgacctgcctctggccctggtcctgggcggggcctgtgggtggagtagtacccccaggccctgccctgggtgacagactgggaggaaaccaggctggacctgggcaggcgggatgtgttggccacagggagaggcggaccggcacccggtgggacctcctaggactgggccttcttccagggggcccctggcagcagctggggtgtcgggcagaatgtgacttgtggccttaccatggacttgaatgggacttggctggcctcaggatcttgtgcctggaaatagcctgaggtggctcaggaagcggagaaagggtgccagaccattctctggcggggaccagggcccaaggccccagggctggaaggagaccaaggggcagccgccctggagggacatcagtgcttcctcttccacccaattcccccacgcggttccatgttttcccaccagcctgttggcgaagttgctgctccggcattcagtacctgcttcttccagagaaataaagttagtttctattttatgtta

SEQ ID NO: 196759 - DNA, 541 bp, Homo sapiens
  Payload ID: 18806
  Gene Name: tyrosine kinase, non-receptor, 2
  ENST ID: ENST00000427576
  CDS Start-End: 113-541
gagggggtgtacacgtggggtggattctcgaactcctagagggaaggtgccctgagctcagccctaaatacctggtactaaagagtcagtggctgcttcagatgccaccagaatgagaagcggtgccttggggccccgggggagaggaagagcctctgccctgggacttcctgtgccggcgatggcctcgcgccagtgctgggcgcggcacccccgcgtgggcctgtgttgggcggcttttgagcaggagtccgggccctcgtgtcaccgctctgaagtcaaggagaggctgggaggcggcagaatgcagccagaggagggcacaggctggctgctggagctgctgtccgaggtgcagctgcaacagtacttcctgcggctccgagatgacctcaacgtcacccgcctgtcccactttgagtacgtcaagaatgaggacctggagaagatcggcatgggtcggcctggccagcggcggctgtgggaggctgtgaagaggaggaaggccttgtgcaaacgcaagtcgtggatgagtaaggtg

SEQ ID NO: 196760 - DNA, 726 bp, Homo sapiens
  Payload ID: 18806
  Gene Name: tyrosine kinase, non-receptor, 2
  ENST ID: ENST00000424563
  CDS Start-End: 1-726
ggctctgggggctccttccccctgggccaccagccctggcttggaaccacagcacctgccctccgtgcctggagctgctcaggagggccgagaactactggtggcgtggccagaacacacggacgctgtgtgtggggcccttccctcgcaacgtggtgacctccgtggccggcctgtcggcccaggacatcagccagcccctgcagaacagcttcatccacacagggcatggcgacagtgacccccgccactgctggggcttcccggacaggattgacgaactgtatctgggaaaccccatggacccccccgacctcctgagcgtggaactgagcacctcccggcccccccagcatctaggaggggtgaaaaaaccaacctatgaccctgtgagcgaggaccaagaccccttgtccagcgacttcaagaggctgggcctgcggaagccaggcctgccccgagggctgtggctggcgaagccctcggcgcgggtgccgggcaccaaggccagccgaggcagcggggctgaggtcacgctcatcgacttcggtgaggagcccgtggtcccggccctacggccctgcgcgccctccctggcgcagctggccatggacgcctgctccctgctggacgagaccccgcctcagagccccacgcgggcactgccccggcccctgcaccccacgcctgtggtggactgggacgcacgcccgctgccccccccgc

SEQ ID NO: 196761 - DNA, 870 bp, Homo sapiens
  Payload ID: 18806
  Gene Name: tyrosine kinase, non-receptor, 2
  ENST ID: ENST00000438207
  CDS Start-End: 1-870
agccagaggagggcacaggctggctgctggagctgctgtccgaggtgcagctgcaacagtacttcctgcggctccgagatgacctcaacgtcacccgcctgtcccactttgagtacgtcaagaatgaggacctggagaagatcggcatgggtcggcctggccagcggcggctgtgggaggctgtgaagaggaggaaggccttgtgcaaacgcaagtcgtggatgagtaaggtgagtgtggctgtgaagtgcctgaagcccgatgtcctgagccagccagaagccatggacgacttcatccgggaggtcaatgccatgcactcgctcgaccaccgaaacctcatccgcctctacggggtggtgctcacgccgcccatgaagatggtgacagagctggcacctctgggatcgttgttggaccggctacgtaagcaccagggccacttcctcctggggactctgagccgctacgctgtgcaggtggctgagggcatgggctacctggagtccaagcgctttattcaccgtgacctggctgcccgcaatctgctgttggctacccgcgacctggtcaagatcggggactttgggctgatgcgagcactacctcagaatgacgaccattacgtcatgcaggaacatcgcaaggtgcccttcgcctggtgtgcccccgagagcctgaagacacgcaccttctcccatgccagcgacacctggatgttcggggtgacactgtgggaaatgttcacctacggccaggagccctggatcggcctcaacggcagtcagatcctgcataagatcgacaaggagggggagcggctgccccggcccgaggactgtccccaggacatctacaacgtcatggtcc

SEQ ID NO: 196762 - DNA, 4235 bp, Homo sapiens
  Payload ID: 18806
  Gene Name: tyrosine kinase, non-receptor, 2
  ENST ID: ENST00000428187
  CDS Start-End: 297-3419
gttgggtggggaagccggggagtagggctggactgtgaccactgccctggagagaagacagaaacaggacagaggatcccggctgcagccagcgtgaggaaagctctgctccctgccagaccggccagctgtggaaacccagcggggcttgcagcagagcggaggggcccaccccgttcttcctcatttcccacccctggtgtgggatttggggggctcctgggcagagtgcgaagctccggagccgaggccactggatccccagtgactgctcgggggggtcccgctgcgtggagatgccggcagcacgtcggttccctggcctggagctctccttccctctcctggccagactgcggcgacgcctgtacacaaggctgggaggcggcagaatgcagccagaggagggcacaggctggctgctggagctgctgtccgaggtgcagctgcaacagtacttcctgcggctccgagatgacctcaacgtcacccgcctgtcccactttgagtacgtcaagaatgaggacctggagaagatcggcatgggtcggcctggccagcggcggctgtgggaggctgtgaagaggaggaaggccttgtgcaaacgcaagtcgtggatgagtaaggtgttcagtggaaagcgactggaggctgagttcccacctcatcactctcagagcaccttccggaagacctcgcccgcccctgggggcccagcaggggaggggcccctgcagagcctcacctgcctcattggggagaaggacctgcgcctcctggagaagctgggtgatggttcctttggcgtggtgcgcaggggcgagtgggacgcgccctcagggaagacggtgagtgtggctgtgaagtgcctgaagcccgatgtcctgagccagccagaagccatggacgacttcatccgggaggtcaatgccatgcactcgctcgaccaccgaaacctcatccgcctctacggggtggtgctcacgccgcccatgaagatggtgacagagctggcacctctgggatcgttgttggaccggctacgtaagcaccagggccacttcctcctggggactctgagccgctacgctgtgcaggtggctgagggcatgggctacctggagtccaagcgctttattcaccgtgacctggctgcccgcaatctgctgttggctacccgcgacctggtcaagatcggggactttgggctgatgcgagcactacctcagaatgacgaccattacgtcatgcaggaacatcgcaaggtgcccttcgcctggtgtgcccccgagagcctgaagacacgcaccttctcccatgccagcgacacctggatgttcggggtgacactgtgggaaatgttcacctacggccaggagccctggatcggcctcaacggcagtcagatcctgcataagatcgacaaggagggggagcggctgccccggcccgaggactgtccccaggacatctacaacgtcatggtccagtgctgggctcacaagccagaggacagacccacgtttgtggccctgcgggacttcctgctggaggcccagcccacagacatgcgggcccttcaggactttgaggaaccggacaagctgcacatccagatgaatgatgtcatcaccgtcatcgagggaagggccgagaactactggtggcgtggccagaacacacggacgctgtgtgtggggcccttccctcgcaacgtggtgacctccgtggccggcctgtcggcccaggacatcagccagcccctgcagaacagcttcatccacacagggcatggcgacagtgacccccgccactgctggggcttcccggacaggattgacgaactgtatctgggaaaccccatggacccccccgacctcctgagcgtggaactgagcacctcccggcccccccagcatctaggaggggtgaaaaaaccaacctatgaccctgtgagcgaggaccaagaccccttgtccagcgacttcaagaggctgggcctgcggaagccaggcctgccccgagggctgtggctggcgaagccctcggcgcgggtgccgggcaccaaggccagccgaggcagcggggctgaggtcacgctcatcgacttcggtgaggagcccgtggtcccggccctacggccctgcgcgccctccctggcgcagctggccatggacgcctgctccctgctggacgagaccccgcctcagagccccacgcgggcactgccccggcccctgcaccccacgcctgtggtggactgggacgcacgcccgctgccccccccgcccgcctatgacgacgtggcccaggatgaggatgactttgagatctgctccatcaacagcaccctcgtgggcgcgggggtccctgccgggcccagccagggccagaccaactacgcctttgtgcctgagcaggcgcggccgccccctcccctggaggacaacctgttcctcccgccccagggtgggggcaagccgcccagctccgcacagaccgcagagatcttccaggcgctacagcaggagtgcatgaggcaactgcaggctccggccggctccccggccccctctcccagcccggggggtgacgacaagccccaggtgcctcctcgggtacccatcccccctcggcccacgcgcccacacgtccagctgtctccagcccccccgggcgaggaggagaccagccagtggcctggacctgcttcccctccccgggtgcctccgcgggagcccctgtcccctcaaggctcgaggacacccagccccctggtaccacctggcagctccccgctgccaccccggctctcaagctcacctgggaagaccatgcccaccacccagagctttgcctcagaccccaagtacgccaccccccaggtgatccaggcccctggcccgcgggctggtccctgcatcctgcccatcgtccgggatggcaagaaggtcagcagcacccactattacttgctgcccgagcgaccatcctacctggagcgctaccagcgcttcctgcgtgaggcccagagccccgaggagcctacccccctgcctgtgcctctgctgctgcccccacccagcaccccagcccccgccgcccccacggccaccgtgcggccgatgccccaggctgccttggaccccaaggccaacttctccaccaacaacagcaacccaggggcccggccaccacccccgagggccactgctcggctgccacagaggggctgccctggcgatgggccagaggcgggccggccagcagacaagatccagatggtggagcagctcttcgggctgggtctgcggcccagaggggagtgccacaaagtgctggagatgttcgactggaacctggagcaggccggctgccaccttctgggctcctggggccctgcccaccacaagcgctgagatgcgtctggagagccagagggcctgcctgaaggaatcacctgagcctgtccgtccaccaggagtggggagatgcccccatccagtcctggaggacccgctgctcctgctgctcccggggatggagcaaggccaaggctgcgggaggctgggagccctgccctgcccatccctcctgcaccagcgctgtccctgcacactttggttcagtcccggtgcccctgccaagatgtggaaggggccgggtgaagacaggcttgagggctgccccagcaggctctgggtatgacctgcctctggccctggtcctgggcggggcctgtgggtggagtagtacccccaggccctgccctgggtgacagactgggaggaaaccaggctggacctgggcaggcgggatgtgttggccacagggagaggcggaccggcacccggtgggacctcctaggactgggccttcttccagggggcccctggcagcagctggggtgtcgggcagaatgtgacttgtggccttaccatggacttgaatgggacttggctggcctcaggatcttgtgcctggaaatagcctgaggtggctcaggaagcggagaaagggtgccagaccattctctggcggggaccagggcccaaggccccagggctggaaggagaccaaggggcagccgccctggagggacatcagtgcttcctcttccacccaattcccccacgcggttccatgttttcccaccagcctgttggcgaagttgctgctccggcattcagtacctgcttcttccagagaaataaagttagtttctattttatgtt

SEQ ID NO: 196763 - DNA, 763 bp, Homo sapiens
  Payload ID: 18806
  Gene Name: tyrosine kinase, non-receptor, 2
  ENST ID: ENST00000447060
  CDS Start-End: 210-470
tcatttcccacccctggtgtgggatttggggggctcctgggcagagtgcgaagctccggagccgaggccactggatccccagtgactgctcgggggggtcccgctgcgtggagatgccggcagcacgtcggttccctggcctggagctctccttccctctcctggccagactgcggcgacgcctgtacacaaggctgggaggcggcagaatgcagccagaggagggcacaggctggctgctggagctgctgtccgaggtgcagctgcaacagtacttcctgcggctccgagatgacctcaacgtcacccgcctgtcccactttgagtacgtcaagaatgaggacctggagaagatcggcatgggtcggcctggccagcggcggctgtgggaggctgtgaagaggaggaaggccttgtgcaaacgcaagtcgtggatgagtaaggatgaagggcagccgactccctggtgagggtggagacagacagcaccaaatggtcaggccagagaaggggccagggctaaaaatggacaaggaggtgtctgtggagggcccctgcggctccatcgatgcgggtgttcagtggaaagcgactggaggctgagttcccacctcatcactctcagagcaccttccggaagacctcgcccgcccctgggggcccagcaggggaggggcccctgcagagcctcacctgcctcattggggagaaggacctgcgcctcctggagaagctgggtgatggttcctttggcgtggtgcgc

SEQ ID NO: 196764 - DNA, 580 bp, Homo sapiens
  Payload ID: 18806
  Gene Name: tyrosine kinase, non-receptor, 2
  ENST ID: ENST00000433111
  CDS Start-End: 288-580
gtcgggctgttttcctgggcgaggagaaagggggccgggccgggccgggcgcggtggctcacgcctgtcatctcagcactttgggaggccgaggcgggcagatcacctgagacgaggacgctgagctggattactgggccagttacaggtcttgttcttactggacatccaagcatcccggagttccttcccgtcctcccacatgcatcccctgtgcagagctgcgctgttgctgggtcagggagcatggagtgcacagctgaacagagaggctgggaggcggcagaatgcagccagaggagggcacaggctggctgctggagctgctgtccgaggtgcagctgcaacagtacttcctgcggctccgagatgacctcaacgtcacccgcctgtcccactttgagtacgtcaagaatgaggacctggagaagatcggcatgggtcggcctggccagcggcggctgtgggaggctgtgaagaggaggaaggccttgtgcaaacgcaagtcgtggatgagtaaggtgttcagtggaaagcgactggaggctgagttcccacctcatcactctcagagcacctt

SEQ ID NO: 196765 - DNA, 2331 bp, Homo sapiens
  Payload ID: 18806
  Gene Name: tyrosine kinase, non-receptor, 2
  Uniprot ID: Q07912
  ENST ID: ENST00000439230
  CDS Start-End: 58-1644
cgcggagccggctgagcgcagggccgagctgcggggcagaggctgggaggcggcagaatgcagccagaggagggcacaggctggctgctggagctgctgtccgaggtgcagctgcaacagtacttcctgcggctccgagatgacctcaacgtcacccgcctgtcccactttgagtacgtcaagaatgaggacctggagaagatcggcatgggtcggcctggccagcggcggctgtgggaggctgtgaagaggaggaaggccttgtgcaaacgcaagtcgtggatgagtaaggtgttcagtggaaagcgactggaggctgagttcccacctcatcactctcagagcaccttccggaagacctcgcccgcccctgggggcccagcaggggaggggcccctgcagagcctcacctgcctcattggggagaaggacctgcgcctcctggagaagctgggtgatggttcctttggcgtggtgcgcaggggcgagtgggacgcgccctcagggaagacggtgagtgtggctgtgaagtgcctgaagcccgatgtcctgagccagccagaagccatggacgacttcatccgggaggtcaatgccatgcactcgctcgaccaccgaaacctcatccgcctctacggggtggtgctcacgccgcccatgaagatggtgacagagctggcacctctgggatcgttgttggaccggctacgtaagcaccagggccacttcctcctggggactctgagccgctacgctgtgcaggtggctgagggcatgggctacctggagtccaagcgctttattcaccgtgacctggctgcccgcaatctgctgttggctacccgcgacctggtcaagatcggggactttgggctgatgcgagcactacctcagaatgacgaccattacgtcatgcaggaacatcgcaaggtgcccttcgcctggtgtgcccccgagagcctgaagacacgcaccttctcccatgccagcgacacctggatgttcggggtgacactgtgggaaatgttcacctacggccaggagccctggatcggcctcaacggcagtcagatcctgcataagatcgacaaggagggggagcggctgccccggcccgaggactgtccccaggacatctacaacgtcatggtccagtgctgggctcacaagccagaggacagacccacgtttgtggccctgcgggacttcctgctggaggcccagcccacagacatgcgggcccttcaggactttgaggaaccggacaagctgcacatccagatgaatgatgtcatcaccgtcatcgagggaagggccgagaactactggtggcgtggccagaacacacggacgctgtgtgtggggcccttccctcgcaacgtggtgacctccgtggccggcctgtcggcccaggacatcagccagcccctgcagaacagcttcatccacacagggcatggcgacagtgacccccgccactgctggggcttcccggacaggattgacgagtgtcctttctctgccttctctccaggacaccccccagctgagacgtgcggtcaggttctgtggactgggaggcgggaggcctgtgcttcagacccaagactacacccggtttcctccaggacgaaggggctctgatgagattctgccacccctccacacgcttcccctgctctcttgacccagctctctcccccacagactgtatctgggaaaccccatggacccccccgacctcctgagcgtggaactgagcacctcccggcccccccagcatctaggaggggtgaaaagggagcctccacctcgcccacctcagcctgccttcttcactcagaaaccaacctatgaccctgtgagcgaggaccaagaccccttgtccagcgacttcaagaggctgggcctgcggaagccaggcctgccccgagggctgtggctggcgaagccctcggcgcgggtgccgggcaccaaggccagccgaggcagcggggctgaggtcacgctcatcgacttcggtgaggagcccgtggtcccggccctacggccctgcgcgccctccctggcgcagctggccatggacgcctgctccctgctggacgagaccccgcctcagagccccacgcgggcactgccccggcccctgcaccccacgcctgtggtggactgggacgcacgcccgctgccccccccgcccgcctatgacgacgtggcccaggatgaggatgactttgagatctgctccatcaacagcaccctcgtgggcgcgggggtccctgccgggcccagccagggccagaccaactacgcctttgtgcctgagcaggc

SEQ ID NO: 196766 - DNA, 2641 bp, Homo sapiens
  Payload ID: 18806
  Gene Name: tyrosine kinase, non-receptor, 2
  ENST ID: ENST00000416152
  CDS Start-End: 1-1824
ctgtcggcccaggacatcagccagcccctgcagaacagcttcatccacacagggcatggcgacagtgacccccgccactgctggggcttcccggacaggattgacgaactgtatctgggaaaccccatggacccccccgacctcctgagcgtggaactgagcacctcccggcccccccagcatctaggaggggtgaaaagggagcctccacctcgcccacctcagcctgccttcttcactcagaaaccaacctatgaccctgtgagcgaggaccaagaccccttgtccagcgacttcaagaggctgggcctgcggaagccaggcctgccccgagggctgtggctggcgaagccctcggcgcgggtgccgggcaccaaggccagccgaggcagcggggctgaggtcacgctcatcgacttcggtgaggagcccgtggtcccggccctacggccctgcgcgccctccctggcgcagctggccatggacgcctgctccctgctggacgagaccccgcctcagagccccacgcgggcactgccccggcccctgcaccccacgcctgtggtggactgggacgcacgcccgctgccccccccgcccgcctatgacgacgtggcccaggatgaggatgactttgagatctgctccatcaacagcaccctcgtgggcgcgggggtccctgccgggcccagccagggccagaccaactacgcctttgtgcctgagcaggcgcggccgccccctcccctggaggacaacctgttcctcccgccccagggtgggggcaagccgcccagctccgcacagaccgcagagatcttccaggcgctacagcaggagtgcatgaggcaactgcaggctccggccggctccccggccccctctcccagcccggggggtgacgacaagccccaggtgcctcctcgggtacccatcccccctcggcccacgcgcccacacgtccagctgtctccagcccccccgggcgaggaggagaccagccagtggcctggacctgcttcccctccccgggtgcctccgcgggagcccctgtcccctcaaggctcgaggacacccagccccctggtaccacctggcagctccccgctgccaccccggctctcaagctcacctgggaagaccatgcccaccacccagagctttgcctcagaccccaagtacgccaccccccaggtgatccaggcccctggcccgcgggctggtccctgcatcctgcccatcgtccgggatggcaagaaggtcagcagcacccactattacttgctgcccgagcgaccatcctacctggagcgctaccagcgcttcctgcgtgaggcccagagccccgaggagcctacccccctgcctgtgcctctgctgctgcccccacccagcaccccagcccccgccgcccccacggccaccgtgcggccgatgccccaggctgccttggaccccaaggccaacttctccaccaacaacagcaacccaggggcccggccaccacccccgagggccactgctcggctgccacagaggggctgccctggcgatgggccagaggcgggccggccagcagacaagatccagatgctgcaggccatggtgcatggggtgaccacagaggagtgccaggcggccctgcagtgccacggctggagcgtgcagagggctgcccagtatctgaaggtggagcagctcttcgggctgggtctgcggcccagaggggagtgccacaaagtgctggagatgttcgactggaacctggagcaggccggctgccaccttctgggctcctggggccctgcccaccacaagcgctgagatgcgtctggagagccagagggcctgcctgaaggaatcacctgagcctgtccgtccaccaggagtggggagatgcccccatccagtcctggaggacccgctgctcctgctgctcccggggatggagcaaggccaaggctgcgggaggctgggagccctgccctgcccatccctcctgcaccagcgctgtccctgcacactttggttcagtcccggtgcccctgccaagatgtggaaggggccgggtgaagacaggcttgagggctgccccagcaggctctgggtatgacctgcctctggccctggtcctgggcggggcctgtgggtggagtagtacccccaggccctgccctgggtgacagactgggaggaaaccaggctggacctgggcaggcgggatgtgttggccacagggagaggcggaccggcacccggtgggacctcctaggactgggccttcttccagggggcccctggcagcagctggggtgtcgggcagaatgtgacttgtggccttaccatggacttgaatgggacttggctggcctcaggatcttgtgcctggaaatagcctgaggtggctcaggaagcggagaaagggtgccagaccattctctggcggggaccagggcccaaggccccagggctggaaggagaccaaggggcagccgccctggagggacatcagtgcttcctcttccacccaattcccccacgcggttccatgttttcccaccagcctgttggcgaagttgctgctccggcattcagtacctgcttcttccagagaaataaagttagtttctattttatgtta

SEQ ID NO: 196767 - DNA, 829 bp, Homo sapiens
  Payload ID: 18806
  Gene Name: tyrosine kinase, non-receptor, 2
  ENST ID: ENST00000430929
  CDS Start-End: 1-432
gtgttcagtggaaagcgactggaggctgagttcccacctcatcactctcagagcaccttccggaagacctcgcccgcccctgggggcccagcaggggaggggcccctgcagagcctcacctgcctcattggggagaaggacctgcgcctcctggagaagctgggtgatggttcctttggcgtggtgcgcaggggcgagtgggacgcgccctcagggaagacggtgagtgtggctgtgaagtgcctgaagcccgatgtcctgagccagccagaagccatggacgacttcatccgggaggtcaatgccatgcactcgctcgaccaccgaaacctcatccgcctctacggggtggtgctcacgccgcccatgaagatggcatcagtttcccaaattgcctcgagggagaggcctgagaaactgcaggactcctagaggtccccagacagcaggccaggaaggtgacagagctggcacctctgggatcgttgttggaccggctacgtaagcaccagggccacttcctcctggggactctgagccgctacgctgtgcaggtggctgagggcatgggctacctggagtccaagcgctttattcaccgtgacctggctgcccgcaatctgctgttggctacccgcgacctggtcaagatcggggactttgggctgatgcgagcactacctcagaatgacgaccattacgtcatgcaggaacatcgcaaggtgcccttcgcctggtgtgcccccgagagcctgaagacacgcaccttctcccatgccagcgacacctggatgttcggggtgacactgtgggaaatgttcacctacgg

SEQ ID NO: 196768 - DNA, 600 bp, Homo sapiens
  Payload ID: 18806
  Gene Name: tyrosine kinase, non-receptor, 2
  ENST ID: ENST00000411741
  CDS Start-End: 1-600
gttggccccagccgctggttccctgtggctgctgctggtggggctctgggggctccttccccctgggccaccagccctggcttggaaccacagcacctgccctccgtgcctggagctgctcaggagtccctgaatatctccatgtttgtttggctgcctccgtctccatgtctccaggcggatggctctgtggccgagaactactggtggcgtggccagaacacacggacgctgtgtgtggggcccttccctcgcaacgtggtgacctccgtggccggcctgtcggcccaggacatcagccagcccctgcagaacagcttcatccacacagggcatggcgacagtgacccccgccactgctggggcttcccggacaggattgacgaactgtatctgggaaaccccatggacccccccgacctcctgagcgtggaactgagcacctcccggcccccccagcatctaggaggggtgaaaaaaccaacctatgaccctgtgagcgaggaccaagaccccttgtccagcgacttcaagaggctgggcctgcggaagccaggcctgccccgagggctgtggctggcgaagccctcggcgcgggtg

SEQ ID NO: 196769 - DNA, 4639 bp, Homo sapiens
  Payload ID: 18807
  Gene Name: Tyrosine-protein kinase SgK223 [Source:UniProtKB/Swiss-Prot
  Acc:Q86YV5]
  Uniprot ID: Q86YV5
  ENST ID: ENST00000622241
  CDS Start-End: 1-4221
atgcaccagaccctctgcctgaaccccgagagcctgaaaatgtctgcgtgcagtgactttgtggagcacatctggaaacccgggtcctgcaagaactgcttctgcctgcggagcgaccaccagctggtggccggccctccccagcccagagcgggcagcctgccccctccaccgcgcctgcctcccaggcctgagaactgccgcctggaagatgaaggtgtgaacagctcaccttactccaagcccacaattgccgtgaagcccaccatgatgagctccgaggcctctgatgtgtggacagaggccaacctgagtgccgaagtctcgcaggtcatctggagacgagcccctggcaagctccccctcccgaagcaggaggatgcccccgtcgtctacctgggcagcttccgaggtgtacagaagcctgctggtccctctacctcccctgatggcaattctcgctgtcccccagcttacaccatggtcggcctgcacaaccttgagccccgcggcgagaggaacattgccttccacccggtgagcttcccggaggagaaggctgtgcacaaagaaaaaccctcatttccttaccaagaccggccctccacccaggagagcttccgccagaaactggctgcctttgctgggaccacatctggctgtcaccagggccctgggcccctgcgggaatccctgccctcggaggatgacagtgatcaaaggtgctcgccctccggggacagcgagggtggagagtactgctccatcctggactgctgccctgggagccctgttgccaaggctgcctcccagactgcaggttcccggggcaggcatggtggcagggactgctcacccacgtgctgggagcaggggaagtgttccgggcccgcagagcaggagaagcggggcccgagcttccccaaggagtgctgtagccagggccccactgcccacccatcctgcctgggccccaagaaactgtccctcacctcggaggctgccatttcttccgacggcctctcttgtggcagcggcagcggcagcggcagcggcgccagtagccccttcgtcccccacctcgagagtgattactgctccctcatgaaggaacctgccccagagaagcagcaggaccctggctgcccaggggtgacccctagcagatgccttgggctgacgggggagccccagcccccggcccacccccgggaggctacacagcctgaacccatctatgctgagagcaccaagaggaagaaggcagctccggtgccttccaagtcacaggccaagatagaacatgcagctgctgcccagggccaaggccaggtatgcacaggtaatgcctgggcccagaaagcagcatctggctggggccgggacagcccagacccaactccccaggtgtcagccaccatcacagtcatggcggcccacccggaagaggaccatcggacgatctacctgagcagccctgactctgcagtgggggtgcagtggccacgagggcctgtgagccagaactccgaggtaggtgaagaggagacttcggctgggcaggggctgagctccagggaaagccatgctcacagtgccagcgagagcaagcccaaggagaggcccgccattccccccaagttgtccaagagtagccctgtagggtccccggtgtcaccgtctgctggagggcccccagtgtcaccgctggctgaccttagtgatgggagctctggcggcagcagcattgggccccagcctccatcccaaggtcctgctgaccccgctccttcctgccggaccaacggtgtcgctatcagtgacccatccaggtgtccccagcctgccgcctcgtcagcctcggaacagaggcggcccaggttccaggcaggcacctggagtcgtcagtgccggatagaggaagaagaggaggtggagcaggaattgctgagtcacagctggggaagagagaccaaaaatggccccacggaccattcaaactccacgacctggcaccgtctccaccccacagatggctcctctgggcagaacagcaaagttgggaccgggatgagcaaatccgcctcttttgcctttgagttccccaaggacagaagtgggattgagacattctcacctcctcctccgcctccaaagtcgcggcaccttctaaaaatgaacaagagcagctctgatttggaaaaagtgagccagggctctgcagaaagcctcagcccatccttcaggggtgtccacgtcagcttcaccaccggctccacggacagcctggcctcagactctaggacctgcagcgatggaggtccctcgtctgagctggctcactcgcccaccaacagcgggaagaagctctttgctcccgttccgtttccttcaggctccactgaggacgtgtcccccagtggcccccagcagccccctccactcccccagaaaaagatagtgagccgggcagcctcttcaccggatggcttcttctggacccaaggctcccccaagcccggaacagcaagccccaagctgaacctaagccactcggaaaccaacgtccacgacgaatctcactttagctattcgttgagccccgggaaccgccaccatcctgtcttctcctcttccgatcctctggagaaagctttcaaaggcagtggccactggcttccggcagcagggctggcgggcaacagaggcggctgcgggagccctggcctccagtgcaaaggggccccctccgcctcatcctcccagctgagcgtgtccagtcaagcctccaccgggagcacccagcttcagctgcacggtctcctgagcaacatcagcagcaaggagggcacctatgccaagctggggggactctacacccagtccctggcccgccttgtagccaaatgtgaggacctcttcatgggcggccagaaaaaggagctccacttcaatgagaataactggtcgctcttcaagctgacttgtaacaagccctgctgtgactcgggggatgccatttattactgtgccacctgctctgaggaccccggcagcacctatgctgtgaaaatctgcaaagcccctgagcccaaaacagtctcctactgcagcccgtccgtgcccgtgcactttaacatccagcaggactgcggccacttcgtcgcctcggtgccgtccagcatgctcagctcccccgacgcgcccaaggaccctgtgcctgccctgcccacacacccccctgcccaggagcaggactgcgtggtggtcatcacccgagaggtgccacatcagaccgcctccgacttcgtgcgggactcggcggccagccaccaggcggagcccgaggcgtacgagcggcgcgtgtgcttcctgcttctgcaactctgcaacgggctggagcacctgaaggagcacgggatcatccaccgggacctgtgcctggagaacctgctgctggtgcactgcaccctccaggccggccccgggcccgcccccgcccccgccccggctcccgcccccgccgccgccgcgcctccctgctcctctgccgccccgcctgctggtggcactctcagccccgcagccggccccgcctccccggaagggccccgggagaagcagctgccccggctcatcatcagcaactttttgaaggccaagcagaagccgggcggcaccccaaacctgcagcagaagaagagccaggcccggctggcccccgagatcgtgtctgcttcccagtaccgcaagttcgatgagttccagacaggcatcctcatctacgagctgctgcaccaacccaacccgttcgaggtgcgcgcccagctgcgggagagagactaccggcaggaggacctgccgccgctgcccgcgctgtccctctactcacccggcctgcagcagctggcacatctgctactggaggccgaccccatcaagcgtatccgcatcggcgaggccaagcgcgtgctgcagtgcctgctgtgggggcctcggcgcgagctggtgcagcagccgggcacctcggaggaggcgctgtgcggcacgctgcacaactggatcgacatgaagcgggccctgatgatgatgaagtttgcggagaaggcggtggatcgcaggcggggcgtggagctggaggactggctttgctgccagtacctggcgtctgcggagcccggggccctcttacagtcgctgaagctcctgcagcttctgtgagccaagccccagcctgcaccgtcgctgccccttccctgcctaaccctttcctgtctcgccttggaagcacccatgtctccctgggaaatggtacagatgactgggatacctggatgtaaaatatataaatatatatatagaaaatacatataccatatataaatatgaaagactaaggatgctgttgcccgtccacactcgtctcctctctgcactaagtcctccctgttttcttctgtaattatacacatttccagttccatgcaacgtcctgaggacagttctgtgaactgaatgcagcctggacactggcctcaataccttgtttaggatttcttcacccttttgtcaaattgttatttaaagaaaaaaaaaaaagaagaaaattccattaaaattttttttggttgagtcatga

SEQ ID NO: 196770 - DNA, 4903 bp, Homo sapiens
  Payload ID: 18807
  Gene Name: Tyrosine-protein kinase SgK223 [Source:UniProtKB/Swiss-Prot
  Acc:Q86YV5]
  Uniprot ID: Q86YV5
  ENST ID: ENST00000615670
  CDS Start-End: 266-4486
ccggaggcggagggggcggagccgcgctcacagctgccacccggccgccgggcccaggcagaagccacccgcccgcggccgggcacgcaccgcgcgcagaccttctgcgaacaatgctccggccgggcggctggcggctcggagaccgacggaggggccgggggagcgcagcccagaggaagccgctctgtgacccacctctgaatcccacaaaactgcaccagagagccgggcgcaagatgaaccagcaccctgtcggctcaagatgcaccagaccctctgcctgaaccccgagagcctgaaaatgtctgcgtgcagtgactttgtggagcacatctggaaacccgggtcctgcaagaactgcttctgcctgcggagcgaccaccagctggtggccggccctccccagcccagagcgggcagcctgccccctccaccgcgcctgcctcccaggcctgagaactgccgcctggaagatgaaggtgtgaacagctcaccttactccaagcccacaattgccgtgaagcccaccatgatgagctccgaggcctctgatgtgtggacagaggccaacctgagtgccgaagtctcgcaggtcatctggagacgagcccctggcaagctccccctcccgaagcaggaggatgcccccgtcgtctacctgggcagcttccgaggtgtacagaagcctgctggtccctctacctcccctgatggcaattctcgctgtcccccagcttacaccatggtcggcctgcacaaccttgagccccgcggcgagaggaacattgccttccacccggtgagcttcccggaggagaaggctgtgcacaaagaaaaaccctcatttccttaccaagaccggccctccacccaggagagcttccgccagaaactggctgcctttgctgggaccacatctggctgtcaccagggccctgggcccctgcgggaatccctgccctcggaggatgacagtgatcaaaggtgctcgccctccggggacagcgagggtggagagtactgctccatcctggactgctgccctgggagccctgttgccaaggctgcctcccagactgcaggttcccggggcaggcatggtggcagggactgctcacccacgtgctgggagcaggggaagtgttccgggcccgcagagcaggagaagcggggcccgagcttccccaaggagtgctgtagccagggccccactgcccacccatcctgcctgggccccaagaaactgtccctcacctcggaggctgccatttcttccgacggcctctcttgtggcagcggcagcggcagcggcagcggcgccagtagccccttcgtcccccacctcgagagtgattactgctccctcatgaaggaacctgccccagagaagcagcaggaccctggctgcccaggggtgacccctagcagatgccttgggctgacgggggagccccagcccccggcccacccccgggaggctacacagcctgaacccatctatgctgagagcaccaagaggaagaaggcagctccggtgccttccaagtcacaggccaagatagaacatgcagctgctgcccagggccaaggccaggtatgcacaggtaatgcctgggcccagaaagcagcatctggctggggccgggacagcccagacccaactccccaggtgtcagccaccatcacagtcatggcggcccacccggaagaggaccatcggacgatctacctgagcagccctgactctgcagtgggggtgcagtggccacgagggcctgtgagccagaactccgaggtaggtgaagaggagacttcggctgggcaggggctgagctccagggaaagccatgctcacagtgccagcgagagcaagcccaaggagaggcccgccattccccccaagttgtccaagagtagccctgtagggtccccggtgtcaccgtctgctggagggcccccagtgtcaccgctggctgaccttagtgatgggagctctggcggcagcagcattgggccccagcctccatcccaaggtcctgctgaccccgctccttcctgccggaccaacggtgtcgctatcagtgacccatccaggtgtccccagcctgccgcctcgtcagcctcggaacagaggcggcccaggttccaggcaggcacctggagtcgtcagtgccggatagaggaagaagaggaggtggagcaggaattgctgagtcacagctggggaagagagaccaaaaatggccccacggaccattcaaactccacgacctggcaccgtctccaccccacagatggctcctctgggcagaacagcaaagttgggaccgggatgagcaaatccgcctcttttgcctttgagttccccaaggacagaagtgggattgagacattctcacctcctcctccgcctccaaagtcgcggcaccttctaaaaatgaacaagagcagctctgatttggaaaaagtgagccagggctctgcagaaagcctcagcccatccttcaggggtgtccacgtcagcttcaccaccggctccacggacagcctggcctcagactctaggacctgcagcgatggaggtccctcgtctgagctggctcactcgcccaccaacagcgggaagaagctctttgctcccgttccgtttccttcaggctccactgaggacgtgtcccccagtggcccccagcagccccctccactcccccagaaaaagatagtgagccgggcagcctcttcaccggatggcttcttctggacccaaggctcccccaagcccggaacagcaagccccaagctgaacctaagccactcggaaaccaacgtccacgacgaatctcactttagctattcgttgagccccgggaaccgccaccatcctgtcttctcctcttccgatcctctggagaaagctttcaaaggcagtggccactggcttccggcagcagggctggcgggcaacagaggcggctgcgggagccctggcctccagtgcaaaggggccccctccgcctcatcctcccagctgagcgtgtccagtcaagcctccaccgggagcacccagcttcagctgcacggtctcctgagcaacatcagcagcaaggagggcacctatgccaagctggggggactctacacccagtccctggcccgccttgtagccaaatgtgaggacctcttcatgggcggccagaaaaaggagctccacttcaatgagaataactggtcgctcttcaagctgacttgtaacaagccctgctgtgactcgggggatgccatttattactgtgccacctgctctgaggaccccggcagcacctatgctgtgaaaatctgcaaagcccctgagcccaaaacagtctcctactgcagcccgtccgtgcccgtgcactttaacatccagcaggactgcggccacttcgtcgcctcggtgccgtccagcatgctcagctcccccgacgcgcccaaggaccctgtgcctgccctgcccacacacccccctgcccaggagcaggactgcgtggtggtcatcacccgagaggtgccacatcagaccgcctccgacttcgtgcgggactcggcggccagccaccaggcggagcccgaggcgtacgagcggcgcgtgtgcttcctgcttctgcaactctgcaacgggctggagcacctgaaggagcacgggatcatccaccgggacctgtgcctggagaacctgctgctggtgcactgcaccctccaggccggccccgggcccgcccccgcccccgccccggctcccgcccccgccgccgccgcgcctccctgctcctctgccgccccgcctgctggtggcactctcagccccgcagccggccccgcctccccggaagggccccgggagaagcagctgccccggctcatcatcagcaactttttgaaggccaagcagaagccgggcggcaccccaaacctgcagcagaagaagagccaggcccggctggcccccgagatcgtgtctgcttcccagtaccgcaagttcgatgagttccagacaggcatcctcatctacgagctgctgcaccaacccaacccgttcgaggtgcgcgcccagctgcgggagagagactaccggcaggaggacctgccgccgctgcccgcgctgtccctctactcacccggcctgcagcagctggcacatctgctactggaggccgaccccatcaagcgtatccgcatcggcgaggccaagcgcgtgctgcagtgcctgctgtgggggcctcggcgcgagctggtgcagcagccgggcacctcggaggaggcgctgtgcggcacgctgcacaactggatcgacatgaagcgggccctgatgatgatgaagtttgcggagaaggcggtggatcgcaggcggggcgtggagctggaggactggctttgctgccagtacctggcgtctgcggagcccggggccctcttacagtcgctgaagctcctgcagcttctgtgagccaagccccagcctgcaccgtcgctgccccttccctgcctaaccctttcctgtctcgccttggaagcacccatgtctccctgggaaatggtacagatgactgggatacctggatgtaaaatatataaatatatatatagaaaatacatataccatatataaatatgaaagactaaggatgctgttgcccgtccacactcgtctcctctctgcactaagtcctccctgttttcttctgtaattatacacatttccagttccatgcaacgtcctgaggacagttctgtgaactgaatgcagcctggacactggcctcaataccttgtttaggatttcttcacccttttgtcaaattgttatttaaagaaaaaaaaaaaagaagaaaattccattaaaattttttttggttgagtcatg

SEQ ID NO: 196771 - DNA, 3702 bp, Homo sapiens
  Payload ID: 18808
  Gene Name: tyrosyl-DNA phosphodiesterase 1
  Uniprot ID: Q9NUW8
  ENST ID: ENST00000335725
  CDS Start-End: 251-2077
gttggttctgtgcgcctcagagttggagcacacagctgtattaaaaaggcaaatcgaaggccgggcgcggtgactcacgcctgtcatcctagcactttgggaggccgaggcggctgaatcacttgaggttaggagtttgagatcagcccgggcaacatggtgaaaccccgtctctacaaaaatagaaaaattagccgagcgtgatggtggatgcctgtaatcctagctcctcgggaggctaaggagtataatgtctcaggaaggcgattatgggaggtggaccatatctagtagtgatgaaagtgaggaagaaaagccaaaaccagacaagccatctacctcttctcttctctgtgccaggcaaggagcagcaaatgagcccaggtacacctgttccgaggcccagaaagctgcacacaagaggaaaatatcacctgtgaaattcagcaatacagattcagttttacctcccaaaaggcagaaaagcggttcccaggaggacctcggctggtgtctgtccagcagtgatgatgagctgcaaccagaaatgccgcagaagcaggctgagaaagtggtgatcaaaaaggagaaagacatctctgctcccaatgacggcactgcccaaagaactgaaaatcatggcgctcccgcctgccacaggctcaaagaggaggaagacgagtatgagacatcaggggagggccaggacatttgggacatgctggataaagggaaccccttccagttttacctcactagagtctctggagttaagccaaagtataactctggagccctccacatcaaggatattttatctcctttatttgggacgcttgtttcttcagctcagtttaactactgctttgacgtggactggctcgtaaaacagtatccaccagagttcaggaagaagccaatcctgcttgtgcatggtgataagcgagaggctaaggctcacctccatgcccaggccaagccttacgagaacatctctctctgccaggcaaagttggatattgcgtttggaacacaccacacgaaaatgatgctgctgctctatgaagaaggcctccgggttgtcatacacacctccaacctcatccatgctgactggcaccagaaaactcaaggaatatggttgagccccttatacccacgaattgctgatggaacccacaaatctggagagtcgccaacacattttaaagctgatctcatcagttacttgatggcttataatgccccttctctcaaggagtggatagatgtcattcacaagcacgatctctctgaaacaaatgtttatcttattggttcaaccccaggacgctttcaaggaagtcaaaaagataattggggacattttagacttaagaagcttctgaaagaccatgcctcatccatgcctaacgcagagtcctggcctgtcgtaggtcagttttcaagcgttggctccttgggagccgatgaatcaaagtggttatgttctgagtttaaagagagcatgctgacactggggaaggaaagcaagactccaggaaaaagctctgttcctctttacttgatctatccttctgtggaaaatgtgcggaccagtttagaaggatatcctgctgggggctctcttccctatagcatccagacagctgaaaaacagaattggctgcattcctattttcacaaatggtcagctgagacttctggccgcagcaatgccatgccacatattaagacatatatgaggccttctccagacttcagtaaaattgcttggttccttgtcacaagcgcaaatctgtccaaggctgcctggggagcattggagaagaatggcacccagctgatgatccgctcctacgagctcggggtccttttcctcccttcagcatttggtctagacagtttcaaagtgaaacagaagttcttcgctggcagccaggagccaatggccacctttcctgtgccatatgatttgcctccagaactgtatggaagtaaagatcggccatggatatggaacattccttatgtcaaagcaccggatacgcatgggaacatgtgggtgccctcctgagaatcttgaggcactgtgaaatttaagtgtaagacattgagccacaaacatggaatctcttctttgtactggatgtccacttcccttaaagtcttatttgcacccttacaaaatctttccaaaggtcactcttatgaatggatgttggttatacttttaatggacattaacattcctaataaagtattagtttcttaattcacttttatatgttttggaaagaaaattagtgaacttctctatgttaaaaatacgtactgcttgagtatcccctgtctgaaatgcttgggaccagaagtgtttcagcttttggatttttttgaattttggaatatttgcatagcataatgagatatcttgggaatgggacccaaatctaaacacaaaattcatttatgtttcatatacaccttatatacaataacctaaaggtgattttatatgatattttgagtaattttatgcatgaaacaaagttttgacaggcttttgaccgtgattcatcacatgagttcaggcatggaaattttcatttggagcatcatgtcagcactcaaaaagttctggatcttggagcagttcagattttcagattagggatgctcaaatctatatagatataaaattatcctcacagtaacatagaatctcttggtgctgtcagctgttgggaattgaagattgactttgtgcttccaccctccatccagaaaggcacccttcattccaccagaactttacccaggaagaacacgatcatttcctttttcaccgatgccctctctcagctttctgagtacgtctcttggggtcgctggaggtgatcctaggatctgtctctgagaccaatgtgctgtttcagccccctgcagctaagaattgtattgactgtcctcacagcggcttttcatagctttcagcttcagctttacgaggcttctcctctctccctggcaccctgctggctgcctcactgcttacagacaggtcccaccaaacccaaacacctgcctagggtaaatgggtctctcttctatccccagaaactttcagaggaagcagctcatagaaacatacaaaagcacacaagtattttgggaaaaaatcctaaaaggtgacttaatttgatgccttaaattcacaagtgaggaagctaaggcctagaaggttaaggatgtccccagggtcacacagtgagcggggctcagagcttgagtgtctttgtgctttgtgtacattgtgttctccctagggtgctttagaccctgtttgttttcttctgcatgaggctgatttccagtttgtcatcaacctctttatcttataatttaggatagagttgaacgttagtcttgaaagattttctaaagtagtctttcaaactgttcctcagaggcctaggattttccaaaagtaccttaggaaccttgtaggctgcagtgggggtgtggcgatagagcaggaggcagggagacagggctgcagggcctcccaccttccaacagacaggctctgctgtatctgttgtacatactgggattctgtaaaggacattatctggggtgttgtatgtatttttgtgtgttctgctttttttaaataaacttgaaaagctactgaactaa

SEQ ID NO: 196772 - DNA, 2370 bp, Homo sapiens
  Payload ID: 18808
  Gene Name: tyrosyl-DNA phosphodiesterase 1
  ENST ID: ENST00000393452
  CDS Start-End: 300-2069
actgcgcgcatgcgcggcggccgccgaaggggcgggatccgaggcaagcgttggttctgtgcgcctcagagttggagcacacagctgtattaaaaaggcaaatcgaaggccgggcgcggtgactcacgcctgtcatcctagcactttgggaggccgaggcggctgaatcacttgaggttaggagtttgagatcagcccgggcaacatggtgaaaccccgtctctacaaaaatagaaaaattagccgagcgtgatggtggatgcctgtaatcctagctcctcgggaggctaaggagtataatgtctcaggaaggcgattatgggaggtggaccatatctagtagtgatgaaagtgaggaagaaaagccaaaaccagacaagccatctacctcttctcttctctgtgccaggcaaggagcagcaaatgagcccaggtacacctgttccgaggcccagaaagctgcacacaagaggaaaatatcacctgtgaaattcagcaatacagattcagttttacctcccaaaaggcagaaaagcggttcccaggaggacctcggctggtgtctgtccagcagtgatgatgagctgcaaccagaaatgccgcagaagcaggctgagaaagtggtgatcaaaaaggagaaagacatctctgctcccaatgacggcactgcccaaagaactgaaaatcatggcgctcccgcctgccacaggctcaaagaggaggaagacgagtatgagacatcaggggagggccaggacatttgggacatgctggataaagggaaccccttccagttttacctcactagagtctctggagttaagccaaagtataactctggagccctccacatcaaggatattttatctcctttatttgggacgcttgtttcttcagctcagtttaactactgctttgacgtggactggctcgtaaaacagtatccaccagagttcaggaagaagccaatcctgcttgtgcatggtgataagcgagaggctaaggctcacctccatgcccaggccaagccttacgagaacatctctctctgccaggcaaagttggatattgcgtttggaacacaccacacgaaaatgatgctgctgctctatgaagaaggcctccgggttgtcatacacacctccaacctcatccatgctgactggcaccagaaaactcaaggaatatggttgagccccttatacccacgaattgctgatggaacccacaaatctggagagtcgccaacacattttaaagctgatctcatcagttacttgatggcttataatgccccttctctcaaggagtggatagatgtcattcacaagcacgatctctctgaaacaaatgtttatcttattggttcaaccccaggacgctttcaaggaagtcaaaaagataattggggacattttagacttaagaagcttctgaaagaccatgcctcatccatgcctaacgcagagtcctggcctgtcgtaggtcagttttcaagcgttggctccttgggagccgatgaatcaaagtggttatgttctgagtttaaagagagcatgctgacactggggaaggaaagcaagactccaggaaaaagctctgttcctctttacttgatctatccttctgtggaaaatgtgcggaccagtttagaaggatatcctgctgggggctctcttccctatagcatccagacagctgaaaaacagaattggctgcattcctattttcacaaatggtcagctgagacttctggccgcagcaatgccatgccacatattaagacatatatgaggccttctccagacttcagtaaaattgcttggttccttgtcacaagcgcaaatctgtccaaggctgcctggggagcattggagaagaatggcacccagctgatgatccgctcctacgagctcggggtccttttcctcccttcagcatttgcccctgcgaagagaataaaggatgaagtggaggcttcgttctctgggtctagacagtttcaaagtgaaacagaagttcttcgctggcagccaggagccaatggccacctttcctgtgccatatgatttgcctccagaactgtatggaagtaaagatcggccatggatatggaacattccttatgtcaaagcaccggatacgcatgggaacatgtgggtgccctcctgagaatcttgaggcactgtgaaatttaagtgtaagacattgagccacaaacatggaatctcttctttgtactggatgtccacttcccttaaagtcttatttgcacccttacaaaatctttccaaaggtcactcttatgaatggatgttggttatacttttaatggacattaacattcctaataaagtattagtttcttaa

SEQ ID NO: 196773 - DNA, 2068 bp, Homo sapiens
  Payload ID: 18808
  Gene Name: tyrosyl-DNA phosphodiesterase 1
  Uniprot ID: Q9NUW8
  ENST ID: ENST00000393454
  CDS Start-End: 41-1867
atccgaggcaagcgttggttctgtgcgcctcaggagtataatgtctcaggaaggcgattatgggaggtggaccatatctagtagtgatgaaagtgaggaagaaaagccaaaaccagacaagccatctacctcttctcttctctgtgccaggcaaggagcagcaaatgagcccaggtacacctgttccgaggcccagaaagctgcacacaagaggaaaatatcacctgtgaaattcagcaatacagattcagttttacctcccaaaaggcagaaaagcggttcccaggaggacctcggctggtgtctgtccagcagtgatgatgagctgcaaccagaaatgccgcagaagcaggctgagaaagtggtgatcaaaaaggagaaagacatctctgctcccaatgacggcactgcccaaagaactgaaaatcatggcgctcccgcctgccacaggctcaaagaggaggaagacgagtatgagacatcaggggagggccaggacatttgggacatgctggataaagggaaccccttccagttttacctcactagagtctctggagttaagccaaagtataactctggagccctccacatcaaggatattttatctcctttatttgggacgcttgtttcttcagctcagtttaactactgctttgacgtggactggctcgtaaaacagtatccaccagagttcaggaagaagccaatcctgcttgtgcatggtgataagcgagaggctaaggctcacctccatgcccaggccaagccttacgagaacatctctctctgccaggcaaagttggatattgcgtttggaacacaccacacgaaaatgatgctgctgctctatgaagaaggcctccgggttgtcatacacacctccaacctcatccatgctgactggcaccagaaaactcaaggaatatggttgagccccttatacccacgaattgctgatggaacccacaaatctggagagtcgccaacacattttaaagctgatctcatcagttacttgatggcttataatgccccttctctcaaggagtggatagatgtcattcacaagcacgatctctctgaaacaaatgtttatcttattggttcaaccccaggacgctttcaaggaagtcaaaaagataattggggacattttagacttaagaagcttctgaaagaccatgcctcatccatgcctaacgcagagtcctggcctgtcgtaggtcagttttcaagcgttggctccttgggagccgatgaatcaaagtggttatgttctgagtttaaagagagcatgctgacactggggaaggaaagcaagactccaggaaaaagctctgttcctctttacttgatctatccttctgtggaaaatgtgcggaccagtttagaaggatatcctgctgggggctctcttccctatagcatccagacagctgaaaaacagaattggctgcattcctattttcacaaatggtcagctgagacttctggccgcagcaatgccatgccacatattaagacatatatgaggccttctccagacttcagtaaaattgcttggttccttgtcacaagcgcaaatctgtccaaggctgcctggggagcattggagaagaatggcacccagctgatgatccgctcctacgagctcggggtccttttcctcccttcagcatttggtctagacagtttcaaagtgaaacagaagttcttcgctggcagccaggagccaatggccacctttcctgtgccatatgatttgcctccagaactgtatggaagtaaagatcggccatggatatggaacattccttatgtcaaagcaccggatacgcatgggaacatgtgggtgccctcctgagaatcttgaggcactgtgaaatttaagtgtaagacattgagccacaaacatggaatctcttctttgtactggatgtccacttcccttaaagtcttatttgcacccttacaaaatctttccaaaggtcactcttatgaatggatgttggttatacttttaatggacattaacattcctaataaagtattagtttcttaattc

SEQ ID NO: 196774 - DNA, 2488 bp, Homo sapiens
  Payload ID: 18808
  Gene Name: tyrosyl-DNA phosphodiesterase 1
  ENST ID: ENST00000545686
  CDS Start-End: 244-1140
ccattctccgcagagttggagcacacagctgtattaaaaaggcaaatcgaaggccgggcgcggtgactcacgcctgtcatcctagcactttgggaggccgaggcggctgaatcacttgaggttaggagtttgagatcagcccgggcaacatggtgaaaccccgtctctacaaaaatagaaaaattagccgagcgtgatggtggatgcctgtaatcctagctcctcgggaggctaaggagtataatgtctcaggaaggcgattatgggaggtggaccatatctagtagtgatgaaagtgaggaagaaaagccaaaaccagacaagccatctacctcttctcttctctgtgccaggcaaggagcagcaaatgagcccaggtacacctgttccgaggcccagaaagctgcacacaagaggaaaatatcacctgtgaaattcagcaatacagattcagttttacctcccaaaaggcagaaaagcggttcccaggaggacctcggctggtgtctgtccagcagtgatgatgagctgcaaccagaaatgccgcagaagcaggctgagaaagtggtgatcaaaaaggagaaagacatctctgctcccaatgacggcactgcccaaagaactgaaaatcatggcgctcccgcctgccacaggctcaaagaggaggaagacgagtatgagacatcaggggagggccaggacatttgggacatgctggataaagggaaccccttccagttttacctcactagagtctctggagttaagccaaagtataactctggagccctccacatcaaggatattttatctcctttatttgggacgcttgtttcttcagctcagtttaactactgctttgacgtggactggctcgtaaaacagtatccaccagagttcaggaagaagccaatcctgcttgtgcatggtgataagcgagaggctaaggctcacctccatgcccaggccaagccttacgagaacatctctctctgccaggcaaagttggatattgcgtttggaacacaccacacgaaaatgatgctgctgctctatgaagaaggcctccgggttgtcatacacacctccaacctcatccatgctgactggcaccagaaaactcaaggaactcacctgtgagtgaatctctgatccaggaggagcctcactcagcctgggaactttgaggtgctattgcaaggggaggtcctccacgtctgtccagcccaacctggtcattttacacacggaggcaaaggcccagagagatcacagagcttacccaaaatgaatatggttgagccccttatacccacgaattgctgatggaacccacaaatctggagagtcgccaacacattttaaagctgatctcatcagttacttgatggcttataatgccccttctctcaaggagtggatagatgtcattcacaagcacgatctctctgaaacaaatgtttatcttattggttcaaccccaggacgctttcaaggaagtcaaaaagataattggggacattttagacttaagaagctttgcataattatcaaagcaggaaatgcagatcagtcttctgcagtgttttagctgcttctgaaagaccatgcctcatccatgcctaacgcagagtcctggcctgtcgtaggtcagttttcaagcgttggctccttgggagccgatgaatcaaagtggttatgttctgagtttaaagagagcatgctgacactggggaaggaaagcaagactccaggaaaaagctctgttcctctttacttgatctatccttctgtggaaaatgtgcggaccagtttagaaggatatcctgctgggggctctcttccctatagcatccagacagctgaaaaacagaattggctgcattcctattttcacaaatggtcagctgagacttctggccgcagcaatgccatgccacatattaagacatatatgaggccttctccagacttcagtaaaattgcttggttccttgtcacaagcgcaaatctgtccaaggctgcctggggagcattggagaagaatggcacccagctgatgatccgctcctacgagctcggggtccttttcctcccttcagcatttggtctagacagtttcaaagtgaaacagaagttcttcgctggcagccaggagccaatggccacctttcctgtgccatatgatttgcctccagaactgtatggaagtaaagatcggccatggatatggaacattccttatgtcaaagcaccggatacgcatgggaacatgtgggtgccctcctgagaatcttgaggcactgtgaaatttaagtgtaagacattgagccacaaacatggaatctcttctttgtactggatgtccacttcccttaaagtcttatttgcacccttacaaaatctttccaaaggtcactcttatgaatggatgttggttatacttttaatggacattaacattcctaataaagtattagtttcttaa

SEQ ID NO: 196775 - DNA, 1894 bp, Homo sapiens
  Payload ID: 18808
  Gene Name: tyrosyl-DNA phosphodiesterase 1
  ENST ID: ENST00000555880
  CDS Start-End: 11-1747
caggagtataatgtctcaggaaggcgattatgggaggtggaccatatctagtagtgatgaaagtgaggaagaaaagccaaaaccagacaagccatctacctcttctcttctctgtgccaggcaaggagcagcaaatgagcccaggtacacctgttccgaggcccagaaagctgcacacaagaggaaaatatcacctgtgaaattcagcaatacagattcagttttacctcccaaaaggcagaaaagcggttcccaggaggacctcggctggtgtctgtccagcagtgatgatgagctgcaaccagaaatgccgcagaagcaggctgagaaagtggtgatcaaaaaggagaaagacatctctgctcccaatgacggcactgcccaaagaactgaaaatcatggcgctcccgcctgccacaggctcaaagaggaggaagacgagtatgagacatcaggggagggccaggacatttgggacatgctggataaagggaaccccttccagttttacctcactagagtctctggagttaagccaaagtataactctggagccctccacatcaaggatattttatctcctttatttgggacgcttgtttcttcagctcagtttaactactgctttgacgtggactggctcgtaaaacagtatccaccagagttcaggaagaagccaatcctgcttgtgcatggtgataagcgagaggctaaggctcacctccatgcccaggccaagccttacgagaacatctctctctgccaggcaaagttggatattgcgtttggaacacaccacacgaaaatgatgctgctgctctatgaagaaggcctccgggttgtcatacacacctccaacctcatccatgctgactggcaccagaaaactcaaggaatatggttgagccccttatacccacgaattgctgatggaacccacaaatctggagagtcgccaacacattttaaagctgatctcatcagttacttgatggcttataatgccccttctctcaaggagtggatagatgtcattcacaagcacgatctctctgaaacaaatgtttatcttattggttcaaccccaggacgctttcaaggaagtcaaaaagataattggggacattttagacttaagaagcttctgaaagaccatgcctcatccatgcctaacgcagagtcctggcctgtcgtaggtcagttttcaagcgttggctccttgggagccgatgaatcaaagtggttatgttctgagtttaaagagagcatgctgacactggggaaggaaagcaagactccaggaaaaagctctgttcctctttacttgatctatccttctgtggaaaatgtgcggaccagtttagaaggatatcctgctgggggctctcttccctatagcatccagacagctgaaaaacagaattggctgcattcctattttcacaaatggtcagctgagacttctggccgcagcaatgccatgccacatattaagacatatatgaggccttctccagacttcagtaaaattgcttggttccttgtcacaagcgcaaatctgtccaaggctgcctggggagcattggagaagaatggcacccagctgatgatccgctcctacgagctcggggtccttttcctcccttcagcatttatcggccatggatatggaacattccttatgtcaaagcaccggatacgcatgggaacatgtgggtgccctcctgagaatcttgaggcactgtgaaatttaagtgtaagacattgagccacaaacatggaatctcttctttgtactggatgtccacttcccttaaagtcttatttgcacccttacaaaatctttccaaaggtcactcttatgaatggatgttggttatacttttaatggaca

SEQ ID NO: 196776 - DNA, 876 bp, Homo sapiens
  Payload ID: 18808
  Gene Name: tyrosyl-DNA phosphodiesterase 1
  ENST ID: ENST00000553617
  CDS Start-End: 218-876
cgaggcaagcgttggttctgtgcgcctcaggcaaggagcagcaaatgagcccaggtacacctgttccgaggcccagaaagctgcacacaagaggaaaatatcacctgtgaaattcagcaatacagattcagttttacctcccaaaaggcagaaaagcggttcccaggaggacctcggctggtgtctgtccagcagtgatgatgagctgcaaccagaaatgccgcagaagcaggctgagaaagtggtgatcaaaaaggagaaagacatctctgctcccaatgacggcactgcccaaagaactgaaaatcatggcgctcccgcctgccacaggctcaaagaggaggaagacgagtatgagacatcaggggagggccaggacatttgggacatgctggataaagggaaccccttccagttttacctcactagagtctctggagttaagccaaagtataactctggagccctccacatcaaggatattttatctcctttatttgggacgcttgtttcttcagctcagtttaactactgctttgacgtggactggctcgtaaaacagtatccaccagagttcaggaagaagccaatcctgcttgtgcatggtgataagcgagaggctaaggctcacctccatgcccaggccaagccttacgagaacatctctctctgccaggcaaagttggatattgcgtttggaacacaccacacgaaaatgatgctgctgctctatgaagaaggcctccgggttgtcatacacacctccaacctcatccatgctgactggcaccagaaaactcaaggaatatggttgagccccttatacccacgaattgctgatggaacccacaaatctggagagtcgccaacacattt

SEQ ID NO: 196777 - DNA, 1076 bp, Homo sapiens
  Payload ID: 18808
  Gene Name: tyrosyl-DNA phosphodiesterase 1
  ENST ID: ENST00000556063
  CDS Start-End: 1-844
acgctttcaaggaagtcaaaaagataattggggacattttagacttaagaagcttctgaaagaccatgcctcatccatgcctaacgcagagtcctggcctgtcgtaggtcagttttcaagcgttggctccttgggagccgatgaatcaaagtggttatgttctgagtttaaagagagcatgctgacactggggaaggaaagcaagactccaggaaaaagctctgttcctctttacttgatctatccttctgtggaaaatgtgcggaccagtttagaaggatatcctgctgggggctctcttccctatagcatccagacagctgaaaaacagaattggctgcattcctattttcacaaatggtcagctgagacttctggccgcagcaatgccatgccacatattaagacatatatgaggccttctccagacttcagtaaaattgcttggttccttgtcacaagcgcaaatctgtccaaggctgcctggggagcattggagaagaatggcacccagctgatgatccgctcctacgagctcggggtccttttcctcccttcagcatttggtctagacagtttcaaagtgaaacagaagttcttcgctggcagccaggagccaatggccacctttcctgtgccatatgatttgcctccagaactgtatggaagtaaaggtgagacacagataaaggaaaaccacgggtggatatgcataagaaaaacaaacagagcccaggagaagcctttggtctcagtgggatcctggctcatggaaccctctggaagctcaagtttgcagagggccctttgccagcctgtctggggccttgtagccactggttagtcttggaatccctttgcactcctataattactatacagatccttcctgacttacactggggctacatgctgataaacccctcatgaattgaaaatatcataagtcaaaaatgcatttaatgcgtcaaatctactgagcaccatagcttagtctagcctaccctaaacatgatcagacctcttaaattagtctacacttgggcaaaataaatcaaagactgttttataataaa

SEQ ID NO: 196778 - DNA, 910 bp, Homo sapiens
  Payload ID: 18808
  Gene Name: tyrosyl-DNA phosphodiesterase 1
  ENST ID: ENST00000554180
  CDS Start-End: 72-910
gcgcatgcgcggcggccgccgaaggggcgggatccgaggcaagcgttggttctgtgcgcctcaggagtataatgtctcaggaaggcgattatgggaggtggaccatatctagtagtgatgaaagtgaggaagaaaagccaaaaccagacaagccatctacctcttctcttctctgtgccaggcaaggagcagcaaatgagcccaggtacacctgttccgaggcccagaaagctgcacacaagaggaaaatatcacctgtgaaattcagcaatacagattcagttttacctcccaaaaggcagaaaagcggttcccaggaggacctcggctggtgtctgtccagcagtgatgatgagctgcaaccagaaatgccgcagaagcaggctgagaaagtggtgatcaaaaaggagaaagacatctctgctcccaatgacggcactgcccaaagaactgaaaatcatggcgctcccgcctgccacaggctcaaagaggaggaagacgagtatgagacatcaggggagggccaggacatttgggacatgctggataaagggaaccccttccagttttacctcactagagtctctggagttaagccaaagtataactctggagccctccacatcaaggatattttatctcctttatttgggacgcttgtttcttcagctcagtttaactactgctttgacgtggactggctcgtaaaacagtatccaccagagttcaggaagaagccaatcctgcttgtgcatggtgataagcgagaggctaaggctcacctccatgcccaggccaagccttacgagaacatctctctctgccaggcaaagttggatattgcgtttggaacacaccacacgaaaatgatgctgctgctctatgaagaaggcctccgggttgtcataca

SEQ ID NO: 196779 - DNA, 910 bp, Homo sapiens
  Payload ID: 18808
  Gene Name: tyrosyl-DNA phosphodiesterase 1
  ENST ID: ENST00000553527
  CDS Start-End: 473-910
atcctgctcctggccgagtcgcggtgcgcgggctgctggggtccggcagggctggaggcggaccgcgaggaagcggcgcggccgggaagatggggcagggtcgcctcggccccggggcctcggtttcctccgatcacagcgcctcagggggcgcgcacgggcgctgcggagacctgtgtcctgccggggcgcggcgctaggggcccctgctcgggtttttattcccagacctaagcttacagagttggagcacacagctgtattaaaaaggcaaatcgaaggccgggcgcggtgactcacgcctgtcatcctagcactttgggaggccgaggcggctgaatcacttgaggttaggagtttgagatcagcccgggcaacatggtgaaaccccgtctctacaaaaatagaaaaattagccgagcgtgatggtggatgcctgtaatcctagctcctcgggaggctaaggagtataatgtctcaggaaggcgattatgggaggtggaccatatctagtagtgatgaaagtgaggaagaaaagccaaaaccagacaagccatctacctcttctcttctctgtgccaggcaaggagcagcaaatgagcccaggtacacctgttccgaggcccagaaagctgcacacaagaggaaaatatcacctgtgaaattcagcaatacagattcagttttacctcccaaaaggcagaaaagcggttcccaggaggacctcggctggtgtctgtccagcagtgatgatgagctgcaaccagaaatgccgcagaagcaggctgagaaagtggtgatcaaaaaggagaaagacatctctgctcccaatgacggcactgcccaaagaactgaaaatcatggcgctcccgcctgccacaggctcaaagaggaggaagacgagtatgag

SEQ ID NO: 196780 - DNA, 318 bp, Homo sapiens
  Payload ID: 18808
  Gene Name: tyrosyl-DNA phosphodiesterase 1
  ENST ID: ENST00000557782
  CDS Start-End: 1-156
gcaaagttggatattgcgtttggaacacaccacacgaaaatgatgctgctgctctatgaagaaggcctccgggttgtcatacacacctccaacctcatccatgctgactggcaccagaaaactcaaggccattttgtacatctctgcctgtgctagagaagagctggttaacaaacagccttctgtgttgggagaaactcggacgtttgtctagcaccatttccagaactcacctgtgagtgaatctctgatccaggaggagcctcactcagcctgggaactttgaggtgctattgcaaggggaggtcctccacgtct

SEQ ID NO: 196781 - DNA, 3040 bp, Homo sapiens
  Payload ID: 18808
  Gene Name: tyrosyl-DNA phosphodiesterase 1
  ENST ID: ENST00000554976
  CDS Start-End: 970-1545
cttaactcgttgagcgcggctggaaatccaagcgcttctaggtgctggttcaatgcctggttcatgatttatttcattctctccctccatcttgcaataggttacttttaatcatttagatctatgacactatgctaaacgttataggagacaaaaagactgtgaacaaacaagaagaaccaaacgaaaagagccaagtccaggattctcgttcagatcagcaagtcattgggatcgagctcctagggcagctactacatctgttatgtcctcaagataatcccagcacctagcactgtgcctggcacaaagtagatcttcaatgaaagaacgaaacgagccgttatatttacacagatgtatttcactcagtcctctggaagagatgcctagtgtgaaagagattccaagaataaataccataaacagcaccgagcccaaatcccacagcaaacatccttattaaaggcaaggaacgtggggcgagttccttttctcagaagattttacgagaacgcaactgttgcgaagaaggaacagacattcgaggttctgagtccaatgggaactcatttaactttttattttgcagcagatttcaaagtctgcacccagcccctcccaggacacaggtctccttgcagctgcctttaacctaagcgtatcctctctccactttaaaccaaacgccgctgcatggagccctgggagcctgagccatgagaatcctgtaaagaggagttggagcacacagctgtattaaaaaggcaaatcgaaggccgggcgcggtgactcacgcctgtcatcctagcactttgggaggccgaggcggctgaatcacttgaggttaggagtttgagatcagcccgggcaacatggtgaaaccccgtctctacaaaaatagaaaaattagccgagcgtgatggtggatgcctgtaatcctagctcctcgggaggctaaggagtataatgtctcaggaaggcgattatgggaggtggaccatatctagtagtgatgaaagtgaggaagaaaagccaaaaccagacaagccatctacctcttctcttctctgtgccaggcaaggagcagcaaatgagcccaggtacacctgttccgaggcccagaaagctgcacacaagaggaaaatatcacctgtgaaattcagcaatacagattcagttttacctcccaaaaggcagaaaagcggttcccaggaggacctcggctggtgtctgtccagcagtgatgatgagctgcaaccagaaatgccgcagaagcaggctgagaaagtggtgatcaaaaaggagaaagacatctctgctcccaatgacggcactgcccaaagaactgaaaatcatggcgctcccgcctgccacaggctcaaagaggaggaagacgagtatgagacatcaggggagggccaggacatttgggacatgctggataaagggaaccccttccagttttacctcactagagtctctggagttaagccaaagtataactctggagccctccacatcaagggacagtcttatgagtagatgttacaatcgtattccttggataaatgatgcatctgcactttagaaaagtgcccaaggtcgtagagctgatattttatctcctttatttgggacgcttgtttcttcagctcagtttaactactgctttgacgtggactggctcgtaaaacagtatccaccagagttcaggaagaagccaatcctgcttgtgcatggtgataagcgagaggctaaggctcacctccatgcccaggccaagccttacgagaacatctctctctgccaggcaaagttggatattgcgtttggaacacaccacacgaaaatgatgctgctgctctatgaagaaggcctccgggttgtcatacacacctccaacctcatccatgctgactggcaccagaaaactcaagggttcgtaggggcctgctcacttcctggcagtgtgtgtgttgataaagaatatggttgagccccttatacccacgaattgctgatggaacccacaaatctggagagtcgccaacacattttaaagctgatctcatcagttacttgatggcttataatgccccttctctcaaggagtggatagatgtcattcacaagcacgatctctctgaaacaaatgtttatcttattggttcaaccccaggacgctttcaaggaagtcaaaaagataattggggacattttagacttaagaagcttctgaaagaccatgcctcatccatgcctaacgcagagtcctggcctgtcgtaggtcagttttcaagcgttggctccttgggagccgatgaatcaaagtggttatgttctgagtttaaagagagcatgctgacactggggaaggaaagcaagactccaggaaaaagctctgttcctctttacttgatctatccttctgtggaaaatgtgcggaccagtttagaaggatatcctgctgggggctctcttccctatagcatccagacagctgaaaaacagaattggctgcattcctattttcacaaatggtcagctgagacttctggccgcagcaatgccatgccacatattaagacatatatgaggccttctccagacttcagtaaaattgcttggttccttgtcacaagcgcaaatctgtccaaggctgcctggggagcattggagaagaatggcacccagctgatgatccgctcctacgagctcggggtccttttcctcccttcagcatttggtctagacagtttcaaagtgaaacagaagttcttcgctggcagccaggagccaatggccacctttcctgtgccatatgatttgcctccagaactgtatggaagtaaagatcggccatggatatggaacattccttatgtcaaagcaccggatacgcatgggaacatgtgggtgccctcctgagaatcttgaggcactgtgaaatttaagtgtaagacattgagccacaaacatggaatctcttctttgtactggatgtccacttcccttaaagtcttatttgcacccttac

SEQ ID NO: 196782 - DNA, 597 bp, Homo sapiens
  Payload ID: 18808
  Gene Name: tyrosyl-DNA phosphodiesterase 1
  ENST ID: ENST00000556498
  CDS Start-End: 113-597
gggttatagctctatttgcactcgctgtttagctggtccgaatttcttgtcctgcgtccaagaataatgaggttaggctgacaaccgaaggggaaaagggcggaggagtataatgtctcaggaaggcgattatgggaggtggaccatatctagtagtgatgaaagtgaggaagaaaagccaaaaccagacaagccatctacctcttctcttctctgtgccaggcaaggagcagcaaatgagcccaggtacacctgttccgaggcccagaaagctgcacacaagaggaaaatatcacctgtgaaattcagcaatacagattcagttttacctcccaaaaggcagaaaagcggttcccaggaggacctcggctggtgtctgtccagcagtgatgatgagctgcaaccagaaatgccgcagaagcaggctgagaaagtggtgatcaaaaaggagaaagacatctctgctcccaatgacggcactgcccaaagaactgaaaatcatggcgctcccgcctgccacaggctcaaagaggaggaagacgagtatgagacatcaggggagggccaggacatttgggacatgctggataaagggaa

SEQ ID NO: 196783 - DNA, 748 bp, Homo sapiens
  Payload ID: 18808
  Gene Name: tyrosyl-DNA phosphodiesterase 1
  ENST ID: ENST00000556867
  CDS Start-End: 294-748
cgcggactcggtgcggtctctcgcgggctgcggtcgggcccgggatcctgctcctggccgagtcgcggtgcgcgggctgctggggtccggcagggctggaggcggaccgcgaggaagcggcgcggccgggaagatggggcagggtcgcctcggccccggggcctcggtttcctccgatcacagcgcctcagggggcgcgcacgggcgctgcggagacctgtgtcctgccggggcgcggcgctaggggcccctgctcgggtttttattcccagacctaagcttacaggagtataatgtctcaggaaggcgattatgggaggtggaccatatctagtagtgatgaaagtgaggaagaaaagccaaaaccagacaagccatctacctcttctcttctctgtgccaggcaaggagcagcaaatgagcccaggtacacctgttccgaggcccagaaagctgcacacaagaggaaaatatcacctgtgaaattcagcaatacagattcagttttacctcccaaaaggcagaaaagcggttcccaggaggacctcggctggtgtctgtccagcagtgatgatgagctgcaaccagaaatgccgcagaagcaggctgagaaagtggtgatcaaaaaggagaaagacatctctgctcccaatgacggcactgcccaaagaactgaaaatcatggcgctcccgcctgccacaggctcaaagaggaggaagacgagtatgagacatcaggggagggcca

SEQ ID NO: 196784 - DNA, 728 bp, Homo sapiens
  Payload ID: 18808
  Gene Name: tyrosyl-DNA phosphodiesterase 1
  ENST ID: ENST00000553989
  CDS Start-End: 286-728
aacgccttcagcaagagccctctcacttcctttgtcttcaacccattctccgcagagttggagcacacagctgtattaaaaaggcaaatcgaaggccgggcgcggtgactcacgcctgtcatcctagcactttgggaggccgaggcggctgaatcacttgaggttaggagtttgagatcagcccgggcaacatggtgaaaccccgtctctacaaaaatagaaaaattagccgagcgtgatggtggatgcctgtaatcctagctcctcgggaggctaaggagtataatgtctcaggaaggcgattatgggaggtggaccatatctagtagtgatgaaagtgaggaagaaaagccaaaaccagacaagccatctacctcttctcttctctgtgccaggcaaggagcagcaaatgagcccaggtacacctgttccgaggcccagaaagctgcacacaagaggaaaatatcacctgtgaaattcagcaatacagattcagttttacctcccaaaaggcagaaaagcggttcccaggaggacctcggctggtgtctgtccagcagtgatgatgagctgcaaccagaaatgccgcagaagcaggctgagaaagtggtgatcaaaaaggagaaagacatctctgctcccaatgacggcactgcccaaagaactgaaaatcatggcgctcccgcctgccacaggctcaaagaggaggaagacgagtatgagacatc

SEQ ID NO: 196785 - DNA, 2200 bp, Homo sapiens
  Payload ID: 18808
  Gene Name: tyrosyl-DNA phosphodiesterase 1
  ENST ID: ENST00000555178
  CDS Start-End: 237-1016
ccgcagagttggagcacacagctgtattaaaaaggcaaatcgaaggccgggcgcggtgactcacgcctgtcatcctagcactttgggaggccgaggcggctgaatcacttgaggttaggagtttgagatcagcccgggcaacatggtgaaaccccgtctctacaaaaatagaaaaattagccgagcgtgatggtggatgcctgtaatcctagctcctcgggaggctaaggagtataatgtctcaggaaggcgattatgggaggtggaccatatctagtagtgatgaaagtgaggaagaaaagccaaaaccagacaagccatctacctcttctcttctctgtgccaggcaaggagcagcaaatgagcccaggtacacctgttccgaggcccagaaagctgcacacaagaggaaaatatcacctgtgaaattcagcaatacagattcagttttacctcccaaaaggcagaaaagcggttcccaggaggacctcggctggtgtctgtccagcagtgatgatgagctgcaaccagaaatgccgcagaagcaggctgagaaagtggtgatcaaaaaggagaaagacatctctgctcccaatgacggcactgcccaaagaactgaaaatcatggcgctcccgcctgccacaggctcaaagaggaggaagacgagtatgagacatcaggggagggccaggacatttgggacatgctggataaagggaaccccttccagttttacctcactagagtctctggagttaagccaaagtataactctggagccctccacatcaaggatattttatctcctttatttgggacgcttgtttcttcagctcagtttaactactgctttgacgtggactggctcgtaaaacagtatccaccagagttcaggaagaagccaatcctgcttgtgcatggtgataagcgagaggctaaggctcacctccatgcccaggccaagccttacgagaacatctctctctgccaggaaaatgatgctgctgctctatgaagaaggcctccgggttgtcatacacacctccaacctcatccatgctgactggcaccagaaaactcaaggaatatggttgagccccttatacccacgaattgctgatggaacccacaaatctggagagtcgccaacacattttaaagctgatctcatcagttacttgatggcttataatgccccttctctcaaggagtggatagatgtcattcacaagcacgatctctctgaaacaaatgtttatcttattggttcaaccccaggacgctttcaaggaagtcaaaaagataattggggacattttagacttaagaagcttctgaaagaccatgcctcatccatgcctaacgcagagtcctggcctgtcgtaggtcagttttcaagcgttggctccttgggagccgatgaatcaaagtggttatgttctgagtttaaagagagcatgctgacactggggaaggaaagcaagactccaggaaaaagctctgttcctctttacttgatctatccttctgtggaaaatgtgcggaccagtttagaaggatatcctgctgggggctctcttccctatagcatccagacagctgaaaaacagaattggctgcattcctattttcacaaatggtcagctgagacttctggccgcagcaatgccatgccacatattaagacatatatgaggccttctccagacttcagtaaaattgcttggttccttgtcacaagcgcaaatctgtccaaggctgcctggggagcattggagaagaatggcacccagctgatgatccgctcctacgagctcggggtccttttcctcccttcagcatttggtctagacagtttcaaagtgaaacagaagttcttcgctggcagccaggagccaatggccacctttcctgtgccatatgatttgcctccagaactgtatggaagtaaagatcggccatggatatggaacattccttatgtcaaagcaccggatacgcatgggaacatgtgggtgccctcctgagaatcttgaggcactgtgaaatttaagtgtaagacattgagccacaaacatggaatctcttctttgtactggatgtccacttcccttaaagtcttatttgcacccttacaaaatctttccaaaggtcactcttatgaatggatgttggttatacttttaatggacattaaca

SEQ ID NO: 196786 - DNA, 2120 bp, Homo sapiens
  Payload ID: 18809
  Gene Name: tyrosyl-DNA phosphodiesterase 2
  ENST ID: ENST00000341060
  CDS Start-End: 397-1311
cgagcctccggtggaggagagcgccttggaacgccgacctgaaaccatctctgagcccaagacctagtaagtgatgaggggagcgggagccagtccgcacggaggcagtttgataccaggtagccctgcgcgtcctgggacctgccgtggagctgggcggacgatgctgaggcagatctccaagctgcgtagccagaggagcagggcttgcgttgctgctgctgcgcggagttgcgccccagcagcggatctaacactgcaccagactgtcgcttcgaacgtgatttggggtccagggaggaaaagatggaaatgtaatgtttaactcaaatgaaaggaaataagtaagcgagaggtttgaaacaaatgaacgaaggctaaaccttctatcgaaaaatggcaacttggaagtctccttgcttcctgtattgtttatttattctaggccctaggctgaccggccagaataacagtgttgacctaaccaatgaagaaacaactgattccaccacttctaaaatcagcccatctgaagatactcagcaagaaaatggcagcatgttctctctcattacctggaatattgatggattagatctaaacaatctgtcagagagggctcgaggggtgtgttcctacttagctttgtacagcccagatgtgatatttctacaggaagttattcccccatattatagctacctaaagaagagatcaagtaattatgagattattacaggtcatgaagaaggatatttcacagctataatgttgaagaaatcaagagtgaaattaaaaagccaagagattattccttttccaagtaccaaaatgatgagaaaccttttatgtgtgcatgtgaacgtgtcaggaaatgagctttgccttatgacatcccatttggagagcaccagagggcatgctgcggaacgaatgaatcagttaaaaatggttttaaagaaaatgcaagaggctccagagtcagctacagttatatttgcaggagatacaaatctaagggatcgagaggttaccagatgtggtggtttacccaacaacattgtggatgtctgggagtttttgggcaaacctaaacattgccagtatacatgggatacacaaatgaactctaatcttggaataactgctgcttgtaaacttcgttttgatcgaatatttttcagagcagcagcagaagagggacacattattccccgaagtttggaccttcttggattagaaaaactggactgtggtagatttcctagtgatcactggggtcttctgtgcaacttagatataatattgtaaaatgcttttcaagtgtgggttttgccctgattgttgcaaatacaatttccaccttctggaaaggtaggtttgctgtggaggaaataatgtactagatcattgtcacagaaaaaccaactatgatttatggttgtgttttcagaattcaacattaaagattaatgtttatttaaacgaacacattcctgcattcaggatgtgaggccatttaataaaaagggcacaaagcctgtcagagttttcaacggtgcttatagctgccagctggattccaaacaggtaccacattgtctctgagctaatgtttatatttttccattcaggcaccgaaatagttaatatttgaaataagtcttcaaaagaaaacataagagattattgagttcttgggactggatcctttatttcataagttcagatcatcttaaatgaaaatgccatgattatctgcagttaagtagatgacagctattctacatcagacttgatttttgtcagctaattacataattggtaagctataattgaaaccttatggcttaaaattccttaactcctttttgattcatgtttgtagtcatgttgtcaacagaggcaaagttaagcttgatgatggttaaaatcggtttgatagcaccatgggacatttttctaacaaaaataaatgcatgaagagacatagccttttagttttgctaattgtgaaatggaaatgctttacaggaagtaaatgcaaattacttttaagtgtgctttaaagaaaaatattttccccacaagagaaatttaaataaagaattttatttgtt

SEQ ID NO: 196787 - DNA, 2071 bp, Homo sapiens
  Payload ID: 18809
  Gene Name: tyrosyl-DNA phosphodiesterase 2
  Uniprot ID: O95551
  ENST ID: ENST00000378198
  CDS Start-End: 172-1260
gcacccaccgccccggcggctcccttgcggcgcagctgcaccagttttccgagagcagcgcatttccccgccgggcggttgatgcgggagcgccatgacacaggcgcctgcgcagagccgcgcgttggcctcctgttccgcttaaaggggcggtgcagaggcggcaggaagatggagttggggagttgcctggagggcgggagggaggcggcggaggaagagggcgagcctgaggtgaaaaagcggcgacttctgtgtgtggagtttgcctcggtcgcaagctgcgatgccgcagtggctcagtgcttcctggccgagaacgactgggagatggaaagggctctgaactcctacttcgagcctccggtggaggagagcgccttggaacgccgacctgaaaccatctctgagcccaagacctatgttgacctaaccaatgaagaaacaactgattccaccacttctaaaatcagcccatctgaagatactcagcaagaaaatggcagcatgttctctctcattacctggaatattgatggattagatctaaacaatctgtcagagagggctcgaggggtgtgttcctacttagctttgtacagcccagatgtgatatttctacaggaagttattcccccatattatagctacctaaagaagagatcaagtaattatgagattattacaggtcatgaagaaggatatttcacagctataatgttgaagaaatcaagagtgaaattaaaaagccaagagattattccttttccaagtaccaaaatgatgagaaaccttttatgtgtgcatgtgaacgtgtcaggaaatgagctttgccttatgacatcccatttggagagcaccagagggcatgctgcggaacgaatgaatcagttaaaaatggttttaaagaaaatgcaagaggctccagagtcagctacagttatatttgcaggagatacaaatctaagggatcgagaggttaccagatgtggtggtttacccaacaacattgtggatgtctgggagtttttgggcaaacctaaacattgccagtatacatgggatacacaaatgaactctaatcttggaataactgctgcttgtaaacttcgttttgatcgaatatttttcagagcagcagcagaagagggacacattattccccgaagtttggaccttcttggattagaaaaactggactgtggtagatttcctagtgatcactggggtcttctgtgcaacttagatataatattgtaaaatgcttttcaagtgtgggttttgccctgattgttgcaaatacaatttccaccttctggaaaggtaggtttgctgtggaggaaataatgtactagatcattgtcacagaaaaaccaactatgatttatggttgtgttttcagaattcaacattaaagattaatgtttatttaaacgaacacattcctgcattcaggatgtgaggccatttaataaaaagggcacaaagcctgtcagagttttcaacggtgcttatagctgccagctggattccaaacaggtaccacattgtctctgagctaatgtttatatttttccattcaggcaccgaaatagttaatatttgaaataagtcttcaaaagaaaacataagagattattgagttcttgggactggatcctttatttcataagttcagatcatcttaaatgaaaatgccatgattatctgcagttaagtagatgacagctattctacatcagacttgatttttgtcagctaattacataattggtaagctataattgaaaccttatggcttaaaattccttaactcctttttgattcatgtttgtagtcatgttgtcaacagaggcaaagttaagcttgatgatggttaaaatcggtttgatagcaccatgggacatttttctaacaaaaataaatgcatgaagagacatagccttttagttttgctaattgtgaaatggaaatgctttacaggaagtaaatgcaaattacttttaagtgtgctttaaagaaaaatattttccccacaagagaaatttaaataaagaattttatttgttta

SEQ ID NO: 196788 - DNA, 2116 bp, Homo sapiens
  Payload ID: 18810
  Gene Name: tyrosylprotein sulfotransferase 1
  Uniprot ID: O60507
  ENST ID: ENST00000304842
  CDS Start-End: 426-1538
tccttcggtgggcagccggccggaactcacgaatcagagcagccgacacatcgtccgctcagccaatcgtagcagatgtgtgatcccgccacctccccggaccctggcggttgtcgctgagttggcgaccgcgggagacgctgctgaggcggcttcggttgcgggtcggaacggcgctgctctgcggggccggtccaggctggcagctgccggcgcttggcggtgagggcgggctcccgagtggccccccaccgaaggcggtgggaccagcggctgaggccaggatgccgtccaggcggcgcggcggctcctcactcatcccagatgttggttatctttctgaagtagactgtccatggcctgaacattttccgaaaatcattttgagcaaaatatctgtttaataacaagataaccacatcaagatggttggaaagctgaagcagaacttactattggcatgtctggtgattagttctgtgactgtgttttacctgggccagcatgccatggaatgccatcaccggatagaggaacgtagccagccagtcaaattggagagcacaaggaccactgtgagaactggcctggacctcaaagccaacaaaacctttgcctatcacaaagatatgcctttaatatttattggaggtgtgcctcggagtggaaccacactcatgagggccatgctggacgcacatcctgacattcgctgtggagaggaaaccagggtcattccccgaatcctggccctgaagcagatgtggtcacggtcaagtaaagagaagatccgcctggatgaggctggtgttactgatgaagtgctggattctgccatgcaagccttcttactagaaattatcgttaagcatggggagccagccccttatttatgtaataaagatccttttgccctgaaatctttaacttacctttctaggttattccccaatgccaaatttctcctgatggtccgagatggccgggcatcagtacattcaatgatttctcgaaaagttactatagctggatttgatctgaacagctatagggactgtttgacaaagtggaatcgtgctatagagaccatgtataaccagtgtatggaggttggttataaaaagtgcatgttggttcactatgaacaacttgtcttacatcctgaacggtggatgagaacactcttaaagttcctccagattccatggaaccactcagtattgcaccatgaagagatgattgggaaagctgggggagtgtctctgtcaaaagtggagagatctacagaccaagtaatcaagccagtcaatgtaggagctctatcaaaatgggttgggaagataccgccagatgttttacaagacatggcagtgattgctcctatgcttgccaagcttggatatgacccatatgccaacccacctaactacggaaaacctgatcccaaaattattgaaaacactcgaagggtctataagggagaattccaactacctgactttcttaaagaaaaaccacagactgagcaagtggagtagcagaaccaggagcctcttccatacatgaggaaagattgctgccttttcagcagaagggaaattcctaggattggctgtcccctgccaagcttggtggagcgtctgcaccttggctgcgccgcctgtgcatttgccagtttcctcccactgagaggatggaggtgtccgcacagctttgggcctcgtgagggatctgcctcctgagcaaagagctcttgatcccgatttcatgcacagccctgcagtaaggagcccagaaggaacatgtgtttcctgttaaaactcctcttgttctcttttcttacattatgacgtttgttttcaaggagagggtttaaaaatgggatcctgtaagcagacttgggcagtctccttttgaaataggttgtctgtacatgttctaatgttttgtagaacacgtgtgcctgtttaagtgtattgatgtgaataatattaaatatcctaattatttaattcattgtattgtttctgagaagttgggaaattaccattatacatttacaacctaatgacttttgtattttatttttcaaaataaaagctttcaatgtgaagca

SEQ ID NO: 196789 - DNA, 562 bp, Homo sapiens
  Payload ID: 18810
  Gene Name: tyrosylprotein sulfotransferase 1
  ENST ID: ENST00000451388
  CDS Start-End: 141-562
attacagtgtaagtgagagctggctgcagatgaagcaggatgttggttatctttctgaagtagactgtccatggcctgaacattttccgaaaatcattttgagcaaaatatctgtttaataacaagataaccacatcaagatggttggaaagctgaagcagaacttactattggcatgtctggtgattagttctgtgactgtgttttacctgggccagcatgccatggaatgccatcaccggatagaggaacgtagccagccagtcaaattggagagcacaaggaccactgtgagaactggcctggacctcaaagccaacaaaacctttgcctatcacaaagatatgcctttaatatttattggaggtgtgcctcggagtggaaccacactcatgagggccatgctggacgcacatcctgacattcgctgtggagaggaaaccagggtcattccccgaatcctggccctgaagcagatgtggtcacggtcaagtaaagagaagatccgcctggatgaggctggtgttactgatgaagtgctggattctgccatgcaagcctt

SEQ ID NO: 196790 - DNA, 560 bp, Homo sapiens
  Payload ID: 18810
  Gene Name: tyrosylprotein sulfotransferase 1
  ENST ID: ENST00000442120
  CDS Start-End: 436-560
gagttggcgaccgcgggagacgctgctgaggcggcttcggttgcgggtcggaacggcgctgctctgcggggccggtccaggctggcagctgccggcgcttggcggtgagggcgggctcccgagtggccccccaccgaaggcggtgggaccagcggctgaggccaggatgccgtccaggcggcgcggcggctcctcactcatcccagccctgggaccacgtcctagccccgcagtcccctgggatgagaccctcgtctcgccgggatcggacatttgcccccacgtctaccccggctgcgcttcttgagctcatcgccccatcatcctacccgttatgttggttatctttctgaagtagactgtccatggcctgaacattttccgaaaatcattttgagcaaaatatctgtttaataacaagataaccacatcaagatggttggaaagctgaagcagaacttactattggcatgtctggtgattagttctgtgactgtgttttacctgggccagcatgccatggaatgccatcaccggatagaggaacgtagccagccagt

SEQ ID NO: 196791 - DNA, 5697 bp, Homo sapiens
  Payload ID: 18811
  Gene Name: tyrosylprotein sulfotransferase 2
  Uniprot ID: O60704
  ENST ID: ENST00000338754
  CDS Start-End: 272-1405
acgtcgccgcggccccgcccccgcgcgggcacctcccccttccccggctggggcggctggagagccgggagtcgctgggtgcgtggggctgcctcgccgcgtctcgccacgggctctgccagcagacagccttggcacacaggcacaagggctggagcccagagatgagagtgcccaagggagatgtgagcctggcgggctgcccgctaacctgtcgctgaagccccagaagcgggccctcaggccaggcctaccctgcctccggcccagcatgcgcctgtcggtgcggagggtgctgctggcagccggctgcgccctggtcctggtgctggcggttcagctgggacagcaggtgctagagtgccgggcggtgctggcgggcctgcggagcccccggggggccatgcggcctgagcaggaggagctggtgatggtgggcaccaaccacgtggaataccgctatggcaaggccatgccgctcatcttcgtgggtggcgtgcctcgcagtggcaccacgttgatgcgcgccatgctggacgcgcaccccgaggtgcgctgcggcgaggagacccgcatcatcccgcgcgtgctggccatgcgccaggcctggtccaagtctggccgtgagaagctgcggctggatgaggcgggggtgacggatgaggtgctggacgccgccatgcaggccttcatcctggaggtgattgccaagcacggagagccggcccgcgtgctctgcaacaaggacccatttacgctcaagtcctcggtctacctgtcgcgcctgttccccaactccaagttcctgctgatggtgcgggacggccgggcctccgtgcactccatgatcacgcgcaaagtcaccattgcgggctttgacctcagcagctaccgtgactgcctcaccaagtggaacaaggccatcgaggtgatgtacgcccagtgcatggaggtaggcaaggagaagtgcctgcctgtgtactacgagcagctggtgctgcaccccaggcgctcactcaagctcatcctcgacttcctcggcatcgcctggagcgacgctgtcctccaccatgaagacctcattggcaagcccggtggtgtctccctgtccaagatcgagcggtccacggaccaggtcatcaagcctgttaacctggaagcgctctccaagtggactggccacatccctggggatgtggtgcgggacatggcccagatcgcccccatgctggctcagctcggctatgacccttatgcaaacccccccaactatggcaaccctgaccccttcgtcatcaacaacacacagcgggtcttgaaaggggactataaaacaccagccaatctgaaaggatattttcaggtgaaccagaacagcacctcctcccacttaggaagctcgtgatttccagatctccgcaaatgacttcattgccaagaagagaagaaaatgcatttaagtggaaatcggacctctaatccaagcatattgcttgctattaatcgccaaaacaggactgctgatgaggaatgtatttgcatatgtttgcaaaagctgaatcattgaaaacgtaccttgaaactctctatctctggacactccagggtagagaatgaagggtatggaagtagtccggcttttgaaacttaggtattttatatttttcccctcaagaacttttttttaagagacagatttgccatcctccttaatttgcaggactgccttggtggctttgtttgctgggacaaggcccacaacctgtgcctctcctattgacccttactttgaattcaaagaatctatttaagagtttaatatatgaggctttctttgattcctcctcagttctacctagtttcacagaggaaaaaaatactctttgaataaagtgaacagaggctcatttgtttgtgccttactttactgaatgaatagggttttttttttctttccatactggattttgtcaggtagatttgtgatgagcaaaaagctggagaatataggtgcatgtaaggcacagctgaattcctgtgtcagggtccccagggccacccccaggatcgatgattggctagaagaactcagaattcagaagagctattatccttatggttatggtttattacagcaaaaggataaacattaaaatcagcaaaagaggccgggtggagtggctcacgcctgtaatcccagcactttgggaggccaaggcaggcagatcgcctgaggtcaggagttcgagaccagcctggccaacatggtgaaaccccgtctctactaaaaatacaaaaattacctgggcgtggtggtgtgcacctgtaatcccagctactcaggaggcttgaacctgggaggcggaggttgcagtgagcggagatcgtgccattatactccagcctgggtgacagagcaagactccatctcaaaataaaatcaacaaaagaaaaaggtgcatagggcagagtccgggagagaccggcctcaagcttccagttgtcatctcctggtagagtcttacagacacacttaattttcccagcaatgatatgtgacaacacgtactaaatattaccagccagaaagctcaccctagccttggggtctaggtttttattgcatgtcagtcacatagggcaatcacatgaccgactttagttacttaatcaccagctgctccagaggtcaaaatgatacagcatggcccaaggtccccaccataaatcacattattagcacaaactatctggcctggtatggcccaaggcctgaggtatacaaagacacccctacttgggaggatattccaaggacttagaggttatctcccaggagcccattaaggccagttttttctttgagatgtgctgggtttggacacttcaagcctgctgagttaacccttatagcacagtccccaaatgctgagggaccaactgggcctacaataagtttgtatctttaagggttaaggtgttttacccatacctccttgccttatatctcatgataatatgaggcttttggaaggcagtgacttattgtggcttggggcatgggtttttggagtcaggctgacctactggctgtatggcttgagactttgtctcttcatctgtaaaatggggaagttaaaacttcatggtgtgtatgtgtgtatgtgtgtgtttagacagaatctcgctctgtcactcaggctagagtacagtggcgtgatcatagctcactgcagcctcggtctcctagggtcaggtgatcctcccatcttagcctcctgagtagctgggcatgtgccaccacacctggctactttttaaatttttttttttctgtagagacgaggtctttctatgctgttcaggctgaacttcatgggtttattggggatggctaatggatgacattggcggtggtccttgataccagataagccctcagtgtgaagcagctcttatttttccttgtcttgagattgctctggaatggaaattaggcttttttgaaggtgtgaccctttttgttcatttcttcagcagttactttttattttttaaatgtttgacacacagtctctgataaatgatcattcaccaatcaccgattactctccttgctctgttaagtgtgacactgtccctttgagaatctggcgacagctatgtatcccatcaccacacaccccaaaaaaaaaatttatgtctggttccaggagttaccttttatgagaagtccatctgtgaagaccctggatgttcagagaacttcctgggaaaacactgaaagaaaataaagaggccgggcccggtggctcatgcttgtaatcccagcactttgggaggctgaggtgggcagataagctgaggtcaggagttccagaccagcctggccaacgtggcgaaaccccatctactaaaaatacaaaaattagctgggcgtcgtggcgcatgcctgtagttgcagctacttgggaggctgaggcaggagaattgcttgaacccaggaggcagaggttgcagtgaaccaagatcatgctagtacactccagcctgggcaacagagtgagactccatctcaaaaataaaataaataaaacaaaataaaataaatacaatttctgtttctagcccctaagtggtagcactgggtcttgttccctgaaaaaaactaggctcagaatccactctcatttcatctcccctgatttgatctgaaaagattttgtttagagtactacatgaatatattataaaacatgggacaatcagaattgatagtaagaaggcaagtggctctatttgtacttcctctcaatagctcctaaaggtaatgctaccattttctgtttgtacatagtcttccagactttaaatttttgaacatataaatattatcatcttaaagacgtatggaaaaaaccattttgaataggttattccaaaatgtaatttaacagattgctctggaggattgtttgtttgtttgttttggagacagagtcccgcttggttgctcaggctgcagtgcagtggcacaaacacagctcactgcaacctctaactcctgcaaacacagctcactgcaacctctaactcctgcaaacacagctcactgcaacctctaactcctgcaaacacagctcactgcaacctctaactcctgcaaacacagctcactgcaacctctaactcctgggctcaagcagtcctttcacctcagcctcctgagtagctggaccatgacacctacctaactttttattttttgtaaagaggggaatcactatgttgcccaggctggtctcaaactcctgggctcaagcaatccttcctcagcctctcaaagagttgggtttacaggcgtgagccaccgcacctggctcctggagcatttctgatgtgaacatgtgctgatctaacaccactccttttaccagctgcctgttctagagcaaaccatcttttttgagcattccactttggctaggcccttaggctgttagcagttttcatcgctactggcaaagctgcagtggacgttctcctgcacatataacctcttgatgccactgtatgagtgagtctctgcaaaatgagaagtagaattgctggggtgaaaggcatacatactaacttttttgattaattccacccatgtaccctgatttgggcagaattttaatctcactgtgaaatcagagctttgttctagagcctttcttgggggttccatggatcagtgggtcagccgtcacttgtgccctggcccatcctctgtccagcttgggcagcatgcatcattcattctgattccttaatttgccatatgtgaaaacatggtaatctatacattacttgggtgctattattatatataactagctttggagtcagaattagcgtctcatcctggctctaccactttccaactgtgcgactgtggccaagtgactccccttctctgagcctcagttttcctcttctgtaaaatgggggtaaagggataagaactatagggggatctcaggggatggttaagagaaatccatgagataagcaaacacattatctagtttagtaaagctaagcaatgaagacttaacagccccatggtgaaggcttaatacatggtagctataatgattactattaatattgtgaaataaaaggttgtgatgaaccaaccatatcttctca

SEQ ID NO: 196792 - DNA, 1968 bp, Homo sapiens
  Payload ID: 18811
  Gene Name: tyrosylprotein sulfotransferase 2
  Uniprot ID: O60704
  ENST ID: ENST00000398110
  CDS Start-End: 306-1439
aaaggagcctcccagctaaaagccagcaggagagagaccttggccaccaagggtctgccagctcctggtggtccccactccagccacctgccagctcgagcctgaccctcgcctccaccctggctgctgcctgtaccgctctcagggctctgccagcagacagccttggcacacaggcacaagggctggagcccagagatgagagtgcccaagggagatgtgagcctggcgggctgcccgctaacctgtcgctgaagccccagaagcgggccctcaggccaggcctaccctgcctccggcccagcatgcgcctgtcggtgcggagggtgctgctggcagccggctgcgccctggtcctggtgctggcggttcagctgggacagcaggtgctagagtgccgggcggtgctggcgggcctgcggagcccccggggggccatgcggcctgagcaggaggagctggtgatggtgggcaccaaccacgtggaataccgctatggcaaggccatgccgctcatcttcgtgggtggcgtgcctcgcagtggcaccacgttgatgcgcgccatgctggacgcgcaccccgaggtgcgctgcggcgaggagacccgcatcatcccgcgcgtgctggccatgcgccaggcctggtccaagtctggccgtgagaagctgcggctggatgaggcgggggtgacggatgaggtgctggacgccgccatgcaggccttcatcctggaggtgattgccaagcacggagagccggcccgcgtgctctgcaacaaggacccatttacgctcaagtcctcggtctacctgtcgcgcctgttccccaactccaagttcctgctgatggtgcgggacggccgggcctccgtgcactccatgatcacgcgcaaagtcaccattgcgggctttgacctcagcagctaccgtgactgcctcaccaagtggaacaaggccatcgaggtgatgtacgcccagtgcatggaggtaggcaaggagaagtgcctgcctgtgtactacgagcagctggtgctgcaccccaggcgctcactcaagctcatcctcgacttcctcggcatcgcctggagcgacgctgtcctccaccatgaagacctcattggcaagcccggtggtgtctccctgtccaagatcgagcggtccacggaccaggtcatcaagcctgttaacctggaagcgctctccaagtggactggccacatccctggggatgtggtgcgggacatggcccagatcgcccccatgctggctcagctcggctatgacccttatgcaaacccccccaactatggcaaccctgaccccttcgtcatcaacaacacacagcgggtcttgaaaggggactataaaacaccagccaatctgaaaggatattttcaggtgaaccagaacagcacctcctcccacttaggaagctcgtgatttccagatctccgcaaatgacttcattgccaagaagagaagaaaatgcatttaagtggaaatcggacctctaatccaagcatattgcttgctattaatcgccaaaacaggactgctgatgaggaatgtatttgcatatgtttgcaaaagctgaatcattgaaaacgtaccttgaaactctctatctctggacactccagggtagagaatgaagggtatggaagtagtccggcttttgaaacttaggtattttatatttttcccctcaagaacttttttttaagagacagatttgccatcctccttaatttgcaggactgccttggtggctttgtttgctgggacaaggcccacaacctgtgcctctcctattgacccttactttgaattcaaagaatctatttaagagtttaatatatgaggctttctttgattcctcctcagttctacctagtttcacagaggaaaaaaatactctttgaataaagtgaacagaggctcatttgtttgtgccttactttactgaatg

SEQ ID NO: 196793 - DNA, 2084 bp, Homo sapiens
  Payload ID: 18811
  Gene Name: tyrosylprotein sulfotransferase 2
  Uniprot ID: O60704
  ENST ID: ENST00000403880
  CDS Start-End: 422-1555
aaattctactgcagtggagtccatcttcacagtcatatgagccccctgaaattgacttccatagttctttaccttcaaggtcttattgttgggctctgccagcagacagccttggcacacaggcacaagggctggagcccagagatgagagtgcccaagggagaccctgaatcgagggtacaaatgaagccccaacctcttcagcagaacttcatcagcacgtttttctgaagagagggaaattatccaatgcacagagaggccggtgaccccagcctgagatccatctctggtttgtcagctgcttctcatattttcacagcagcctctgagatgtgagcctggcgggctgcccgctaacctgtcgctgaagccccagaagcgggccctcaggccaggcctaccctgcctccggcccagcatgcgcctgtcggtgcggagggtgctgctggcagccggctgcgccctggtcctggtgctggcggttcagctgggacagcaggtgctagagtgccgggcggtgctggcgggcctgcggagcccccggggggccatgcggcctgagcaggaggagctggtgatggtgggcaccaaccacgtggaataccgctatggcaaggccatgccgctcatcttcgtgggtggcgtgcctcgcagtggcaccacgttgatgcgcgccatgctggacgcgcaccccgaggtgcgctgcggcgaggagacccgcatcatcccgcgcgtgctggccatgcgccaggcctggtccaagtctggccgtgagaagctgcggctggatgaggcgggggtgacggatgaggtgctggacgccgccatgcaggccttcatcctggaggtgattgccaagcacggagagccggcccgcgtgctctgcaacaaggacccatttacgctcaagtcctcggtctacctgtcgcgcctgttccccaactccaagttcctgctgatggtgcgggacggccgggcctccgtgcactccatgatcacgcgcaaagtcaccattgcgggctttgacctcagcagctaccgtgactgcctcaccaagtggaacaaggccatcgaggtgatgtacgcccagtgcatggaggtaggcaaggagaagtgcctgcctgtgtactacgagcagctggtgctgcaccccaggcgctcactcaagctcatcctcgacttcctcggcatcgcctggagcgacgctgtcctccaccatgaagacctcattggcaagcccggtggtgtctccctgtccaagatcgagcggtccacggaccaggtcatcaagcctgttaacctggaagcgctctccaagtggactggccacatccctggggatgtggtgcgggacatggcccagatcgcccccatgctggctcagctcggctatgacccttatgcaaacccccccaactatggcaaccctgaccccttcgtcatcaacaacacacagcgggtcttgaaaggggactataaaacaccagccaatctgaaaggatattttcaggtgaaccagaacagcacctcctcccacttaggaagctcgtgatttccagatctccgcaaatgacttcattgccaagaagagaagaaaatgcatttaagtggaaatcggacctctaatccaagcatattgcttgctattaatcgccaaaacaggactgctgatgaggaatgtatttgcatatgtttgcaaaagctgaatcattgaaaacgtaccttgaaactctctatctctggacactccagggtagagaatgaagggtatggaagtagtccggcttttgaaacttaggtattttatatttttcccctcaagaacttttttttaagagacagatttgccatcctccttaatttgcaggactgccttggtggctttgtttgctgggacaaggcccacaacctgtgcctctcctattgacccttactttgaattcaaagaatctatttaagagtttaatatatgaggctttctttgattcctcctcagttctacctagtttcacagaggaaaaaaatactctttgaataaagtgaacagaggctcatttgtttgtgccttactttactgaatg

SEQ ID NO: 196794 - DNA, 582 bp, Homo sapiens
  Payload ID: 18811
  Gene Name: tyrosylprotein sulfotransferase 2
  ENST ID: ENST00000454778
  CDS Start-End: 223-582
attgcagggctgatggctgagcctgagcacgtgggcactgggccctgctccagggccactctggctctgccagcagacagccttggcacacaggcacaagggctggagcccagagatgagagtgcccaagggagatgtgagcctggcgggctgcccgctaacctgtcgctgaagccccagaagcgggccctcaggccaggcctaccctgcctccggcccagcatgcgcctgtcggtgcggagggtgctgctggcagccggctgcgccctggtcctggtgctggcggttcagctgggacagcaggtgctagagtgccgggcggtgctggcgggcctgcggagcccccggggggccatgcggcctgagcaggaggagctggtgatggtgggcaccaaccacgtggaataccgctatggcaaggccatgccgctcatcttcgtgggtggcgtgcctcgcagtggcaccacgttgatgcgcgccatgctggacgcgcaccccgaggtgcgctgcggcgaggagacccgcatcatcccgcgcgtgctggccatgcgccaggcctggtccaagtctggccgtgagaag

SEQ ID NO: 196795 - DNA, 514 bp, Homo sapiens
  Payload ID: 18811
  Gene Name: tyrosylprotein sulfotransferase 2
  ENST ID: ENST00000453117
  CDS Start-End: 369-514
ttacttctgtaacatagctactggaaaactgagaatttgaagtgtgtctcacactgcatttctattgggtggcgctgttacaaactacaggaaggagctagaattctgtggaaggttttaggcaggggctgacatcctctggccaaaatgacaagagggaattccagagaccagggcaagtctggccacagggagactgcatggcctaggagacctgagccacagccgccaagagaagccctgattccccagagaggaggtgcccgctgccagtccacagatgtgagcctggcgggctgcccgctaacctgtcgctgaagccccagaagcgggccctcaggccaggcctaccctgcctccggcccagcatgcgcctgtcggtgcggagggtgctgctggcagccggctgcgccctggtcctggtgctggcggttcagctgggacagcaggtgctagagtgccgggcggtgctggcgggcctgcggagcccccggggggccatgcggcctgagca

SEQ ID NO: 196796 - DNA, 675 bp, Homo sapiens
  Payload ID: 18811
  Gene Name: tyrosylprotein sulfotransferase 2
  ENST ID: ENST00000445720
  CDS Start-End: 1-507
gacttcctcggcatcgcctggagcgacgctgtcctccaccatgaagacctcattggcaagcccggtggtgtctccctgtccaagatcgagcggtccacggaccaggtcatcaagcctgttaacctggaagcgctctccaagtggactggccacatccctggggatgtggtgcgggacatggcccagatcgcccccatgctggctcagctcggctatgacccttatgcaaacccccccaactatggcaaccctgaccccttcgtcatcaacaacacacagcgggtgagtgtgcacctgtacttgtggaagtgtactcttggggatatggggcttctgcagatgtggaaactccagccacctgaggaaatgttcagtctctcaattcctggtcatctgatttgttcctgtctgatggacacagtgaactacatgattgcttgtatttccattttgcttgggctgcagggaagctcaaagccaactggtagcctgtctctcatactctaacatctaacagcaggccagcttgtacactaatttcatcttatttctctaattttatttacatttttacccctatttccctggctatttgtttatctgtttgtaaggcacctcaagtctttgttgagagggggtataaataaataaactattggtccctttcttgtctta

SEQ ID NO: 196797 - DNA, 586 bp, Homo sapiens
  Payload ID: 18811
  Gene Name: tyrosylprotein sulfotransferase 2
  ENST ID: ENST00000442495
  CDS Start-End: 162-586
cttccccggctggggcggctggagagccgggagtcgctgggtgcgtggggctgcctcgccgcgtctcgccacgatgtgagcctggcgggctgcccgctaacctgtcgctgaagccccagaagcgggccctcaggccaggcctaccctgcctccggcccagcatgcgcctgtcggtgcggagggtgctgctggcagccggctgcgccctggtcctggtgctggcggttcagctgggacagcaggtgctagagtgccgggcggtgctggcgggcctgcggagcccccggggggccatgcggcctgagcaggaggagctggtgatggtgggcaccaaccacgtggaataccgctatggcaaggccatgccgctcatcttcgtgggtggcgtgcctcgcagtggcaccacgttgatgcgcgccatgctggacgcgcaccccgaggtgcgctgcggcgaggagacccgcatcatcccgcgcgtgctggccatgcgccaggcctggtccaagtctggccgtgagaagctgcggctggatgaggcgggggtgacggatgaggtgctggacgccgccatgcaggccttcatcct

SEQ ID NO: 196798 - DNA, 544 bp, Homo sapiens
  Payload ID: 18811
  Gene Name: tyrosylprotein sulfotransferase 2
  ENST ID: ENST00000450022
  CDS Start-End: 404-544
cttccccggctggggcggctggagagccgggagtcgctgggtgcgtggggctgcctcgccgcgtctcgccacgggctctgccagcagacagccttggcacacaggcacaagggctggagcccagagatgagagtgcccaagggagaccctgaatcgagggtacaaatgaagccccaacctcttcagcagaacttcatcagcacgtttttctgaagagagggaaattatccaatgcacagagaggccggtgaccccagcctgagatccatctctggtttgtcagctgcttctcatattttcacagcagcctctgagatgtgagcctggcgggctgcccgctaacctgtcgctgaagccccagaagcgggccctcaggccaggcctaccctgcctccggcccagcatgcgcctgtcggtgcggagggtgctgctggcagccggctgcgccctggtcctggtgctggcggttcagctgggacagcaggtgctagagtgccgggcggtgctggcgggcctgcggagcccccggggggccatgcggcct

SEQ ID NO: 196799 - DNA, 544 bp, Homo sapiens
  Payload ID: 18811
  Gene Name: tyrosylprotein sulfotransferase 2
  ENST ID: ENST00000440953
  CDS Start-End: 353-544
cttccccggctggggcggctggagagccgggagtcgctgggtgcgtggggctgcctcgccgcgtctcgccacgtgtggtttctatttgttggcgattttgctgtgtggtagagtcgtgctcaccctgcacccacgtgggcctttcttagcttaaaatggagaacatgccaccacctgcctgactgggctgatggctctgccagcagacagccttggcacacaggcacaagggctggagcccagagatgagagtgcccaagggagatgtgagcctggcgggctgcccgctaacctgtcgctgaagccccagaagcgggccctcaggccaggcctaccctgcctccggcccagcatgcgcctgtcggtgcggagggtgctgctggcagccggctgcgccctggtcctggtgctggcggttcagctgggacagcaggtgctagagtgccgggcggtgctggcgggcctgcggagcccccggggggccatgcggcctgagcaggaggagctggtgatggtgggcaccaaccacgtggaataccgctat

SEQ ID NO: 196800 - DNA, 3238 bp, Homo sapiens
  Payload ID: 18812
  Gene Name: tyrosyl-tRNA synthetase
  Uniprot ID: P54577
  ENST ID: ENST00000373477
  CDS Start-End: 910-2496
ctgtgctgtgcgctcctctcccggggaccaccgtcctcagatctccccagggaatgggtcgtcctcttcctgcccccacccgcgagacgcggcagaaaagcccgcggctatcttcccgccagcaacagcctcccgccgagccggccgggacagaggcggcccccacccccactgggcaggggactgcagacggcgctccccgactctcaagacgaccagggagcttcccttttcctcagcggggtgaggggcatctgtcgcccgccgacttggaggtggaggggcagggacattccctcgccatcacctcaggagctagaacgcgcccttctcgcagcagggcgtgggcctcccaatccctccaaggggcggacggcgtgcgcaaccccctggagaagcaacaggcgcccccatccccctccaagccgggtaacgccgaccccctcgtccctcccgctcttcacctccggaagccgggccaaagcctgggcgaacgactgcgcctcactccgccccctgcgccattttatcgccccctccccgacctcccctaccccgagtcagccgggccaacaccagggggagggcaaaccagcagtgattggcaggaaaccgtcccgcctctaggagggttgtgccccgctcaggcgcctcagccccgccctccgcaccgcccaccgtgcccactggctccaccttttcccgtctcatcgacctgctcgactctctgctgctcctcactttttccggccgctgccggaggggtccaggccgagtaagcggagcgccgagcccagctgatgcaacctggctggactcgcgtgacagttcccggcacgcggcggcgacggtgacccaggaaggggctctggtgccgggctgagcgggggaagcaggggtagcggagccatgggggacgctcccagccctgaagagaaactgcaccttatcacccggaacctgcaggaggttctgggggaagagaagctgaaggagatactgaaggagcgggaacttaaaatttactggggaacggcaaccacgggcaaaccacatgtggcttactttgtgcccatgtcaaagattgcagacttcttaaaggcagggtgtgaggtaacaattctgtttgcggacctccacgcatacctggataacatgaaagccccatgggaacttctagaactccgagtcagttactatgagaatgtgatcaaagcaatgctggagagcattggtgtgcccttggagaagctcaagttcatcaaaggcactgattaccagctcagcaaagagtacacactagatgtgtacagactctcctccgtggtcacacagcacgattccaagaaggctggagctgaggtggtaaagcaggtggagcaccctttgctgagtggcctcttataccccggactgcaggctttggatgaagagtatttaaaagtagatgcccaatttggaggcattgatcagagaaagattttcacctttgcagagaagtacctccctgcacttggctattcaaaacgggtccatctgatgaatcctatggttccaggattaacaggcagcaaaatgagctcttcagaagaggagtccaagattgatctccttgatcggaaggaggatgtgaagaaaaaactgaagaaggccttctgtgagccaggaaatgtggagaacaatggggttctgtccttcatcaagcatgtcctttttccccttaagtccgagtttgtgatcctacgagatgagaaatggggtggaaacaaaacctacacagcttacgtggacctggaaaaggactttgctgctgaggttgtacatcctggagacctgaagaattctgttgaagtcgcactgaacaagttgctggatccaatccgggaaaagtttaatacccctgccctgaaaaaactggccagcgctgcctacccagatccctcaaagcagaagccaatggccaaaggccctgccaagaattcagaaccagaggaggtcatcccatcccggctggatatccgtgtggggaaaatcatcactgtggagaagcacccagatgcagacagcctgtatgtagagaagattgacgtgggggaagctgaaccacggactgtggtgagcggcctggtacagttcgtgcccaaggaggaactgcaggacaggctggtagtggtgctgtgcaacctgaaaccccagaagatgagaggagtcgagtcccaaggcatgcttctgtgtgcttctatagaagggataaaccgccaggttgaacctctggaccctccggcaggctctgctcctggtgagcacgtgtttgtgaagggctatgaaaagggccaaccagatgaggagctcaagcccaagaagaaagtcttcgagaagttgcaggctgacttcaaaatttctgaggagtgcatcgcacagtggaagcaaaccaacttcatgaccaagctgggctccatttcctgtaaatcgctgaaaggggggaacattagctagccagcccagcatcttccccccttcttccaccactgagtcatctgctgtctcttcagtctgctccatccatcacccatttacccatctctcaggacacggaagcagcgggtttggactctttattcggtgcagaactcggcaaggggcagcttaccctccccagaacccaggatcatcctgtctggctgcagtgagagaccaacccctaacaagggctgggccacagcagggagtccagccctaccttcttcccttggcagctggagaaatctggtttcaatataactcatttaaaaatttatgccacagtccttataattggaaaaatactggtgcccaggttttcttggagttatccaagcagctgcgcccctagctgggatctggtacctggactaggctaattacagcttctccccaacaggaaactgtgggatttgaaaaggaaagggaagggaaaacagagaacctagtggtctaccaagtggttggcaactttcccaatgtctgcttactctgaggcttggcactgggggccagggcctgccccagggctcctggaatttcccttgatccagctaggctgggacactccctaaatcagctgcgtgttgttagcatcaggcagaatgaatggcagagagtgattctgtcttcatagagggtggggtacttctccataaggcatctcagtcaaatccccatcactgtcataaattcaaataaaatgtctgaacaaggg

SEQ ID NO: 196801 - DNA, 1167 bp, Homo sapiens
  Payload ID: 18812
  Gene Name: tyrosyl-tRNA synthetase
  ENST ID: ENST00000616261
  CDS Start-End: 1-1167
atgggggacgctcccagccctgaagagaaactgcaccttatcacccggaacctgcaggaggttctgggggaagagaagctgaaggagatactgaaggagcgggaacttaaaatttactggggaacggcaaccacgggcaaaccacatgtggcttactttgtgcccatgtcaaagattgcagacttcttaaaggcagggtgtgaggtaacaattctgtttgcggacctccacgcatacctggataacatgaaagccccatgggaacttctagaactccgagtcagttactatgagaatgtgatcaaagcaatgctggagagcattggtgtgcccttggagaagctcaagttcatcaaaggcactgattaccagctcagcaaagagtacacactagatgtgtacagactctcctccgtggtcacacagcacgattccaagaaggctggagctgaggtggtaaagcaggtggagcaccctttgctgagtggcctcttataccccggactgcaggctttggatgaagagtatttaaaagtagatgcccaatttggaggcattgatcagagaaagattttcacctttgcagagaagtacctccctgcacttggctattcaaaacgggtccatctgatgaatcctatggttccaggattaacaggcagcaaaatgagctcttcagaagaggagtccaagattgatctccttgatcggaaggaggatgtgaagaaaaaactgaagaaggccttctgtgagccaggaaatgtggagaacaatggggttctgtccttcatcaagcatgtcctttttccccttaagtccgagtttgtgatcctacgagatgagaaatggggtggaaacaaaacctacacagcttacgtggacctggaaaaggactttgctgctgaggttgtacatcctggagacctgaagaattctgttgaagtcgcactgaacaagttgctggatccaatccgggaaaagtttaatacccctgccctgaaaaaactggccagcgctgcctacccagatccctcaaagcagaagccaatggccaaaggcctgccaagaattcagaaccagaggaggtcatcccatcccggctggatatccgtgtggggaaaatcatcactgtggagaagcacccagatgcagacagcctgtatgtag

SEQ ID NO: 196802 - DNA, 2122 bp, Homo sapiens
  Payload ID: 18813
  Gene Name: tyrosyl-tRNA synthetase 2, mitochondrial
  Uniprot ID: Q9Y2Z4
  ENST ID: ENST00000324868
  CDS Start-End: 29-1462
ccagcattcccttcgtgccgctaccaagatggcggcgcccatcttgcggtccttttcctggggccggtggtctggtaccctaaatctctcagtattgttgcccttggggctgcgtaaggcccactcgggcgctcaggggttactggcagcgcagaaggctcgaggtctgttcaaggacttcttcccggagacggggacgaaaatagagctcccagagctcttcgaccgtggcacggcgagttttccccaaaccatttactgtggcttcgaccccacggcagactcgcttcatgtgggtcatctacttgcgctgctgggcctgtttcatttgcagcgagcgggccacaacgtgatcgcgctggtgggaggcgccacggcgcgcctgggagacccgagcggccgtaccaaggaacgcgaggcgctggagacagagcgcgtgcgagccaacgcgcgagctctgcgcctagggcttgaggccctggcggctaatcaccagcagcttttcactgatgggcgctcctggggcagcttcactgtgctggacaactcggcctggtaccagaagcagcacctggtggacttcctggcggcagtggggggtcacttccgcatggggacgctgctgagccggcagagcgtgcagctgcggctcaagagccccgagggcatgagcttggccgagttcttttaccaggtgctccaggcctatgacttctattacctcttccagcgttatggatgcagggtccagctgggcggatctgatcaactaggcaacatcatgtccggatatgagttcatcaacaagttgactggagaagatgtatttggaatcaccgttcctctaattacaagtacaactggagcaaagctgggaaagtctgctggcaacgctgtttggctaaacagagataagacatctccatttgaattgtatcaattctttgtcaggcaaccggacgattcagtggaaaggtacctgaagctgttcactttcctgccccttccagagattgatcatatcatgcagctgcatgtcaaagagccagaaaggcggggtcctcagaaacgactggcagcagaagtaacaaagcttgttcatggacgagaaggattggattctgctaaaaggtgtacacaagccctttatcacagtagcatagatgcactggaggtcatgtctgatcaggagttaaaagagttgtttaaagaagctccattttctgaattttttctcgatcctggaacaagtgtcctagatacttgccgcaaagcaaatgccattccagatggtccccgagggtatcgaatgataacagaaggcggagtcagcataaatcaccaacaagtaacaaatcctgagagtgttttaattgttggacaacatattctcaagaatggactttccttacttaaaataggaaaaagaaatttctacattataaaatggcttcagttgtgatgaaaagtccttctggttgtccaaataaacttacccatcattcattctcaagacctctgaagggttggctccagaacttagacctttgcttatgcaaatcagaaaaacagaatggactaggactcagtgtgagtaacttcattatttttatgggccggttaataaatatttgtttaataatgggatgttttattttctgatgtacaaagcttgattaccatagaaaaccatgattttcagggttaatctctttttaaaattatacttcagaagagaaagaaatgctgctttcctatcttacccttcctgctctcctttttgtagtgatgaggaacaatgaaaaagaggtagtgtaaggaattgtgaggctgggcatggtggctcacacctgtaatcccagcacttcgggaggccaaggtgggcaaatcgcttgaggccaggagtttgagaccagcctggccaacagggcgaaaccccgtctctactgaaaatataaaaattagccagatgtggttgcaggcacctgtaaccccagctactcaagaggctgagctgcgagaatcacttgaacccaggagatggaggttgcagtgagctgagatcacgccactgcactccagcctgggagacagcatgagtagtgagtgaaactctgtctca

SEQ ID NO: 196803 - DNA, 1321 bp, Homo sapiens
  Payload ID: 18813
  Gene Name: tyrosyl-tRNA synthetase 2, mitochondrial
  ENST ID: ENST00000548490
  CDS Start-End: 1-876
gggctgcgtaaggcccactcgggcgctcaggggttactggcagcgcagaaggctcgaggtctgttcaaggacttcttcccggagacggggacgaaaatagagctcccagagctcttcgaccgtggcacggcgagttttccccaaaccatttactgtggcttcgaccccacggcagactcgcttcatgtgggtcatctacttgcgctgctgggcctgtttcatttgcagcgagcgggccacaacgtgatcgcgctggtgggaggcgccacggcgcgcctgggagacccgagcggccgtaccaaggaacgcgaggcgctggagacagagcgcgtgcgagccaacgcgcgagctctgcgcctagggcttgaggccctggcggctaatcaccagcagcttttcactgatgggcgctcctggggcagcttcactgtgctggacaactcggcctggtaccagaagcagcacctggtggacttcctggcggcagtggggggtcacttccgcatggggacgctgctgagccggcagagcgtgcagctgcggctcaagagccccgagggcatgagcttggccgagttcttttaccaggtgctccaggcctatgacttctattacctcttccagcgttatggatgcagggtccagctgggcggatctgatcaactaggcaacatcatgtccggatatgagttcatcaacaagttgactggagaagatgtatttggaatcaccgttcctctaattacaagtacaactggagcaaagctgggaaagtctgctggcaacgctgtttggctaaacagagataagacatctccatttgaattgtatcaattctttgtcaggcaaccggacgattcagtggaaagagattgatcatatcatgcagctgcatgtcaaagagccagaaaggcggggtcctcagaaacgactggcagcagaagtaacaaagcttgttcatggacgagaaggattggattctgctaaaaggtgtacacaagccctttatcacagtagcatagatgcactggaggtcatgtctgatcaggagttaaaagagttgtttaaagaagctccattttctgaattttttctcgatcctggaacaagtgtcctagatacttgccgcaaagcaaatgccattccagatggtccccgagggtatcgaatgataacagaaggcggagtcagcataaatcaccaacaagtaacaaatcctgagagtgttttaattgttggacaacatattctcaagaatggactttccttacttaaaataggaaaaagaaatttctacattataaaatggcttcagttgtga

SEQ ID NO: 196804 - DNA, 962 bp, Homo sapiens
  Payload ID: 18814
  Gene Name: U2 small nuclear RNA auxiliary factor 1
  Uniprot ID: Q01081
  ENST ID: ENST00000291552
  CDS Start-End: 94-816
cgtcgtcgcgtccgggtgacgtctcccgagggcgtcggcagggtcggcggcgtcggcagcagtgtcgacggcagcggcggcggcgggtgggaaatggcggagtatctggcctccatcttcggcaccgagaaagacaaagtcaactgttcattttatttcaaaattggagcatgtcgtcatggagacaggtgctctcggttgcacaataaaccgacgtttagccagaccattgccctcttgaacatttaccgtaaccctcaaaactcttcccagtctgctgacggtttgcgctgtgccgtgagcgatgtggagatgcaggaacactatgatgagttttttgaggaggtttttacagaaatggaggagaagtatggggaagtagaggagatgaacgtctgtgacaacctgggagaccacctggtggggaacgtgtacgtcaagtttcgccgtgaggaagatgcggaaaaggctgtgattgacttgaataaccgttggtttaatggacagccgatccacgccgagctgtcacccgtgacggacttcagagaagcctgctgccgtcagtatgagatgggagaatgcacacgaggcggcttctgcaacttcatgcatttgaagcccatttccagagagctgcggcgggagctgtatggccgccgtcgcaagaagcatagatcaagatcccgatcccgggagcgtcgttctcggtctagagaccgtggtcgtggcggtggcggtggcggtggtggaggtggcggcggacgggagcgtgacaggaggcggtcgagagatcgtgaaagatctgggcgattctgagccatgccatttttaccttatgtctgctagaaagtgttgtagttgattgaccaaaccagttcataaggggaattttttttaaaaaacaacaaaaaaaaaaacatacaaagatgggtttctgaataaaatttgtagtgataacagta

SEQ ID NO: 196805 - DNA, 940 bp, Homo sapiens
  Payload ID: 18814
  Gene Name: U2 small nuclear RNA auxiliary factor 1
  Uniprot ID: Q01081
  ENST ID: ENST00000380276
  CDS Start-End: 72-794
ctcccgagggcgtcggcagggtcggcggcgtcggcagcagtgtcgacggcagcggcggcggcgggtgggaaatggcggagtatctggcctccatcttcggcaccgagaaagacaaagtcaactgttcattttatttcaaaattggagcatgtcgtcatggagacaggtgctctcggttgcacaataaaccgacgtttagccagaccatcttgattcaaaacatctatcgtaatccccaaaacagtgcacagacggctgacggctcacactgtgccgtgagcgatgtggagatgcaggaacactatgatgagttttttgaggaggtttttacagaaatggaggagaagtatggggaagtagaggagatgaacgtctgtgacaacctgggagaccacctggtggggaacgtgtacgtcaagtttcgccgtgaggaagatgcggaaaaggctgtgattgacttgaataaccgttggtttaatggacagccgatccacgccgagctgtcacccgtgacggacttcagagaagcctgctgccgtcagtatgagatgggagaatgcacacgaggcggcttctgcaacttcatgcatttgaagcccatttccagagagctgcggcgggagctgtatggccgccgtcgcaagaagcatagatcaagatcccgatcccgggagcgtcgttctcggtctagagaccgtggtcgtggcggtggcggtggcggtggtggaggtggcggcggacgggagcgtgacaggaggcggtcgagagatcgtgaaagatctgggcgattctgagccatgccatttttaccttatgtctgctagaaagtgttgtagttgattgaccaaaccagttcataaggggaattttttttaaaaaacaacaaaaaaaaaaacatacaaagatgggtttctgaataaaatttgtagtgataacagta

SEQ ID NO: 196806 - DNA, 1019 bp, Homo sapiens
  Payload ID: 18814
  Gene Name: U2 small nuclear RNA auxiliary factor 1
  Uniprot ID: Q01081
  ENST ID: ENST00000398137
  CDS Start-End: 371-874
gtccgggtgacgtctcccgagggcgtcggcagggtcggcggcgtcggcagcagtgtcgacggcagcggcggcggcgggtgggaaatggcggagtatctggcctccatcttcggcaccgagaaagacaaagtcaactgttcattttatttcaaaattggagcatgtcgtcatggagacaggtgctctcggttgcacaataaaccgacgtttagccagaccatcttgattcaaaacatctatcgtaatccccaaaacagtgcacagacggctgacggctcacactaccattgccctcttgaacatttaccgtaaccctcaaaactcttcccagtctgctgacggtttgcgctgtgccgtgagcgatgtggagatgcaggaacactatgatgagttttttgaggaggtttttacagaaatggaggagaagtatggggaagtagaggagatgaacgtctgtgacaacctgggagaccacctggtggggaacgtgtacgtcaagtttcgccgtgaggaagatgcggaaaaggctgtgattgacttgaataaccgttggtttaatggacagccgatccacgccgagctgtcacccgtgacggacttcagagaagcctgctgccgtcagtatgagatgggagaatgcacacgaggcggcttctgcaacttcatgcatttgaagcccatttccagagagctgcggcgggagctgtatggccgccgtcgcaagaagcatagatcaagatcccgatcccgggagcgtcgttctcggtctagagaccgtggtcgtggcggtggcggtggcggtggtggaggtggcggcggacgggagcgtgacaggaggcggtcgagagatcgtgaaagatctgggcgattctgagccatgccatttttaccttatgtctgctagaaagtgttgtagttgattgaccaaaccagttcataaggggaattttttttaaaaaacaacaaaaaaaaaaacatacaaagatgggtttctgaataaaatttgtagtgataacagt

SEQ ID NO: 196807 - DNA, 1675 bp, Homo sapiens
  Payload ID: 18814
  Gene Name: U2 small nuclear RNA auxiliary factor 1
  Uniprot ID: Q01081
  ENST ID: ENST00000459639
  CDS Start-End: 1026-1529
ccctccctgacattgctggcacacaggcatgattgctggttccattggatatggatctggattgtcagcgtatttgaacagtattaagggagggttttgcagtagagacagaaggtgacgtaaggtggttcctaaggtgggttcggtcagtcccctaatagtttgttttcagtgtattgagaccaggagaattgatttacttcagacctattttttgaaactccctgttggtctggtgtcatgcgtttagagagactctgaacttcgttttctgttttccttagataatgatagcacttcatgagcaccatatgtgaagcacacatacgttctgtctgactctcagaacagtgccacattggcattgtcatcatttacagatgacatctgagagctagggtgacttgcccaagcccaagcagctggtagcagagttgggatcttaaccctcaccacaccggtgttttcaagagagaacttggtcgtggagaactggagaacagatactgcctaagttacatttagttttagactaatttaatactccatttaagaaacaaacagaacagctgtgcagttaggaaagtggaggggatttgaatgaggaggaggcgggttagagttagaaccgtctttgctgaacaagtagtgtgtttgcagaaagggaagttgaagttacgttgtcctaaaatacagcaaggaagaggaggtgcttaataccacggaaaaaagtctgtgtcatgtttctgtgaggttaaaagtaatttgatagtgtatgtcatgctgctgacatattccatgtgtttgatatcttcccagcaaaataatcagctctcattttcccttacagagtcaactgttcattttatttcaaaattggagcatgtcgtcatggagacaggtgctctcggttgcacaataaaccgacgtttagccagaccattgccctcttgaacatttaccgtaaccctcaaaactcttcccagtctgctgacggtttgcgctgtgccgtgagcgatgtggagatgcaggaacactatgatgagttttttgaggaggtttttacagaaatggaggagaagtatggggaagtagaggagatgaacgtctgtgacaacctgggagaccacctggtggggaacgtgtacgtcaagtttcgccgtgaggaagatgcggaaaaggctgtgattgacttgaataaccgttggtttaatggacagccgatccacgccgagctgtcacccgtgacggacttcagagaagcctgctgccgtcagtatgagatgggagaatgcacacgaggcggcttctgcaacttcatgcatttgaagcccatttccagagagctgcggcgggagctgtatggccgccgtcgcaagaagcatagatcaagatcccgatcccgggagcgtcgttctcggtctagagaccgtggtcgtggcggtggcggtggcggtggtggaggtggcggcggacgggagcgtgacaggaggcggtcgagagatcgtgaaagatctgggcgattctgagccatgccatttttaccttatgtctgctagaaagtgttgtagttgattgaccaaaccagttcataaggggaattttttttaaaaaacaacaaaaaaaaaaacatacaaagatgggtttctgaataaaatttgtagtgataacagta

SEQ ID NO: 196808 - DNA, 966 bp, Homo sapiens
  Payload ID: 18814
  Gene Name: U2 small nuclear RNA auxiliary factor 1
  Uniprot ID: Q01081
  ENST ID: ENST00000464750
  CDS Start-End: 31-258
gtcgacggcagcggcggcggcgggtgggaaatggcggagtatctggcctccatcttcggcaccgagaaagacaaagtcaactgttcattttatttcaaaattggagcatgtcgtcatggagacaggtgctctcggttgcacaataaaccgacgtttagccagaccatcttgattcaaaacatctatcgtaatccccaaaacagtgcacagacggctgacggctcacactaccattgccctcttgaacatttaccgtaaccctcaaaactcttcccagtctgctgacggtttgcgctgtgccgtgagcgatgtggagatgcaggaacactatgatgagttttttgaggaggtttttacagaaatggaggagaagtatggggaagtagaggagatgaacgtctgtgacaacctgggagaccacctggtggggaacgtgtacgtcaagtttcgccgtgaggaagatgcggaaaaggctgtgattgacttgaataaccgttggtttaatggacagccgatccacgccgagctgtcacccgtgacggacttcagagaagcctgctgccgtcagtatgagatgggagaatgcacacgaggcggcttctgcaacttcatgcatttgaagcccatttccagagagctgcggcgggagctgtatggccgccgtcgcaagaagcatagatcaagatcccgatcccgggagcgtcgttctcggtctagagaccgtggtcgtggcggtggcggtggcggtggtggaggtggcggcggacgggagcgtgacaggaggcggtcgagagatcgtgaaagatctgggcgattctgagccatgccatttttaccttatgtctgctagaaagtgttgtagttgattgaccaaaccagttcataaggggaattttttttaaaaaacaacaaaaaaaaaaacatacaaagatgggtttctgaataaaatttgtagtgataacagta

SEQ ID NO: 196809 - DNA, 729 bp, Homo sapiens
  Payload ID: 18815
  Gene Name: U2 small nuclear RNA auxiliary factor 1-like 4
  Uniprot ID: Q8WU68
  ENST ID: ENST00000292879
  CDS Start-End: 55-663
cctaagcaacggaagtgacgtaagagcagccagacctggagggcttgggtaaaaatggctgaatatttagcttcgatattcgggactgagaaggacaaggttaactgctctttttactttaagatcggggtctgccggcacggggaccggtgctcccggcttcacaacaagccgacattcagccaggaggtgttcacagaactgcaggagaagtatggggagattgaagagatgaatgtgtgcgacaaccttggggaccacctcgtgggcaacgtctatgtcaagttccggagggaggaggatggagagcgggccgtggctgaactcagtaaccgctggttcaacgggcaggctgtgcacgggaatgtacccgaggtggcttctgcaacttcatgcatctgcggcccatttcccagaacctccagaggcagctctatgggcggggacccaggcgcaggtcacccccgaggttccatactggccaccatccccgagagaggaaccatcggtgttcccctgatcactggcatggccgcttctgaggccctggcccccttacccttcacccccaacagggacagatgttcctggcaggacctctcctcaaagcccccttcactctcctgccccatccttcccaggctcccgggctccataatgtaatctgttcagcatggagaccttcttctaccgcccctgtcttaataaagctgcgtgtttcacttcggc

SEQ ID NO: 196810 - DNA, 747 bp, Homo sapiens
  Payload ID: 18815
  Gene Name: U2 small nuclear RNA auxiliary factor 1-like 4
  Uniprot ID: Q8WU68
  ENST ID: ENST00000378975
  CDS Start-End: 15-560
gggcttgggtaaaaatggctgaatatttagcttcgatattcgggactgagaaggacaaggttaactgctctttttactttaagatcggggtctgccggcacggggaccggtgctcccggcttcacaacaagccgacattcagccaggaggtgttcacagaactgcaggagaagtatggggagattgaagagatgaatgtgtgcgacaaccttggggaccacctcgtgggcaacgtctatgtcaagttccggagggaggaggatggagagcgggccgtggctgaactcagtaaccgctggttcaacgggcaggctgtgcacggtgagctgtctcctgtcactgacttccgggagtcatgctgtcgccagtatgagatgggggaatgtacccgaggtggcttctgcaacttcatgcatctgcggcccatttcccagaacctccagaggcagctctatgggcggggacccaggcgcaggtcacccccgaggttccatactggccaccatccccgagagaggaaccatcggtgttcccctgatcactggcatggccgcttctgaggccctggcccccttacccttcacccccaacagggacagatgttcctggcaggacctctcctcaaagcccccttcactctcctgccccatccttcccaggctcccgggctccataatgtaatctgttcagcatggagaccttcttctaccgcccctgtcttaataaagctgcgtgtttcacttcggc

SEQ ID NO: 196811 - DNA, 904 bp, Homo sapiens
  Payload ID: 18815
  Gene Name: U2 small nuclear RNA auxiliary factor 1-like 4
  Uniprot ID: Q8WU68
  ENST ID: ENST00000412391
  CDS Start-End: 52-714
aagcaacggaagtgacgtaagagcagccagacctggagggcttgggtaaaaatggctgaatatttagcttcgatattcgggactgagaaggacaaggttaactgctctttttactttaagatcggggtctgccggcacggggaccggtgctcccggcttcacaacaagccgacattcagccagaccatagtgctgctcaacctgtaccggaatccacagaacacagcccaaactgcagacggatcacactgtcatgtgagtgacgtggaggtgcaggagcactatgatagcttcttcgaggaggtgttcacagaactgcaggagaagtatggggagattgaagagatgaatgtgtgcgacaaccttggggaccacctcgtgggcaacgtctatgtcaagttccggagggaggaggatggagagcgggccgtggctgaactcagtaaccgctggttcaacgggcaggctgtgcacggtgagctgtctcctgtcactgacttccgggagtcatgctgtcgccagtatgagatgggggaatgtacccgaggtggcttctgcaacttcatgcatctgcggcccatttcccagaacctccagaggcagctctatgggcggggacccaggcgcaggtcacccccgaggttccatactggccaccatccccgagagaggaaccatcggtgttcccctgatcactggcatggccgcttctgaggccctggcccccttacccttcacccccaacagggacagatgttcctggcaggacctctcctcaaagcccccttcactctcctgccccatccttcccaggctcccgggctccataatgtaatctgttcagcatggagaccttcttctaccgcccctgtcttaataaagctgcgtgtttcacttcggcatc

SEQ ID NO: 196812 - DNA, 1036 bp, Homo sapiens
  Payload ID: 18815
  Gene Name: U2 small nuclear RNA auxiliary factor 1-like 4
  ENST ID: ENST00000587987
  CDS Start-End: 24-143
agacctggagggcttgggtaaaaatggctgaatatttagcttcgatattcgggactgagaaggacaaatcggggtctgccggcacggggaccggtgctcccggcttcacaacaagccgacattcagccagccctgccctctgagctcaggccccgccccttttaaattctgtgcagaccatagtgctgctcaacctgtaccggaatccacagaacacagcccaaactgcagacggatcacactgaggtgttcacagaactgcaggagaagtatggggagattgaagagatgaatgtgtgcgacaaccttggggaccacctcgtgggcaacgtctatgtcaagttccggagggaggaggatggagagcgggccgtggctgaactcagtaaccgctggttcaacgggcaggctgtgcacggtgagctgtctcctgtcactgacttccgggagtcatgctgtcgccagtatgagatgggggaatgtacccgaggtggcttctgcaacttcatgcatctgcggcccatttcccagaacctccagaggcagctctatgggcggggacccaggcgcaggctggagtgcaaaggcgcagtcttggctcagtgcaacctctgcctcccaggttcaagcaattctcctttctcagcctcccaagtagctgggattataggcacctgccaccatgcctggctaatttttgtatttttagtagagatggggtttcaccacgttggccagcctggtctcgaactccggacctcaggtcacccccgaggttccatactggccaccatccccgagagaggaaccatcggtgttcccctgatcactggcatggccgcttctgaggccctggcccccttacccttcacccccaacagggacagatgttcctggcaggacctctcctcaaagcccccttcactctcctgccccatccttcccaggctcccgggctccataatgtaatctgttcagcatggagaccttcttctaccgcccctgtcttaataaagctgcgtgtttcacttcggca

SEQ ID NO: 196813 - DNA, 561 bp, Homo sapiens
  Payload ID: 18815
  Gene Name: U2 small nuclear RNA auxiliary factor 1-like 4
  ENST ID: ENST00000591057
  CDS Start-End: 28-183
agccagacctggagggcttgggtaaaaatggctgaatatttagcttcgatattcgggactgagaaggacaaatcggggtctgccggcacggggaccggtgctcccggcttcacaacaagccgacattcagccaggaggtgttcacagaactgcaggagaagtatggggagattgaagagatgaatgtgtgcgacaaccttggggaccacctcgtgggcaacgtctatgtcaagttccggagggaggaggatggagagcgggccgtggctgaactcagtaaccgctggttcaacgggcaggctgtgcacgggaatgtacccgaggtggcttctgcaacttcatgcatctgcggcccatttcccagaacctccagaggcagctctatgggcggggacccaggcgcaggctcccgggctccataatgtaatctgttcagcatggagaccttcttctaccgcccctgtcttaataaagctgcgtgtttcacttcggcatcaacttgcttttgctgtggtttggcatttccctccacccacacatgtgacgaaaaggggaaacaag

SEQ ID NO: 196814 - DNA, 263 bp, Homo sapiens
  Payload ID: 18815
  Gene Name: U2 small nuclear RNA auxiliary factor 1-like 4
  ENST ID: ENST00000587886
  CDS Start-End: 234-263
gagcagccagacctggagggcttgggtaaaaatggctgaatatttagcttcgatattcgggactgagaaggacaaccctgccctctgagctcaggccccgccccttttaaattctgtgcagaccatagtgctgctcaacctgtaccggaatccacagaacacagcccaaactgcagacggatcacactgaggtgttcacagaactgcaggagaagtatggggagattgaagagatgaatgtgtgcgacaaccttggggaccac

SEQ ID NO: 196815 - DNA, 455 bp, Homo sapiens
  Payload ID: 18815
  Gene Name: U2 small nuclear RNA auxiliary factor 1-like 4
  ENST ID: ENST00000601236
  CDS Start-End: 26-226
ccagacctggagggcttgggtaaaaatggctgaatatttagcttcgatattcgggactgagaaggacaaggttaactgctctttttactttaagatcggggtctgccggcacggggaccggtgctcccggcttcacaacaagccgacattcagccagaccatagtgctgctcaacctgtaccggaatccacagaacacagcccaaactgcagacggatcacactgaggtgttcacagaactgcaggagaagtatggggagattgaagagatgaatgtgtgcgacaaccttggggaccacctcgtgggcaacgtctatgtcaagttccggagggaggaggatggagagcgggccgtggctgaactcagtaaccgctggttcaacgggcaggctgtgcacgggaatgtacccgaggtggcttctgcaacttcatgcatctgcggcccatttcccaga

SEQ ID NO: 196816 - DNA, 702 bp, Homo sapiens
  Payload ID: 18815
  Gene Name: U2 small nuclear RNA auxiliary factor 1-like 4
  ENST ID: ENST00000594792
  CDS Start-End: 1-102
tcccggcttcacaacaagccgacattcagccagaccatagtgctgctcaacctgtaccggaatccacagaacacagcccaaactgcagacggatcacactgaggtgttcacagaactgcaggagaagtatggggagattgaagagatgaatgtgtgcgacaaccttggggaccacctcgtgggcaacgtctatgtcaagttccggagggaggaggatggagagcgggccgtggctgaactcagtaaccgctggttcaacgggcaggctgtgcacggtgagctgtctcctgtcactgacttccgggagtcatgctgtcgccagtatgagatgggggaatgtacccgaggtggcttctgcaacttcatgcatctgcggcccatttcccagaacctccagaggcagctctatgggcggggacccaggcgcaggtcacccccgaggttccatactggccaccatccccgagagaggaaccatcggtgttcccctgatcactggcatggccgcttctgaggccctggcccccttacccttcacccccaacagggacagatgttcctggcaggacctctcctcaaagcccccttcactctcctgccccatccttcccaggctcccgggctccataatgtaatctgttcagcatggagaccttcttctaccgcccctgtcttaataaagctgcgtgtttcacttcggca

SEQ ID NO: 196817 - DNA, 525 bp, Homo sapiens
  Payload ID: 18815
  Gene Name: U2 small nuclear RNA auxiliary factor 1-like 4
  ENST ID: ENST00000589429
  CDS Start-End: 1-111
agtgctgctcaacctgtaccggaatccacagaacacagcccaaactgcagacggatcacactgaggtgttcacagaactgcaggagaagtatggggagattgaagagatgaatgtgtgcgacaaccttggggaccacctcgtgggcaacgtctatgtcaagttccggagggaggaggatggagagcgggccgtggctgaactcagtaaccgctggttcaacgggcaggctgtgcacgggaatgtacccgaggtggcttctgcaacttcatgcatctgcggcccatttcccagaacctccagaggcagctctatgggcggggacccaggcgcaggctggagtgcaaaggcgcagtcttggctcagtgcaacctctgcctcccagtagagatggggtttcaccacgttggccagcctggtctcgaactccggacctcaggctcccgggctccataatgtaatctgttcagcatggagaccttcttctaccgcccctgtcttaataaagctgcgtgtttcacttcggc

SEQ ID NO: 196818 - DNA, 525 bp, Homo sapiens
  Payload ID: 18815
  Gene Name: U2 small nuclear RNA auxiliary factor 1-like 4
  ENST ID: ENST00000600296
  CDS Start-End: 1-214
ccggcacggggaccggtgctcccggcttcacaacaagccgacattcagccagccctgccctctgagctcaggccccgccccttttaaattctgtgcagaccatagtgctgctcaacctgtaccggaatccacagaacacagcccaaactgcagacggatcacactgaggtgttcacagaactgcaggagaagtatggggagattgaagagatgaatgtgtgcgacaaccttggggaccacctcgtgggcaacgtctatgtcaagttccggagggaggaggatggagagcgggccgtggctgaactcagtaaccgctggttcaacgggcaggctgtgcacgggaatgtacccgaggtggcttctgcaacttcatgcatctgcggcccatttcccagaacctccagaggcagctctatgggcggggacccaggcgcaggctcccgggctccataatgtaatctgttcagcatggagaccttcttctaccgcccctgtcttaataaagctgcgtgtttcacttcggca

SEQ ID NO: 196819 - DNA, 723 bp, Homo sapiens
  Payload ID: 18815
  Gene Name: U2 small nuclear RNA auxiliary factor 1-like 4
  ENST ID: ENST00000591084
  CDS Start-End: 1-123
tgtgcagaccatagtgctgctcaacctgtaccggaatccacagaacacagcccaaactgcagacggatcacactgaggtgttcacagaactgcaggagaagtatggggagattgaagagatgaatgtgtgcgacaaccttggggaccacctcgtgggcaacgtctatgtcaagttccggagggaggaggatggagagcgggccgtggctgaactcagtaaccgctggttcaacgggcaggctgtgcacgggaatgtacccgaggtggcttctgcaacttcatgcatctgcggcccatttcccagaacctccagaggcagctctatgggcggggacccaggcgcaggctggagtgcaaaggcgcagtcttggctcagtgcaacctctgcctcccagagatggggtttcaccacgttggccagcctggtctcgaactccggacctcaggtcacccccgaggttccatactggccaccatccccgagagaggaaccatcggtgttcccctgatcactggcatggccgcttctgaggccctggcccccttacccttcacccccaacagggacagatgttcctggcaggacctctcctcaaagcccccttcactctcctgccccatccttcccaggctcccgggctccataatgtaatctgttcagcatggagaccttcttctaccgcccctgtcttaataaagctgcgtgtttcacttcggcatcaa

SEQ ID NO: 196820 - DNA, 963 bp, Homo sapiens
  Payload ID: 18816
  Gene Name: U2 small nuclear RNA auxiliary factor 1-like 5
  ENST ID: ENST00000620065
  CDS Start-End: 31-258
gtcgacggcagcggcggcggcgggtgggaaatggcggagtatctggcctccatcttcggcaccgagaaagacaaagtcaactgttcattttatttcaaaattggagcatgtcgtcatggagacaggtgctctcggttgcacaataaaccgacgtttagccagaccatcttgattcaaaacatctatcgtaatccccaaaacagtgcacagacggctgacggctcacactaccattgccctcttgaacatttaccgtaaccctcaaaactcttcccagtctgctgacggtttgcgctgtgccgtgagcgatgtggagatgcaggaacactatgatgagttttttgaggaggtttttacagaaatggaggagaagtatggggaagtagaggagatgaacgtctgtgacaacctgggagaccacctggtggggaacgtgtacgtcaagtttcgccgtgaggaagatgcggaaaaggctgtgattgacttgaataaccgttggtttaatggacagccgatccacgccgagctgtcacccgtgacggacttcagagaagcctgctgccgtcagtatgagatgggagaatgcacacgaggcggcttctgcaacttcatgcatttgaagcccatttccagagagctgcggcgggagctgtatggccgccgtcgcaagaagcatagatcaagatcccgatcccgggagcgtcgttctcggtctagagaccgtggtcgtggcggtggcggtggcggtggtggaggtggcggcggacgggagcgtgacaggaggcggtcgagagatcgtgaaagatctgggcgattctgagccatgccatttttaccttatgtctgctagaaagtgttgtagttgattgaccaaaccagttcataaggggaattttttttaaaaaacaacaaaaaaaaaaacatacaaagatgggtttctgaataaaatttgtagtgataaca

SEQ ID NO: 196821 - DNA, 813 bp, Homo sapiens
  Payload ID: 18816
  Gene Name: U2 small nuclear RNA auxiliary factor 1-like 5
  ENST ID: ENST00000619610
  CDS Start-End: 31-753
gtcgacggcagcggcggcggcgggtgggaaatggcggagtatctggcctccatcttcggcaccgagaaagacaaagtcaactgttcattttatttcaaaattggagcatgtcgtcatggagacaggtgctctcggttgcacaataaaccgacgtttagccagaccatcttgattcaaaacatctatcgtaatccccaaaacagtgcacagacggctgacggctcacactgtgccgtgagcgatgtggagatgcaggaacactatgatgagttttttgaggaggtttttacagaaatggaggagaagtatggggaagtagaggagatgaacgtctgtgacaacctgggagaccacctggtggggaacgtgtacgtcaagtttcgccgtgaggaagatgcggaaaaggctgtgattgacttgaataaccgttggtttaatggacagccgatccacgccgagctgtcacccgtgacggacttcagagaagcctgctgccgtcagtatgagatgggagaatgcacacgaggcggcttctgcaacttcatgcatttgaagcccatttccagagagctgcggcgggagctgtatggccgccgtcgcaagaagcatagatcaagatcccgatcccgggagcgtcgttctcggtctagagaccgtggtcgtggcggtggcggtggcggtggtggaggtggcggcggacgggagcgtgacaggaggcggtcgagagatcgtgaaagatctgggcgattctgagccatgccatttttaccttatgtctgctagaaagtgttgtagttgattgaccaaaccagt

SEQ ID NO: 196822 - DNA, 897 bp, Homo sapiens
  Payload ID: 18816
  Gene Name: U2 small nuclear RNA auxiliary factor 1-like 5
  ENST ID: ENST00000610664
  CDS Start-End: 29-751
cgacggcagcggcggcggcgggtgggaaatggcggagtatctggcctccatcttcggcaccgagaaagacaaagtcaactgttcattttatttcaaaattggagcatgtcgtcatggagacaggtgctctcggttgcacaataaaccgacgtttagccagaccattgccctcttgaacatttaccgtaaccctcaaaactcttcccagtctgctgacggtttgcgctgtgccgtgagcgatgtggagatgcaggaacactatgatgagttttttgaggaggtttttacagaaatggaggagaagtatggggaagtagaggagatgaacgtctgtgacaacctgggagaccacctggtggggaacgtgtacgtcaagtttcgccgtgaggaagatgcggaaaaggctgtgattgacttgaataaccgttggtttaatggacagccgatccacgccgagctgtcacccgtgacggacttcagagaagcctgctgccgtcagtatgagatgggagaatgcacacgaggcggcttctgcaacttcatgcatttgaagcccatttccagagagctgcggcgggagctgtatggccgccgtcgcaagaagcatagatcaagatcccgatcccgggagcgtcgttctcggtctagagaccgtggtcgtggcggtggcggtggcggtggtggaggtggcggcggacgggagcgtgacaggaggcggtcgagagatcgtgaaagatctgggcgattctgagccatgccatttttaccttatgtctgctagaaagtgttgtagttgattgaccaaaccagttcataaggggaattttttttaaaaaacaacaaaaaaaaaaacatacaaagatgggtttctgaataaaatttgtagtgataacagta

SEQ ID NO: 196823 - DNA, 1675 bp, Homo sapiens
  Payload ID: 18816
  Gene Name: U2 small nuclear RNA auxiliary factor 1-like 5
  ENST ID: ENST00000623375
  CDS Start-End: 1026-1529
ccctccctgacattgctggcacacaggcatgattgctggttccattggatatggatctggattgtcagcgtatttgaacagtattaagggagggttttgcagtagagacagaaggtgacgtaaggtggttcctaaggtgggtttggtcagtcccctaatagtttgttttcagtgtattgagaccaggagaattgatttacttcagacctattttttgaaactccctgttggtctggtgtcatgcgtttagagagactctgaacttcgttttctgttttccttagataatgatagcacttcatgagcaccatatgtgaagcacacatacgttctgtctgactctcagaacagtgccacattggcattgtcatcatttacagatgacatctgagagctagggtgacttgcccaagcccaagcagctggtagcagagttgggatcttaaccctcaccacaccggtcttttcaagagagaacttggtcgtggagaactggagaacagatactgcctaagttacatttagttttagactaatttaatactccatttaagaaacaaacagaacagctgtgcagttaggaaagtggaggggatttgaatgaggaggaggcgggttagagttagaaccgtctttgctgaacaagtagtgtgtttgcagaaagggaagttgaagttacgttgtcctaaaatacagcaaggaagaggaggtgcttaataccacggaaaaaagtctgtgtcatgtttctgtgaggttaaaagtaatttgatagtgtatgtcatgctgctgacatattccatgtgtttgatatcttcccagcaaaataatcagctctcattttcccttacagagtcaactgttcattttatttcaaaattggagcatgtcgtcatggagacaggtgctctcggttgcacaataaaccgacgtttagccagaccattgccctcttgaacatttaccgtaaccctcaaaactcttcccagtctgctgacggtttgcgctgtgccgtgagcgatgtggagatgcaggaacactatgatgagttttttgaggaggtttttacagaaatggaggagaagtatggggaagtagaggagatgaacgtctgtgacaacctgggagaccacctggtggggaacgtgtacgtcaagtttcgccgtgaggaagatgcggaaaaggctgtgattgacttgaataaccgttggtttaatggacagccgatccacgccgagctgtcacccgtgacggacttcagagaagcctgctgccgtcagtatgagatgggagaatgcacacgaggcggcttctgcaacttcatgcatttgaagcccatttccagagagctgcggcgggagctgtatggccgccgtcgcaagaagcatagatcaagatcccgatcccgggagcgtcgttctcggtctagagaccgtggtcgtggcggtggcggtggcggtggtggaggtggcggcggacgggagcgtgacaggaggcggtcgagagatcgtgaaagatctgggcgattctgagccatgccatttttaccttatgtctgctagaaagtgttgtagttgattgaccaaaccagttcataaggggaattttttttaaaaaacaacaaaaaaaaaaacatacaaagatgggtttctgaataaaatttgtagtgataacagta

SEQ ID NO: 196824 - DNA, 1698 bp, Homo sapiens
  Payload ID: 18817
  Gene Name: U2 small nuclear RNA auxiliary factor 2
  Uniprot ID: P26368
  ENST ID: ENST00000308924
  CDS Start-End: 41-1468
gaggcgaaagctgcacagggccctacgcggccgcctcagcatgtcggacttcgacgagttcgagcggcagctcaacgagaataaacaagagcgggacaaggagaaccggcatcggaagcgcagccacagccgctctcggagccgggaccgcaaacgccggagccggagccgcgaccggcgcaaccgggaccagcggagcgcctcccgggacaggcgacgacgcagcaaacctttgaccagaggcgctaaagaggagcacggtggactgattcgttccccccgccacgagaagaagaagaaggtccgtaaatactgggacgtgccacccccaggctttgagcacatcaccccaatgcagtacaaggccatgcaagctgcgggtcagattccagccactgctcttctccccaccatgacccctgacggtctggctgtgaccccaacgccggtgcccgtggtcgggagccagatgaccagacaagcccggcgcctctacgtgggcaacatcccctttggcatcactgaggaggccatgatggatttcttcaacgcccagatgcgcctgggggggctgacccaggcccctggcaacccagtgttggctgtgcagattaaccaggacaagaattttgcctttttggagttccgctcagtggacgagactacccaggctatggcctttgatggcatcatcttccagggccagtcactaaagatccgcaggcctcacgactaccagccgcttcctggcatgtcagagaacccctccgtctatgtgcctggggttgtgtccactgtggtccccgactctgcccacaagctgttcatcgggggcttacccaactacctgaacgatgaccaggtcaaagagctgctgacatcctttgggcccctcaaggccttcaacctggtcaaggacagtgccacggggctctccaagggctacgccttctgtgagtacgtggacatcaacgtcacggatcaggccattgcggggctgaacggcatgcagctgggggataagaagctgctggtccagagggcgagtgtgggagccaagaatgccacgctggtgagccccccgagcaccatcaatcagacgcctgtgaccctgcaagtgccgggcttgatgagctcccaggtgcagatgggcggccacccgactgaggtcctgtgcctcatgaacatggtgctgcctgaggagctgctggacgacgaggagtatgaggagatcgtggaggacgtgcgggacgagtgcagcaagtacgggcttgtcaagtccatcgagatcccccggcctgtggacggcgtcgaggtgcccggctgcggaaagatctttgtggagttcacctctgtgtttgactgccagaaagccatgcagggcctgacgggccgcaagttcgccaacagagtggttgtcacaaaatactgtgaccccgactcttatcaccgccgggacttctggtagaggcggctgggggagggtgggggcagggctggctgggggcttctccccactcccgccccccccttatccccctctgaagacgatgggcagaggagtgacagccgcagacacacgacagccggcagcaactggaatggcagcaattaagggtggggggcgggggttggggggttggggggttagggcagggaggggactggggaagtgcgcacacagcccacacagacaac

SEQ ID NO: 196825 - DNA, 3022 bp, Homo sapiens
  Payload ID: 18817
  Gene Name: U2 small nuclear RNA auxiliary factor 2
  Uniprot ID: P26368
  ENST ID: ENST00000450554
  CDS Start-End: 960-2375
gcaacctccgcagcggtcgcgcgcacccttcatccctcttgctgcttttgtctggcacaaccttctcaggccctccgcgaggccggccctttttttctttcactttccccacccggagagccaggtgccgagaactaggacctcgtccccttctctatcccttcccctgatccatctcgtctctgttctccttcccttttccgttcccgaagccggaaggagccgaggtacccacggaaaaagtcgaagctgtccccggagagtgaggccttcacgaagcggtggcggaaggagccgaagttctctgatcggaggcgtgagcaagtggcatctccggaaagagccgaaacacggactcgagcttaatcccaggaggggcccgagggcgagatccggaaatctccggaaagagccgaaggccgggacggttaggattgtcggaagtggccgattgcttggacagggccggcggagaagatcggagcaagtccgtggaagaagccaaagactgggacggattgaattgttggaagaacccgaactcgcagaggggactgggcgcagtggcacacgaggacacacggaaacctccgaacgttgaggagataatctcggaaaagttacggaaacctgggaagtcggcgaaaccctacgttcgggtgttttcggaagcagccgaagcggccgcctgcttcgccttcgtccagtatccggagatagccgaggcgcttcggagccaggctcggggggaggggcaagctcgcgggcgggcgggcgggtgagggggcggagcccgggcggggcggggagggctgccggaggcttgattaggtaggaggtggcgaagcgccggcggcggccggaagtagccgaagccagcggcggaagtagccgaagcggctggagcgggcggcaaggcgaggcgaaagctgcacagggccctacgcggccgcctcagcatgtcggacttcgacgagttcgagcggcagctcaacgagaataaacaagagcgggacaaggagaaccggcatcggaagcgcagccacagccgctctcggagccgggaccgcaaacgccggagccggagccgcgaccggcgcaaccgggaccagcggagcgcctcccgggacaggcgacgacgcagcaaacctttgaccagaggcgctaaagaggagcacggtggactgattcgttccccccgccacgagaagaagaagaaggtccgtaaatactgggacgtgccacccccaggctttgagcacatcaccccaatgcagtacaaggccatgcaagctgcgggtcagattccagccactgctcttctccccaccatgacccctgacggtctggctgtgaccccaacgccggtgcccgtggtcgggagccagatgaccagacaagcccggcgcctctacgtgggcaacatcccctttggcatcactgaggaggccatgatggatttcttcaacgcccagatgcgcctgggggggctgacccaggcccctggcaacccagtgttggctgtgcagattaaccaggacaagaattttgcctttttggagttccgctcagtggacgagactacccaggctatggcctttgatggcatcatcttccagggccagtcactaaagatccgcaggcctcacgactaccagccgcttcctggcatgtcagagaacccctccgtctatgtgcctggggttgtgtccactgtggtccccgactctgcccacaagctgttcatcgggggcttacccaactacctgaacgatgaccaggtcaaagagctgctgacatcctttgggcccctcaaggccttcaacctggtcaaggacagtgccacggggctctccaagggctacgccttctgtgagtacgtggacatcaacgtcacggatcaggccattgcggggctgaacggcatgcagctgggggataagaagctgctggtccagagggcgagtgtgggagccaagaatgccacgctgagcaccatcaatcagacgcctgtgaccctgcaagtgccgggcttgatgagctcccaggtgcagatgggcggccacccgactgaggtcctgtgcctcatgaacatggtgctgcctgaggagctgctggacgacgaggagtatgaggagatcgtggaggacgtgcgggacgagtgcagcaagtacgggcttgtcaagtccatcgagatcccccggcctgtggacggcgtcgaggtgcccggctgcggaaagatctttgtggagttcacctctgtgtttgactgccagaaagccatgcagggcctgacgggccgcaagttcgccaacagagtggttgtcacaaaatactgtgaccccgactcttatcaccgccgggacttctggtagaggcggctgggggagggtgggggcagggctggctgggggcttctccccactcccgccccccccttatccccctctgaagacgatgggcagaggagtgacagccgcagacacacgacagccggcagcaactggaatggcagcaattaagggtggggggcgggggttggggggttggggggttagggcagggaggggactggggaagtgcgcacacagcccacacagacaacacgcacccacacagacacagagggaaggggttgggatggggacagggtgcacagcagggcggggtaggaccccagcccctcccaaaacagcctctccttctcccatagacccctttcttctccccttccccacggtaggaacatagcgtgtttatattttatggccaaactattttgaattttgttgtccggccctcagtgccctgccctctcccttaccaggaccacagctctgttccttcggcctctggtcctctctggtcccctcctgggtttcttacgtagttgatttttcctctttagtctcccccgacctgcgcccagccccgtggcccctgcccctctcctactctctgtggcagtttcatatttgctaagacgaatttgctcattaaacattttgttgtattttacttt

SEQ ID NO: 196826 - DNA, 849 bp, Homo sapiens
  Payload ID: 18817
  Gene Name: U2 small nuclear RNA auxiliary factor 2
  ENST ID: ENST00000592874
  CDS Start-End: 1-259
tcgttccccccgccacgagaagaagaagaaggtccgtaaatactgggacgtgccacccccaggctttgagcacatcaccccaatgcagtacaaggccatgcaagctgcgggtcagattccagccactgctcttctccccaccatgacccctgacggtctggctgtgaccccaacgccggtgcccgtggtcgggagccagatgaccagacaagcccggcgcctctacgtgggcaacatcccctttggcatcactgagtgaaatattgtggggctgagatccctcgtagcaacaaaaagtttgctaccatcgtcgaaggcaagccatgatggatttcttcaacgcccagatgcgcctgggggggctgacccaggcccctggcaacccagtgttggctgtgcagattaaccaggacaagaattttgcctttttggagttccgctcagtggacgagactacccaggctatggcctttgatggcatcatcttccagggccagtcactaaagatccgcaggcctcacgactaccagccgcttcctggcatgtcagagaacccctccgtctatgtgcctggggttgtgtccactgtggtccccgactctgcccacaagctgttcatcgggggcttacccaactacctgaacgatgaccaggtcaaagagctgctgacatcctttgggcccctcaaggccttcaacctggtcaaggacagtgccacggggctctccaagggctacgccttctgtgagtacgtggacatcaacgtcacggatcaggtgagtccccggtcgctggccgctgccgcgtctgtccttccctgccctgcgctgttgccaagccatggtctcc

SEQ ID NO: 196827 - DNA, 1104 bp, Homo sapiens
  Payload ID: 18817
  Gene Name: U2 small nuclear RNA auxiliary factor 2
  ENST ID: ENST00000590551
  CDS Start-End: 10-933
caggaggccatgatggatttcttcaacgcccagatgcgcctgggggggctgacccaggcccctggcaacccagtgttggctgtgcagattaaccaggacaagaattttgcctttttggagttccgctcagtggacgagactacccaggctatggcctttgatggcatcatcttccagggccagtcactaaagatccgcaggcctcacgactaccagccgcttcctggcatgtcagagaacccctccgtctatgtgcctggggttgtgtccactgtggtccccgactctgcccacaagctgttcatcgggggcttacccaactacctgaacgatgaccaggtcaaagagctgctgacatcctttgggcccctcaaggccttcaacctggtcaaggacagtgccacggggctctccaagggctacgccttctgtgagtacgtggacatcaacgtcacggatcaggccattgcggggctgaacggcatgcagctgggggataagaagctgctggtccagagggcgagtgtgggagccaagaatgccacgctgagcaccatcaatcagacgcctgtgaccctgcaagtgccgggcttgatgagctcccaggtgcagatgggcggccacccgactgaggtcctgtgcctcatgaacatggtgctgcctgaggagctgctggacgacgaggagtatgaggagatcgtggaggacgtgcgggacgagtgcagcaagtacgggcttgtcaagtccatcgagatcccccggcctgtggacggcgtcgaggtgcccggctgcggaaagatctttgtggagttcacctctgtgtttgactgccagaaagccatgcagggcctgacgggccgcaagttcgccaacagagtggttgtcacaaaatactgtgaccccgactcttatcaccgccgggacttctggtagaggcggctgggggagggtgggggcagggctggctgggggcttctccccactcccgccccccccttatccccctctgaagacgatgggcagaggagtgacagccgcagacacacgacagccggcagcaactggaatggcagcaattaagggtggggggcgggggttgggggg

SEQ ID NO: 196828 - DNA, 778 bp, Homo sapiens
  Payload ID: 18817
  Gene Name: U2 small nuclear RNA auxiliary factor 2
  ENST ID: ENST00000587196
  CDS Start-End: 1-155
cggacttcgacgagttcgagcggcagctcaacgagaataaacaagcctctagccctgcccctctcagggacgaccctggggtcaggcccctcagccctcgagggggaccaggagccagcctcctctgtcttctctggctccccagctcctcctgagcatcctcagagcgggacaaggagaaccggcatcggaagcgcagccacagccgctctcggagccgggaccgcaaacgccggagccggagccgcgaccggcgcaaccgggaccagcggagcgcctcccgggacaggcgacgacgcagcaaacctttgaccagaggcgctaaagaggagcacggtggactgattcgttccccccgccacgagaagaagaagaaggtccgtaaatactgggacgtgccacccccaggctttgagcacatcaccccaatgcagtacaaggccatgcaagctgcgggtcagattccagccactgctcttctccccaccatgacccctgacggtctggctgtgaccccaacgccggtgcccgtggtcgggagccagatgaccagacaagcccggcgcctctacgtgggcaacatcccctttggcatcactgagtgaaatattgtggggctgagatccctcgtagcaacaaaaagtttgctaccatcgtcgaaggcaagtaaggtccattctgactttctcaacctgcactttgctacatttgataaaccagcccccggactccagggccagattcctccacatcactcttttctcctcccctcccgtcc

SEQ ID NO: 196829 - DNA, 1267 bp, Homo sapiens
  Payload ID: 18818
  Gene Name: U2 snRNP-associated SURP domain containing
  ENST ID: ENST00000467348
  CDS Start-End: 1-871
tattgaagaaaaggaaacagaggatgttccagatgaccttgatggtgcccccatcgaggaagagcttgatggtgcacctctggaagatgtagatggaattcctattgatgctactcccatcgatgatcttgatggagtccctataaaaagtcttgatgatgatcttgatggagtgcctttggatgcaactgaagactcaaaaaagaatgagcctatatttaaagttgccccatcaaaatgggaagctgtggatgaatctgaattggaagcacaggctgttacaacttctaaatgggaattatttgaccagcatgaagaatcagaagaagaagaaaatcaaaatcaagaagaagaaagtgaagatgaagaagatactcaaagttccaaatctgaagaacatcatttgtactctaatccaatcaaagaagaaatgactgagtctaagttctctaagtactctgaaatgagtgaggaaaaacgagccaaacttcgtgaaattgagctcaaagttatgaagtttcaggatgaattggaatctgggaaaagacctaaaaaaccaggccagagttttcaggagcaagtagaacactacagagataaacttcttcaacgagagaaagagaaagagttagaaagagaacgagaaagagacaagaaagataaagaaaaattggaatctcgctccaaagacaagaaggaaaaagatgagtgtactccgacaaggaaggaaagatcaccatctggttcaaggacacctaaaaggtctaggcgatcacggtctagatctcctaaaaaatcaggaaagaagtccagatcccagtccagatctccacacaggtctcataaaaagtcaaagaaaaacaaacactgacgtaaatttttaagatgctgtcacttattggaaatgcgatttgttttgtgcctgaacggtctgttttttaaaaaaacaaaaaatcaaatgaaagagcattcctggggttttttgtttgtttgtgtatgcatgtgtaaactcatgagcaactgcatctgtagatctgtcattgttttatattgtgtaaattactttcattgtggctatttctcaagatgaaatttttattgttctaatggatttcatcagaaatgtgtataatggatctgctgacagtagtagtattttgttttaggatgttgtgacttagcaaaaataatacagatgtcttccccccttttgtagctttgacaatttgaattagatttcaaataaaatctgaacagaaaactataa

SEQ ID NO: 196830 - DNA, 588 bp, Homo sapiens
  Payload ID: 18818
  Gene Name: U2 snRNP-associated SURP domain containing
  ENST ID: ENST00000493782
  CDS Start-End: 106-588
tattcagccttgcaggcgcctctggcgggcttcactgagatccgctctttcggtgctcgactcgcccgtgctgctgccgccgccgaaggaggggcaaagctcaagatggcggacaaaacgccaggcggatctcagaaggccagttcaaagacgagatcatcagatgttcattcatctggatcttcagatgcacatatggatgcatctggaccctcagatagtgatatgccaagtcggacacgacctaagagcccaagaaaacataattataggaatgaaagtgcccgtgaaagcctttgtgattctcctcatcagaatctctcaagacctcttctggaaaacaaacttaaagcattcagtattggaaaaatgagtacagctaagcgaactttaagtaaaaaggaacaggaagaattaaagaaaaaggaggatgaaaaggcagctgctgagatttatgaggagtttcttgctgcttttgaaggaagtgatggtaataaagtgaaaacatttgtgcgagggggtgttgttaatgcagctaaagaagaacatgaaacagatgaaaaaagaggtaaaatctataagccatct

SEQ ID NO: 196831 - DNA, 7276 bp, Homo sapiens
  Payload ID: 18818
  Gene Name: U2 snRNP-associated SURP domain containing
  Uniprot ID: O15042
  ENST ID: ENST00000473835
  CDS Start-End: 91-3180
gcgcctctggcgggcttcactgagatccgctctttcggtgctcgactcgcccgtgctgctgccgccgccgaaggaggggcaaagctcaagatggcggacaaaacgccaggcggatctcagaaggccagttcaaagacgagatcatcagatgttcattcatctggatcttcagatgcacatatggatgcatctggaccctcagatagtgatatgccaagtcggacacgacctaagagcccaagaaaacataattataggaatgaaagtgcccgtgaaagcctttgtgattctcctcatcagaatctctcaagacctcttctggaaaacaaacttaaagcattcagtattggaaaaatgagtacagctaagcgaactttaagtaaaaaggaacaggaagaattaaagaaaaaggaggatgaaaaggcagctgctgagatttatgaggagtttcttgctgcttttgaaggaagtgatggtaataaagtgaaaacatttgtgcgagggggtgttgttaatgcagctaaagaagaacatgaaacagatgaaaaaagaggtaaaatctataagccatcttcaagatttgcagatcaaaaaaatcctccaaatcagtcttccaatgaaagaccaccatctcttcttgtgatagaaaccaaaaaacctccacttaaaaaaggagagaaagaaaagaaaaaaagcaatttggaactcttcaaagaagaattaaagcaaattcaagaggaacgtgatgagagacataaaacaaaaggcagattaagtcgatttgaacctcctcagtcagattctgatggtcagcgtcgttctatggacgcgccttcaagaagaaatagatcatctggtgttcttgatgattacgcacctggctcacatgatgtaggagatccaagcactactaatttataccttggaaacattaatccacagatgaatgaagaaatgctgtgccaagaatttggaagatttggaccgttagccagtgtgaaaatcatgtggcctagaactgatgaagaaagagccagagagagaaattgcggctttgtggcctttatgaatagaagagatgctgaaagagctttaaaaaatttgaatggaaaaatgattatgtcttttgaaatgaagttaggttggggtaaagctgtacctattcctccacatccaatatacattccgccttctatgatggaacatacgcttcccccacctccatccggactgccttttaatgcgcagcctagagagcggttaaaaaaccctaatgctcctatgttaccgccacctaaaaacaaagaggattttgagaagactctgtcgcaagccatagtcaaagtggttatcccaacagaaaggaatttgctcgccctgatacatcgaatgatagagtttgttgtacgtgaagggccaatgtttgaagctatgattatgaacagagaaatcaacaatcctatgttcaggttcttatttgaaaaccagacaccagcccatgtttactataggtggaagctttattctattctgcagggagattctccaactaaatggcggacggaagattttcgtatgttcaaaaatggatctttttggaggccaccaccattaaatccgtacttgcatggaatgtcagaagagcaagaaacagaagcttttgtagaggaacctagtaaaaagggagcacttaaggaagaacagagggataaattggaagaaatcttgcggggattaactccaaggaaaaatgatattggagatgcaatggttttctgtcttaataatgctgaagctgctgaagaaatagtggattgcattactgagtcgttgtccatcttaaagacaccccttcctaaaaagattgccagattatatttggtttctgatgttttgtacaactcttcagccaaagttgctaatgcttcatattatagaaaattttttgaaacaaagttatgtcagatattttcagacctcaatgccacctatcgtacaattcaaggccatttacaatctgaaaactttaagcaacgggtaatgacttgcttcagagcatgggaagattgggcaatttatccagaaccatttttgatcaaactacaaaatattttcttaggacttgtaaatattattgaagaaaaggaaacagaggatgttccagatgaccttgatggtgcccccatcgaggaagagcttgatggtgcacctctggaagatgtagatggaattcctattgatgctactcccatcgatgatcttgatggagtccctataaaaagtcttgatgatgatcttgatggagtgcctttggatgcaactgaagactcaaaaaagaatgagcctatatttaaagttgccccatcaaaatgggaagctgtggatgaatctgaattggaagcacaggctgttacaacttctaaatgggaattatttgaccagcatgaagaatcagaagaagaagaaaatcaaaatcaagaagaagaaagtgaagatgaagaagatactcaaagttccaaatctgaagaacatcatttgtactctaatccaatcaaagaagaaatgactgagtctaagttctctaagtactctgaaatgagtgaggaaaaacgagccaaacttcgtgaaattgagctcaaagttatgaagtttcaggatgaattggaatctgggaaaagacctaaaaaaccaggccagagttttcaggagcaagtagaacactacagagataaacttcttcaacgagagaaagagaaagagttagaaagagaacgagaaagagacaagaaagataaagaaaaattggaatctcgctccaaagacaagaaggaaaaagatgagtgtactccgacaaggaaggaaaggaagaggcgacacagtacatcccccagcccatctcgcagtagcagtggtagacgagtgaaatccccatcaccaaaatcggagcgatcagagcgttcagaaagatctcataaagagagctcacggtccaggtcatctcacaaagattctcctagagatgttagcaaaaaagccaaaagatcaccatctggttcaaggacacctaaaaggtctaggcgatcacggtctagatctcctaaaaaatcaggaaagaagtccagatcccagtccagatctccacacaggtctcataaaaagtcaaagaaaaacaaacactgacgtaaatttttaagatgctgtcacttattggaaatgcgatttgttttgtgcctgaacggtctgttttttaaaaaaacaaaaaatcaaatgaaagagcattcctggggttttttgtttgtttgtgtatgcatgtgtaaactcatgagcaactgcatctgtagatctgtcattgttttatattgtgtaaattactttcattgtggctatttctcaagatgaaatttttattgttctaatggatttcatcagaaatgtgtataatggatctgctgacagtagtagtattttgttttaggatgttgtgacttagcaaaaataatacagatgtcttccccccttttgtagctttgacaatttgaattagatttcaaataaaatctgaacagaaaactataatgttgtttttttgccccaccggtgatattaagtcccttaaagtcctactgagtttcacactactgttgtgcttcttatacctgatgcactttataagccccagtgttcaagtagcttaagttttatatttactaagatgactatccaaattaagggacctgagactcctatttggtggtttgctaaccatttgcttttgataagtttctcttgggtaatactaatacccagatatcaaagactaggtagatatggcatggcgttttgttagtggaatgcctggctaaaacatttttttcacagaagcaatatgatttccatacatccaacccatgttctgagcaactacttacttttagggggaaattaaatatcttttcatttcctcttctattatgaaagaagtttatttgtaaaacaaattttctaacaaggtttggccatagaattctcttgtatgatcgttgaccttttataatcttctgtaggctatctttcaaacactggcatcagaatattttttataagtttgtgtttaaacagcttagttggtccccccccactcccaagagacttgggtttagttatagctttaagtaaaatttaaaaataaaatgtttttcaggaaacttcgtatctaatggtttgtaaattcaaggtgcaaaaagttgatttaaaccatttgcagagttgaactctattatgaaaataaatttgctacggtatgaggaagaaataaaacttgtgtaatgttggtcataatactgctataaatataataaagggttatgtagaattgaactgacactattatttgtgaatcttgatttcagttttttatgtaggcacttcatacactggtttgatgggttttttttttcctccctaaaagagaaagtagaaaactattctaacaatggattattttgatttagcttgctttttaaaaaaatcttttcaacttgttttacttaatcttgcctagtcacaaaataagatgtgcacccatggtttggagagttcctatattagctgagcagtgagatacactatttccaaacggtgcacacctacagtagctttggaaatgagccaatcactgttttacttaatggttcttatcagcatgcaaatattgcttgaaagttatttccttattcactgttttgttagtccattttgttaggaaacattaattcctaaaaatttgttcagaataattaaaagtgaacatttggtgctgatactcaaaaacctacaaatgtagccatttaaaaagtaacatgtttttctcccctgctcattgcctgggagaatggaattttatataactacctttctttgcaaaaataacggtcgtgtcgagttggtggtgattttggcattccatcttgcactggtttctagtataggcttagaaataattggtcaggtaataatctttccagtcaagttgcaagggatgcttatttctcttcaaaaaaagacatcctgcgggattgagtagaaaattttaggtcagttttgggtgcttatttgtaatatttttcctactacattggagtttagcagttctttttttctggatccagatacaagtgtcatggtttatcttacagtgggtgaaactgactttcttttggttgggtgggtgaggatttcttaggcctgatagaatatatattctgtgaagtttgttaatgtacatattagattgtattggatttttttttcttgaattgcaaatggtattattagataggttatttccagttttacttcatgacaaattacctagagtaaacctacttaatactcccatggattctatgaaagtttaatgggatcagaaattggtgacttataagggggaagatattctaccatatttttataatagcttattattcatgtttcttgtctgaaggacactcaagttacagagcaaaatttctataggttgactagaatgttcataagcatggtcttccagttgcaggaaagatcatgttctatctgtggacacttactgtcctctaccacagctacgtgccagagttgttttccacagttcttataaagggcatgacttaggctctttaccctccaacttaatgtttatacacagggattgtttactaggttaatgacatttaactcccctctcttctgtaggtgagagaaaataagtaagtcttgatctgtttcttaccaaagagagacagacctatgatggaaaatgatcacgtctctgaattttttctttaacgttatagttccttattacagatagtaagcatatgggaatttctgagctataacatgttgagaagttagaaattaaaactaacacaacaaaaggcgctgaatcaaaagatctttgcttttatttggctcagaatgtttttggcttttctgctaaagatggcagaaattactctacacagacctgatttttctttattgcagaccattcttgtgggcttaccctgagacttttatcccaattagtgaatcttggagggaatacttgcttatttatgacttaggtatttccccccaaactttaatattcttgagcacttgaaaatacttttgagaaattttaactgtgattaaatttaggtttattagaaatattctgtacacatttgcctccatggtggcgtaagttctgaaaaattatatgaccgtgacaatagtttatcatcatcattattgttattcaaaataagggtaaataaatctctgtattgccaaagtgacttaaactgttctgatgaccacacagtgtgatttctttagcagagaaagttggttttaaaaataaatagtaccacttttctaagactgtacagtttacaaataaggtttttttctttgttgttttcctcttctattaagttttagtgaaaagcctaattacagaaaattgtgcagatactagtgaagatactagtataagtttaaaggaacacgtgactgtaaaatctcacatttacaaagtgcttgatctcttcatatttcacacgcatgttttagaatagattttagggagtgtttaattcattatccttttgacttaaaatttttgttaccaacttcctaggacttagataatatataaataagtacaaatcccaggggaagtgttgtgatgctagactaaaaggtgggaatgtgctgctgttccgtgagccttgttccattgttgaaaatttgatgcctcagtgtttattcagtaccacctcatggagcttcaatgtaaatggattatatgtataattggtaatttgtatagttttgtagattgtagattaaatgcactcatcatgtcacatgtaattgtgcttggagtatttgtgttttattcttttacttcaacgggttcttgtctgttacatctctggtgatttgaaatatcaggaaagacagtttgtcagaaatgagaataatatagttgaaatcagttgggctaaaatattctacagcaagacaatttcttttgggtgaactgattctataatttacttacttttaatgtaaggattagatttattgttgagctgctttccagatcagactgtcactttatagtttttctacataaagattatatagttgcaaacaaaggttgtgaaatttcccttttgttgtttttgacttttaattaataaaagtacattgttttcatagcaaa

SEQ ID NO: 196832 - DNA, 4364 bp, Homo sapiens
  Payload ID: 18818
  Gene Name: U2 snRNP-associated SURP domain containing
  ENST ID: ENST00000463563
  CDS Start-End: 1-1320
ctcaagatggcggacaaaacgccaggcggatctcagaaggccagttcaaagacgagatcatcagatgttcattcatctggatcttcagatgcacatatggatgcatctggaccctcagatagtgatatgccaagtcggacacgacctaagagcccaagaaaacataattataggaatgaaagtgcccgtgaaagcctttgtgattctcctcatcagaatctctcaagacctcttctggaaaacaaacttaaagcattcagtattggaaaaatgagtacagctaagcgaactttaagtaaaaaggaacaggaagaattaaagaaaaaggaggatgaaaaggcagctgctgagatttatgaggagtttcttgctgcttttgaaggaagtgatggtaataaagtgaaaacatttgtgcgagggggtgttgttaatgcagctaaagaagaacatgaaacagatgaaaaaagaggtaaaatctataagccatcttcaagatttgcagatcaaaaaaatcctccaaatcagtcttccaatgaaagaccaccatctcttcttgtgatagaaaccaaaaaacctccacttaaaaaaggagagaaagaaaagaaaaaaagcaatttggaactcttcaaagaagaattaaagcaaattcaagaggaacgtgatgagagacataaaacaaaaggcagattaagtcgatttgaacctcctcagtcagattctgatggtcagcgtcgttctatggacgcgccttcaagaagaaatagatcatctggtgttcttgatgattacgcacctggctcacatgatgtaggagatccaagcactactaatttataccttggaaacattaatccacagatgaatgaagaaatgctgtgccaagaatttggaagatttggaccgttagccagtgtgaaaatcatgtggcctagaactgatgaagaaagagccagagagagaaattgcggctttgtggcctttatgaatagaagagatgctgaaagagctttaaaaaatttgaatggaaaaatgattatgtcttttgaaatgaagttaggttggggtaaagctgtacctattcctccacatccaatatacattccgccttctatgatggaacatacgcttcccccacctccatccggactgccttttaatgcgcagcctagagagcggttaaaaaaccctaatgctcctatgttaccgccacctaaaaacaaagaggattttgagaagactctgtcgcaagccatagtcaaagtggttatcccaacagaaagaagaaattcctattattgtcatgaacactggacatactagaaactttcttttcatggtaacaaaggaatttgctcgccctgatacatcgaatgatagagtttgttgtacgtgaagggccaatgtttgaagctatgattatgaacagagaaatcaacaatcctatgttcaggttcttatttgaaaaccagacaccagcccatgtttactataggtggaagctttattctattctgcagggagattctccaactaaatggcggacggaagattttcgtatgttcaaaaatggatctttttggaggccaccaccattaaatccgtacttgcatggaatgtcagaagagcaagaaacagaagcttttgtagaggaacctagtaaaaagggagcacttaaggaagaacagagggataaattggaagaaatcttgcggggattaactccaaggaaaaatgatattggagatgcaatggttttctgtcttaataatgctgaagctgctgaagaaatagtggattgcattactgagtcgttgtccatcttaaagacaccccttcctaaaaagattgccagattatatttggtttctgatgttttgtacaactcttcagccaaagttgctaatgcttcatattatagaaaattttttgaaacaaagttatgtcagatattttcagacctcaatgccacctatcgtacaattcaaggccatttacaatctgaaaactttaagcaacgggtaatgacttgcttcagagcatgggaagattgggcaatttatccagaaccatttttgatcaaactacaaaatattttcttaggacttgtaaatattattgaagaaaaggaaacagaggatgttccagatgaccttgatggtgcccccatcgaggaagagcttgatggtgcacctctggaagatgtagatggaattcctattgatgctactcccatcgatgatcttgatggagtccctataaaaagtcttgatgatgatcttgatggagtgcctttggatgcaactgaagactcaaaaaagaatgagcctatatttaaagttgccccatcaaaatgggaagctgtggatgaatctgaattggaagcacaggctgttacaacttctaaatgggaattatttgaccagcatgaagaatcagaagaagaagaaaatcaaaatcaagaagaagaaagtgaagatgaagaagatactcaaagttccaaatctgaagaacatcatttgtactctaatccaatcaaagaagaaatgactgagtctaagttctctaagtactctgaaatgagtgaggaaaaacgagccaaacttcgtgaaattgagctcaaagttatgaagtttcaggatgaattggaatctgggaaaagacctaaaaaaccaggccagagttttcaggagcaagtagaacactacagagataaacttcttcaacgagagaaagagaaagagttagaaagagaacgagaaagagacaagaaagataaagaaaaattggaatctcgctccaaagacaagaaggaaaaagatgagtgtactccgacaaggaaggaaaggaagaggcgacacagtacatcccccagcccatctcgcagtagcagtggtagacgagtgaaatccccatcaccaaaatcggagcgatcagagcgttcagaaagatctcataaagagagctcacggtccaggtcatctcacaaagattctcctagagatgttagcaaaaaagccaaaagatcaccatctggttcaaggacacctaaaaggtctaggcgatcacggtctagatctcctaaaaaatcaggaaagaagtccagatcccagtccagatctccacacaggtctcataaaaagtcaaagaaaaacaaacactgacgtaaatttttaagatgctgtcacttattggaaatgcgatttgttttgtgcctgaacggtctgttttttaaaaaaacaaaaaatcaaatgaaagagcattcctggggttttttgtttgtttgtgtatgcatgtgtaaactcatgagcaactgcatctgtagatctgtcattgttttatattgtgtaaattactttcattgtggctatttctcaagatgaaatttttattgttctaatggatttcatcagaaatgtgtataatggatctgctgacagtagtagtattttgttttaggatgttgtgacttagcaaaaataatacagatgtcttccccccttttgtagctttgacaatttgaattagatttcaaataaaatctgaacagaaaactataatgttgtttttttgccccaccggtgatattaagtcccttaaagtcctactgagtttcacactactgttgtgcttcttatacctgatgcactttataagccccagtgttcaagtagcttaagttttatatttactaagatgactatccaaattaagggacctgagactcctatttggtggtttgctaaccatttgcttttgataagtttctcttgggtaatactaatacccagatatcaaagactaggtagatatggcatggcgttttgttagtggaatgcctggctaaaacatttttttcacagaagcaatatgatttccatacatccaacccatgttctgagcaactacttacttttagggggaaattaaatatcttttcatttcctcttctattatgaaagaagtttatttgtaaaacaaattttctaacaaggtttggccatagaattctcttgtatgatcgttgaccttttataatcttctgtaggctatctttcaaacactggcatcagaatattttttataagtttgtgtttaaacagcttagttggtccccccccactcccaagagacttgggtttagttatagctttaagtaaaatttaaaaataaaatgtttttcaggaaacttcgtatctaatggtttgtaaattcaaggtgcaaaaagttgatttaaaccatttgcagagttgaactctattatgaaaataaatttgctacggtatgaggaagaaataaaacttgtgtaatgttggtcataatactgctataaatataataaagggttatgtagaattgaactgaca

SEQ ID NO: 196833 - DNA, 571 bp, Homo sapiens
  Payload ID: 18818
  Gene Name: U2 snRNP-associated SURP domain containing
  ENST ID: ENST00000465175
  CDS Start-End: 180-571
atagccaaggttaatgtacagtctacacgtggtctttaccttaacgggaagtaaaaagcacttttgagggtagaggactcgtggtctctttctttatgttgaagaaacagtgaaaagagaagctccgtagacttacgagatcatcagatgttcattcatctggatcttcagatgcacatatggatgcatctggaccctcagatagtgatatgccaagtcggacacgacctaagagcccaagaaaacataattataggaatgaaagtgcccgtgaaagcctttgtgattctcctcatcagaatctctcaagacctcttctggaaaacaaacttaaagcattcagtattggaaaaatgagtacagctaagcgaactttaagtaaaaaggaacaggaagaattaaagaaaaaggaggatgaaaaggcagctgctgagatttatgaggagtttcttgctgcttttgaaggaagtgatggtaataaagtgaaaacatttgtgcgagggggtgttgttaatgcagctaaagaagaacatgaaacagatgaaaaaagaggtaaaatctataagccatc

SEQ ID NO: 196834 - DNA, 3491 bp, Homo sapiens
  Payload ID: 18818
  Gene Name: U2 snRNP-associated SURP domain containing
  ENST ID: ENST00000493598
  CDS Start-End: 9-3095
agctcaagatggcggacaaaacgccaggcggatctcagaaggccagttcaaagacgagatcatcagatgttcattcatctggatcttcagatgcacatatggatgcatctggaccctcagatagtgatatgccaagtcggacacgacctaagagcccaagaaaacataattataggaatgaaagtgcccgtgaaagcctttgtgattctcctcatcagaatctctcaagacctcttctggaaaacaaacttaaagcattcagtattggaaaaatgagtacagctaagcgaactttaagtaaaaaggaacaggaagaattaaagaaaaaggaggatgaaaaggcagctgctgagatttatgaggagtttcttgctgcttttgaaggaagtgatggtaataaagtgaaaacatttgtgcgagggggtgttgttaatgcagctaaagaagaacatgaaacagatgaaaaaagaggtaaaatctataagccatcttcaagatttgcagatcaaaaaaatcctccaaatcagtcttccaatgaaagaccaccatctcttcttgtgatagaaaccaaaaaacctccacttaaaaaaggagagaaagaaaagaaaaaaagcaatttggaactcttcaaagaagaattaaagcaaattcaagaggaacgtgatgagagacataaaacaaaaggcagattaagtcgatttgaacctcctcagtcagattctgatggtcagcgtcgttctatggacgcgccttcaagaagaaatagatcatctgttcttgatgattacgcacctggctcacatgatgtaggagatccaagcactactaatttataccttggaaacattaatccacagatgaatgaagaaatgctgtgccaagaatttggaagatttggaccgttagccagtgtgaaaatcatgtggcctagaactgatgaagaaagagccagagagagaaattgcggctttgtggcctttatgaatagaagagatgctgaaagagctttaaaaaatttgaatggaaaaatgattatgtcttttgaaatgaagttaggttggggtaaagctgtacctattcctccacatccaatatacattccgccttctatgatggaacatacgcttcccccacctccatccggactgccttttaatgcgcagcctagagagcggttaaaaaaccctaatgctcctatgttaccgccacctaaaaacaaagaggattttgagaagactctgtcgcaagccatagtcaaagtggttatcccaacagaaaggaatttgctcgccctgatacatcgaatgatagagtttgttgtacgtgaagggccaatgtttgaagctatgattatgaacagagaaatcaacaatcctatgttcaggttcttatttgaaaaccagacaccagcccatgtttactataggtggaagctttattctattctgcaggcaaattctccaactaaatggcggacggaagattttcgtatgttcaaaaatggatctttttggaggccaccaccattaaatccgtacttgcatggaatgtcagaagagcaagaaacagaagcttttgtagaggaacctagtaaaaagggagcacttaaggaagaacagagggataaattggaagaaatcttgcggggattaactccaaggaaaaatgatattggagatgcaatggttttctgtcttaataatgctgaagctgctgaagaaatagtggattgcattactgagtcgttgtccatcttaaagacaccccttcctaaaaagattgccagattatatttggtttctgatgttttgtacaactcttcagccaaagttgctaatgcttcatattatagaaaattttttgaaacaaagttatgtcagatattttcagacctcaatgccacctatcgtacaattcaaggccatttacaatctgaaaactttaagcaacgggtaatgacttgcttcagagcatgggaagattgggcaatttatccagaaccatttttgatcaaactacaaaatattttcttaggacttgtaaatattattgaagaaaaggaaacagaggatgttccagatgaccttgatggtgcccccatcgaggaagagcttgatggtgcacctctggaagatgtagatggaattcctattgatgctactcccatcgatgatcttgatggagtccctataaaaagtcttgatgatgatcttgatggagtgcctttggatgcaactgaagactcaaaaaagaatgagcctatatttaaagttgccccatcaaaatgggaagctgtggatgaatctgaattggaagcacaggctgttacaacttctaaatgggaattatttgaccagcatgaagaatcagaagaagaagaaaatcaaaatcaagaagaagaaagtgaagatgaagaagatactcaaagttccaaatctgaagaacatcatttgtactctaatccaatcaaagaagaaatgactgagtctaagttctctaagtactctgaaatgagtgaggaaaaacgagccaaacttcgtgaaattgagctcaaagttatgaagtttcaggatgaattggaatctgggaaaagacctaaaaaaccaggccagagttttcaggagcaagtagaacactacagagataaacttcttcaacgagagaaagagaaagagttagaaagagaacgagaaagagacaagaaagataaagaaaaattggaatctcgctccaaagacaagaaggaaaaagatgagtgtactccgacaaggaaggaaaggaagaggcgacacagtacatcccccagcccatctcgcagtagcagtggtagacgagtgaaatccccatcaccaaaatcggagcgatcagagcgttcagaaagatctcataaagagagctcacggtccaggtcatctcacaaagattctcctagagatgttagcaaaaaagccaaaagatcaccatctggttcaaggacacctaaaaggtctaggcgatcacggtctagatctcctaaaaaatcaggaaagaagtccagatcccagtccagatctccacacaggtctcataaaaagtcaaagaaaaacaaacactgacgtaaatttttaagatgctgtcacttattggaaatgcgatttgttttgtgcctgaacggtctgttttttaaaaaaacaaaaaatcaaatgaaagagcattcctggggttttttgtttgtttgtgtatgcatgtgtaaactcatgagcaactgcatctgtagatctgtcattgttttatattgtgtaaattactttcattgtggctatttctcaagatgaaatttttattgttctaatggatttcatcagaaatgtgtataatggatctgctgacagtagtagtattttgttttaggatgttgtgacttagcaaaaataatacagatgtcttccccccttttgtagctttgacaatttgaattagatttcaaataaaatctgaacagaaaactataa

SEQ ID NO: 196835 - DNA, 3557 bp, Homo sapiens
  Payload ID: 18818
  Gene Name: U2 snRNP-associated SURP domain containing
  ENST ID: ENST00000488497
  CDS Start-End: 462-1739
agctgccgaagcggcaagaacagcgtttccgtccatcgagcgccaggtcaccagtcagctccagtcctattttgagttgaagtaaaagctcctccctagatggccagtgcacgtctttaaaaagcgactcctttcccacaaaggaaatacgactggttcgcatctatcaagggttggcgttgggataagagggtgaagtatcagctggccctgattctctgaattcccggacccaataacgcgaccaagcaccgtgactcccaggaaaactagcggagtgagcgcggctgaggaaattactgacaccggaagtcacgtgagcggctgcccctaaggtcgctatctcgacagtcgactattcagccttgcaggcgcctctggcgggcttcactgagatccgctctttcggtgctcgactcgcccgtgctgctgccgccgccgaaggaggggcaaagctcaagatggcggacaaaacgccaggcggatctcagaaggccagttcaaagacgagatcatcagatgttcattcatctggatcttcagatgcacatatggatgcatctggaccctcagatagtgatatgccaagtcggacacgacctaagagcccaagaaaacataattataggaatgaaagtgcccgtgaaagcctttgtgattctcctcatcagaatctctcaagacctcttctggaaaacaaacttaaagcattcagtattggaaaaatgagtacagctaagcgaactttaagtaaaaaggaacaggaagaattaaagaaaaaggaggatgaaaaggcagctgctgagatttatgaggagtttcttgctgcttttgaaggaagtgatggtaataaagtgaaaacatttgtgcgagggggtgttgttaatgcagctaaagaagaacatgaaacagatgaaaaaagaggtaaaatctataagccatcttcaagatttgcagatcaaaaaaatcctccaaatcagtcttccaatgaaagaccaccatctcttcttgtgatagaaaccaaaaaacctccacttaaaaaaggagagaaagaaaagaaaaaaagcaatttggaactcttcaaagaagaattaaagcaaattcaagaggaacgtgatgagagacataaaacaaaaggcagattaagtcgatttgaacctcctcagtcagattctgatggtcagcgtcgttctatggacgcgccttcaagaagaaatagatcatctggtgttcttgatgattacgcacctggctcacatgatgtaggagatccaagcactactaatttataccttggaaacattaatccacagatgaatgaagaaatgctgtgccaagaatttggaagatttggaccgttagccagtgtgaaaatcatgtggcctagaactgatgaagaaagagccagagagagaaattgcggctttgtggcctttatgaatagaagagatgctgaaagagctttaaaaaatttgaatggaaaaatgattatgtcttttgaaatgaagttaggttggggtaaagctgtacctattcctccacatccaatatacattccgccttctatgatggaacatacgcttcccccacctccatccggactgccttttaatgcgcagcctagagagcggttaaaaaaccctaatgctcctatgttaccgccacctaaaaacaaagaggattttgagaaggaatttgctcgccctgatacatcgaatgatagagtttgttgtacgtgaagggccaatgtttgaagctatgattatgaacagagaaatcaacaatcctatgttcaggttcttatttgaaaaccagacaccagcccatgtttactataggtggaagctttattctattctgcagggagattctccaactaaatggcggacggaagattttcgtatgttcaaaaatggatctttttggaggccaccaccattaaatccgtacttgcatggaatgtcagaagagcaagaaacagaagcttttgtagaggaacctagtaaaaagggagcacttaaggaagaacagagggataaattggaagaaatcttgcggggattaactccaaggaaaaatgatattggagatgcaatggttttctgtcttaataatgctgaagctgctgaagaaatagtggattgcattactgagtcgttgtccatcttaaagacaccccttcctaaaaagattgccagattatatttggtttctgatgttttgtacaactcttcagccaaagttgctaatgcttcatattatagaaaattttttgaaacaaagttatgtcagatattttcagacctcaatgccacctatcgtacaattcaaggccatttacaatctgaaaactttaagcaacgggtaatgacttgcttcagagcatgggaagattgggcaatttatccagaaccatttttgatcaaactacaaaatattttcttaggacttgtaaatattattgaagaaaaggaaacagaggatgttccagatgaccttgatggtgcccccatcgaggaagagcttgatggtgcacctctggaagatgtagatggaattcctattgatgctactcccatcgatgatcttgatggagtccctataaaaagtcttgatgatgatcttgatggagtgcctttggatgcaactgaagactcaaaaaagaatgagcctatatttaaagttgccccatcaaaatgggaagctgtggatgaatctgaattggaagcacaggctgttacaacttctaaatgggaattatttgaccagcatgaagaatcagaagaagaagaaaatcaaaatcaagaagaagaaagtgaagatgaagaagatactcaaagttccaaatctgaagaacatcatttgtactctaatccaatcaaagaagaaatgactgagtctaagttctctaagtactctgaaatgagtgaggaaaaacgagccaaacttcgtgaaattgagctcaaagttatgaagtttcaggatgaattggaatctgggaaaagacctaaaaaaccaggccagagttttcaggagcaagtagaacactacagagataaacttcttcaacgagagaaagagaaagagttagaaagagaacgagaaagagacaagaaagataaagaaaaattggaatctcgctccaaagacaagaaggaaaaagatgagtgtactccgacaaggaaggaaaggaagaggcgacacagtacatcccccagcccatctcgcagtagcagtggtagacgagtgaaatccccatcaccaaaatcggagcgatcagagcgttcagaaagatctcataaagagagctcacggtccaggtcatctcacaaagattctcctagagatgttagcaaaaaagccaaaagatcaccatctggttcaaggacacctaaaaggtctaggcgatcacggtctagatctcctaaaaaatcaggaaagaagtccagatcccagtccagatctccacacaggtctcataaaaagtcaaagaaaaacaaacactgacgtaaatttttaagatgctgtcacttattggaaatgcgatttgttttgtg

SEQ ID NO: 196836 - DNA, 725 bp, Homo sapiens
  Payload ID: 18818
  Gene Name: U2 snRNP-associated SURP domain containing
  ENST ID: ENST00000600150
  CDS Start-End: 350-725
ggactggctgctcaaactccacaatttaatgaaaaatctcagatgatgactcagaaaacctctaatgatctgaggaatatattaagggattccagagtcaaaggctgatcatggagggcattgatgagggaagacttcagcacgtttttcagcaccaggacaagcatcattgctcaaggagagcttggttgacaacaggaagttagaaggagtctgaattgtaacaagtgtggcaagagcaccaagatcactgtgtgtgtgtgttcacagaaaatgtaccaaagggagaagccttaaaaacaaatggcaggtgtgggcaccagaaaatcaacacatcgggaagagaaaaatggcatggttttactgtaattgtaaaaagatggatgcatctggaccctcagatagtgatatgccaagtcggacacgacctaagagcccaagaaaacataattataggaatgaaagtgcccgtgaaagcctttgtgattctcctcatcagaatctctcaagacctcttctggaaaacaaacttaaagcattcagtattggaaaaatgagtacagctaagcgaactttaagtaaaaaggaacaggaagaattaaagaaaaaggaggatgaaaaggcagctgctgagatttatgaggagtttcttgctgcttttgaaggaagtgatggtaataaagtgaaaacatttgtgcgagggggtgttgttaatgcagctaaag

SEQ ID NO: 196837 - DNA, 8478 bp, Homo sapiens
  Payload ID: 18819
  Gene Name: U2AF homology motif (UHM) kinase 1
  Uniprot ID: Q8TAS1
  ENST ID: ENST00000489294
  CDS Start-End: 159-1418
ggtgtcatggctgcttgaagtcccgggagtcggtgaggcggctgcaggtccctccctgcggagccgctggtccggctggcggagatgtgaccgcgggcccggccggcctgcctcaggcgtcgcgtcagctcccgtgtccgtgcccttaacccacaccgatggcgggatccggctgcgcctggggcgcggagccgccgcgttttctggaggccttcgggcggctgtggcaggtacagagccgtctgggtagcggctcctccgcctcggtgtatcgggttcgctgctgcggcaaccctggctcgccccccggcgccctcaagcagttcttgccgccaggaaccaccggggctgcggcctctgccgccgagtatggtttccgcaaagagagggcggcgctggaacagttgcagggtcacagaaacatcgtgactttgtatggagtgtttacaatccacttttctccaaatgtgccatcacgctgtctgttgcttgaactcctggatgtcagtgtttcggaattgctcttatattccagtcaccagggttgttccatgtggatgatacagcattgtgcccgagatgttttggaggcccttgcttttcttcatcatgagggctatgtccatgcggacctcaaaccacgtaacatattgtggagtgcagagaatgaatgttttaaactcattgactttggacttagcttcaaagaaggcaatcaggatgtaaagtatattcagacagacgggtatcgggctccagaagcagaattgcaaaattgcttggcccaggctggcctgcagagtgatacagaatgtacctcagctgttgatctgtggagcctaggaatcattttactggaaatgttctcaggaatgaaactgaaacatacagtcagatctcaggaatggaaggcaaacagttctgctattattgatcacatatttgccagtaaagcagtggtgaatgccgcaattccagcctatcacctaagagaccttatcaaaagcatgcttcatgatgatccaagcagaagaattcctgctgaaatggcattgtgcagcccattctttagcattccttttgcccctcatattgaagatctggtcatgcttcccactccagtgctaagactgctgaatgtgctggatgatgattatcttgagaatgaagaggaatatgaagatgttgtagaagatgtaaaagaggagtgtcaaaaatatggaccagtggtatctctacttgttccaaaggaaaatcctggcagaggacaagtctttgttgagtatgcaaatgctggtgattccaaagctgcgcagaaattactgactggaaggatgtttgatgggaagtttgttgtggctacattctacccgctgagtgcctacaagaggggatatctgtatcaaaccttgctttaatcagtaacctaaggactgtttcctttttctcctcttccatttcttgggttattccacatatgaatgcaggactacccccttaccattttaagaaggtactttatacatttatttaatcctactaatgtgcagccattgcccaagcagtgactgcgttgcatacatttggcactgagtaggacaagacctctcagctatacattgaggggttttagagcatccatgtgggcaacccttttttgtgcgggagagcaggtgttgctcttcagtatgtagcctaaaaaaatcttaattatttcatggatcatgaagcaaggatgaataatatcatgtcttggtaaatactaacaaatttgttaggtttggtgacatcatttacagattatttctttatgttgtccagtggttcttccttattgttgatatccataagctggcactggatgctctcagtaatgttaagtaattgtcaagcagcagttacctactgtgttcttaacactgagttgtgaattttttcttaaagcagtactgtagtactgaatattcctttaaaggaactgcagtgagcctatctaagtttttttaaattaaggcttttaaaatagaaagctgatgcttgatcttgcacaatttttatgtctagtatgtatgcttgagtgaatgtgcgagtatgaatgattagagaaaatttgagtcagtgtactttatagtgtgaatcctgtgagctaatacagtctatacttatttcttccctacctgtttcacatccgtaagatttaagatatacattttttgagaggtagtctgtctgatacaatgtaaatgacaaaacataattcctgagaggcccagaacaaactggagtctagcctggagttaaattgagacttctaaaatgattggaacaaagactaagttgtgccagatgtaaatcaacccctcttttagtttactttagactttgtattagctcatcttttttgtagtaaatctatagttttaaggtttctcaagatgtggctctacctactatgatgaaaattgaagtgggtcaaaagaattagatgtacagtgaagggaaaagaaaaaaaatgggcgaagagagggtggaaaataaaaggattcttttttcttcctttctgtttctcgtatccctgctccctttttcctccccttccctcattctttgcctctatccttagctgaagacaaactagaggagcagcatcccaggtagtttggcttttgactgcaaggtagttaagaaaggtgtagatataatgaggtagaagtagaaaggaagaaaaactcaaagaattcttaaaaggattcatagcaacataatgtgtccctgagtagaggatgctgctatgcgtgagttcatggacacaagttgattacatggtttttagaattataattatggattcttcttatttcatggtaggttgtctttaaagatataaaaattaggatgcctttatgaagcactgattataccaaaaaaaaaagacaagttatatacaggttattaatttttttatttatttattttttcctaaggaaaaagtcttctatctttccctgctggaagcctcctcatatttccttatgtttgccatgcaggttgctgagagtccagttagaatttgcattttacagaatgaaatactttaccccattcaaacaattattgtttgacattttagttatttataattgtcaaattcaggactctcctttaatgtttattatgaaaccaaatttggcataaggaggctgatttatgaattaccaaagggtcttgtggcatgttccccaatacatgcccttagaaggaagaactattattttttattttggccctttcaggagttgattataaattggtttgttttcaagtcagaattcaagtgggcagaacccgtattgtgaagacctaaactttcctaaatgttcatatgggtagcagattttgtggtgattagaaacatcaggtccttaaatacgatgaacatgggatacaaaggaattctttataagggcaagtatcctaagttagcacatttacttttctctcccctccgcccccaaaagaaaaatccttacaaataaactgcaggtaggcttctaagcctagtcctgcagtatgctgctaacatcttgatgccaatcttcacagcattctttgattgtcatcttattgctgatacattcatacatatatttagtgcttgacactgtagaattttgttacagaagatggttactagattttaagggagctgagggaataattgatgagccttgaattaaccatgcatttaattagattttttgttgttgttgttgttgttttgagatgatgtcttgctctgttgcccaggctggagtgcagtggctcaatctcggctcactgcaacctctgcctcgcaggtttgagcgattctcctgtctcagcctccccagtagctgggtttacaggcgcttgccaccacacctggctagatgttttatattaaagccagagaattgaaaaagaaatgcctcctgtgattgaaattattttatagctcttagcccgttctaccaaagatcacattagcagattacccctccctcctgtgatattatctttcttaaacctgaaccaaatatcaaaagatacaagtttcatgattaggatgaaatatatacatagggattttggtttattgaagttattgaaagacctagaaattttctttttgagagaaagggtaaagaggtgagggttcatgtcacttaacccctacccttttgggcaaattttgtctcaggtagtgtttcattccctaaattaatacctgtgcttccttgcctctcaccttcccagttacttctttggggtattactgtggcacattgtacacccagaaaaggcacatacagtgattattttgtgggaaatacttgattcttttgaaatatatttggagggggtagctagctagccactgtcaaaactaatgctgtatttacaggacaaaaacaagtagagttggacacctcagtaagagacagcattaactaaaagtactgactgccttttaaaggaatttttaaaactattctcttgcaataagagatccgcatttattaccactggatgtcttccttttttgtggccaccaatatagcagctctctttagagggattccctttctgctatgccttgagccaaactggctgcttttagaacaaaaaccataagtatggttttactcgaacttctctttgtttttattgagagaaatattgccttctttttggtactccagctgctaaagagtgctgagatatgttaaattattttttaaaagaaaatctccaaatacttatttaacttgtcttctagattcatgttgcttatattttaactattgagcaagtttattataaggaatgctgccatatagagaaagctgaagagaaaccatgggcagaaggcttttttctgtcttattacactggaccttcactctggtaagggcatcagttacttttctggaataaaaggcggagttagagcacttatcagatgctgtttcatggcttgttttagttaatttatcatgcagataactaacatttgggtatctttttgttttaggtcttattttctgactgttaggcctatcttacacataagttctactatcagtatacttggcagcatgacttttttttttttttacagttaatttaatgaaaatcagcaccattgtaaatgatagtaattgtaacaacatagttactgggtgaaggagtaggggagacactcagtaaccatctatttacctagacacttatgcaggggtacatgctaggtggctttattcagattcgggtacattggaatcacatcatgactttgagtctgatggctgtgtagataaagatttaagcaagtgccttgtgtttgctggaaaatattaaaactcatttgggtgaaagcttcccagatgatgataattaatagcacttctgcctttttcctggagtaacttttagattgagtcacatatgatagtataaaagtccaaaattttctgggtttacctttgttttatttttcatatatatattcactgtctgcctggaaatagccttggtttaccttatttttttgtatatgtaaaactattcatatttgattttattccaatattatatatgatggaaaagccagaattgtctggcagaatttaattcttccttggatctctagttctgtttttaatatcaggttccttcatcaaattttactactgtagctctgtgatataatttcatttcttgtcaattatggtcacatatagacaagtacttggtcacaattagctcaaaagaatccccatttcttaaggtgctcagtcaatcacctttattttgagatggtagtttttcaagttagtattacttactagctttcttgatgaatataaaaatgttgtctccatcatacagagctgagcctcttgtggtatattaagataagtcccattcttaatcacagaagaacatggatattttagtttttggagtacccagaattgtaaagattttgtttcattttgttttaggatagcttctctgcctaatactataggatatgtcatgttcgttattgtagccacctccctcagatgtttttcactatttttaaattatataatgaccagtagattcacagtagcatgtacttgacaagtgccatggatatttaagaagaaggtaaataattttaatattttttgctgtaattttataggagcagtggactgtaagagaaatatctataaatcagagagtatttaggaaactttgtattttataggtggtcattaaagtgatcttcaggatataagatagtttacacaaactttattctcctgataggaaatttttattcattttcctaccactcagcacttttgttctgccttgtactgcttatgaggattaatgttttaaatttgctttatttgtgcttttcagagagttgtcataattgtggcagttgtgtttgtggcactgtaaatgctgaaattcatgggaaacttaccaaatgactgcttgagtgttatttcccattaaattgggtagctgtcacaataaccagaagaaatcttgtggcccttttgaagaaagccatgtatgttttgttacctaggttcatagtattttaatttaaaggcaaagagaagcattctacttatttgtcttataaaccattaatcgttttttgtgcagaagagagcttattttgttatactgctttgtataatggaaataagtcacattctgggggaaaaaaactggaattgtttgtattttgtttttttggggggggatctttatgtgaaaaatcagagctacttgttaccataagcccttactatcaacaagataattatttgtaatcacttttttatcccaggttggaattgctttccccttctaagttatcttcccttaataatatttatgataccaggacagtgagggtataagagcaaatgtagtgaggtattcaaaaatcctgcatatatggactcaaaagttctttagttatttgaattatatatagctatattattttattagcttgggttgtcagaagattgccaattttaagagtaaagaggagagagataagtaataaaaatagaggaggggaagaaaatggctcccttactggtcttagtaatcttctatatagttaatgagctaaaaaatgatacttaaagttccaggtttggtaccgctagcatagaaacattgcctttcctacacattcctcatcattgtttcctcagaaaattattttaagagtttgtgaaaccagattaaatatctatattcagtttggcctaatttttaaaaataaatatttatactccagcttttgtgtatttggtgtacatcaccacttatgcaaatcaaggatcagaaaactggaggttagccatctccattatttccttttgcacattgggtacagtgggtggcattagtatgcactagctgcaaagtcacagcaccttatggaaataagtatgtttattataataaaaaaaagttaagctgcatctctgtagattatttactttgcagactgtaaagctgccctatcttttccagcagaatttactcttccattcttaattcttttttgaaatatcttaaataatttaacattcctttataacttcttaacagtgtcaaaactggggtagaagggattttattttttcccaaaagggttccatctttgctatctgttgatcagccttagaaaatctaagtatgatcaataaattttaatggttgatggcatcctgtgtcagctggagtagttggttgtgaatattaaaacctagtactattttccctcagtaacatgtaattgctacattttttataagaaggtatggttagaaaaaaatgtgaaagatcacttaaaccaaagccagttacaaggagtaatctctcctgttggtttaccttcacctcagaactacaagaatattacaatacatagtgaatagttgtctgtaacatttctaccagttgtttcagtagcatattggtcttggcatttcttggcactgtggttctgctgtattatttgtgatgtcttattgtttgtgagcttttgttttttttttaaagaaaaaacaaaaactaagtgggactatgtatgtagatgtgtgtcagtaccaaaaagttattttctcaaatccctaaatttctgatttccattcaagtcttttaaactctttcctgctgaatagcaaagaacttttattttccactttcctatattcctaaaaagtgtgaacaatgcgtttcagttgactgtattgcatacttttttgctgaagactttttctgtaaacacaattgccttgttcagttttgttgtaaactgacttaccataagatgcactgttgataatgctttctgatgtgtgtttgataagagtgataaaataaaagcttaaaaataaa

SEQ ID NO: 196838 - DNA, 8117 bp, Homo sapiens
  Payload ID: 18819
  Gene Name: U2AF homology motif (UHM) kinase 1
  Uniprot ID: Q8TAS1
  ENST ID: ENST00000545294
  CDS Start-End: 1-1038
atgtttcttaccagaccgaaggtctgtgttgaccttaaccggagagtgactttgtatggagtgtttacaatccacttttctccaaatgtgccatcacgctgtctgttgcttgaactcctggatgtcagtgtttcggaattgctcttatattccagtcaccagggttgttccatgtggatgatacagcattgtgcccgagatgttttggaggcccttgcttttcttcatcatgagggctatgtccatgcggacctcaaaccacgtaacatattgtggagtgcagagaatgaatgttttaaactcattgactttggacttagcttcaaagaaggcaatcaggatgtaaagtatattcagacagacgggtatcgggctccagaagcagaattgcaaaattgcttggcccaggctggcctgcagagtgatacagaatgtacctcagctgttgatctgtggagcctaggaatcattttactggaaatgttctcaggaatgaaactgaaacatacagtcagatctcaggaatggaaggcaaacagttctgctattattgatcacatatttgccagtaaagcagtggtgaatgccgcaattccagcctatcacctaagagaccttatcaaaagcatgcttcatgatgatccaagcagaagaattcctgctgaaatggcattgtgcagcccattctttagcattccttttgcccctcatattgaagatctggtcatgcttcccactccagtgctaagactgctgaatgtgctggatgatgattatcttgagaatgaagaggaatatgaagatgttgtagaagatgtaaaagaggagtgtcaaaaatatggaccagtggtatctctacttgttccaaaggaaaatcctggcagaggacaagtctttgttgagtatgcaaatgctggtgattccaaagctgcgcagaaattactgactggaaggatgtttgatgggaagtttgttgtggctacattctacccgctgagtgcctacaagaggggatatctgtatcaaaccttgctttaatcagtaacctaaggactgtttcctttttctcctcttccatttcttgggttattccacatatgaatgcaggactacccccttaccattttaagaaggtactttatacatttatttaatcctactaatgtgcagccattgcccaagcagtgactgcgttgcatacatttggcactgagtaggacaagacctctcagctatacattgaggggttttagagcatccatgtgggcaacccttttttgtgcgggagagcaggtgttgctcttcagtatgtagcctaaaaaaatcttaattatttcatggatcatgaagcaaggatgaataatatcatgtcttggtaaatactaacaaatttgttaggtttggtgacatcatttacagattatttctttatgttgtccagtggttcttccttattgttgatatccataagctggcactggatgctctcagtaatgttaagtaattgtcaagcagcagttacctactgtgttcttaacactgagttgtgaattttttcttaaagcagtactgtagtactgaatattcctttaaaggaactgcagtgagcctatctaagtttttttaaattaaggcttttaaaatagaaagctgatgcttgatcttgcacaatttttatgtctagtatgtatgcttgagtgaatgtgcgagtatgaatgattagagaaaatttgagtcagtgtactttatagtgtgaatcctgtgagctaatacagtctatacttatttcttccctacctgtttcacatccgtaagatttaagatatacattttttgagaggtagtctgtctgatacaatgtaaatgacaaaacataattcctgagaggcccagaacaaactggagtctagcctggagttaaattgagacttctaaaatgattggaacaaagactaagttgtgccagatgtaaatcaacccctcttttagtttactttagactttgtattagctcatcttttttgtagtaaatctatagttttaaggtttctcaagatgtggctctacctactatgatgaaaattgaagtgggtcaaaagaattagatgtacagtgaagggaaaagaaaaaaaatgggcgaagagagggtggaaaataaaaggattcttttttcttcctttctgtttctcgtatccctgctccctttttcctccccttccctcattctttgcctctatccttagctgaagacaaactagaggagcagcatcccaggtagtttggcttttgactgcaaggtagttaagaaaggtgtagatataatgaggtagaagtagaaaggaagaaaaactcaaagaattcttaaaaggattcatagcaacataatgtgtccctgagtagaggatgctgctatgcgtgagttcatggacacaagttgattacatggtttttagaattataattatggattcttcttatttcatggtaggttgtctttaaagatataaaaattaggatgcctttatgaagcactgattataccaaaaaaaaaagacaagttatatacaggttattaatttttttatttatttattttttcctaaggaaaaagtcttctatctttccctgctggaagcctcctcatatttccttatgtttgccatgcaggttgctgagagtccagttagaatttgcattttacagaatgaaatactttaccccattcaaacaattattgtttgacattttagttatttataattgtcaaattcaggactctcctttaatgtttattatgaaaccaaatttggcataaggaggctgatttatgaattaccaaagggtcttgtggcatgttccccaatacatgcccttagaaggaagaactattattttttattttggccctttcaggagttgattataaattggtttgttttcaagtcagaattcaagtgggcagaacccgtattgtgaagacctaaactttcctaaatgttcatatgggtagcagattttgtggtgattagaaacatcaggtccttaaatacgatgaacatgggatacaaaggaattctttataagggcaagtatcctaagttagcacatttacttttctctcccctccgcccccaaaagaaaaatccttacaaataaactgcaggtaggcttctaagcctagtcctgcagtatgctgctaacatcttgatgccaatcttcacagcattctttgattgtcatcttattgctgatacattcatacatatatttagtgcttgacactgtagaattttgttacagaagatggttactagattttaagggagctgagggaataattgatgagccttgaattaaccatgcatttaattagattttttgttgttgttgttgttgttttgagatgatgtcttgctctgttgcccaggctggagtgcagtggctcaatctcggctcactgcaacctctgcctcgcaggtttgagcgattctcctgtctcagcctccccagtagctgggtttacaggcgcttgccaccacacctggctagatgttttatattaaagccagagaattgaaaaagaaatgcctcctgtgattgaaattattttatagctcttagcccgttctaccaaagatcacattagcagattacccctccctcctgtgatattatctttcttaaacctgaaccaaatatcaaaagatacaagtttcatgattaggatgaaatatatacatagggattttggtttattgaagttattgaaagacctagaaattttctttttgagagaaagggtaaagaggtgagggttcatgtcacttaacccctacccttttgggcaaattttgtctcaggtagtgtttcattccctaaattaatacctgtgcttccttgcctctcaccttcccagttacttctttggggtattactgtggcacattgtacacccagaaaaggcacatacagtgattattttgtgggaaatacttgattcttttgaaatatatttggagggggtagctagctagccactgtcaaaactaatgctgtatttacaggacaaaaacaagtagagttggacacctcagtaagagacagcattaactaaaagtactgactgccttttaaaggaatttttaaaactattctcttgcaataagagatccgcatttattaccactggatgtcttccttttttgtggccaccaatatagcagctctctttagagggattccctttctgctatgccttgagccaaactggctgcttttagaacaaaaaccataagtatggttttactcgaacttctctttgtttttattgagagaaatattgccttctttttggtactccagctgctaaagagtgctgagatatgttaaattattttttaaaagaaaatctccaaatacttatttaacttgtcttctagattcatgttgcttatattttaactattgagcaagtttattataaggaatgctgccatatagagaaagctgaagagaaaccatgggcagaaggcttttttctgtcttattacactggaccttcactctggtaagggcatcagttacttttctggaataaaaggcggagttagagcacttatcagatgctgtttcatggcttgttttagttaatttatcatgcagataactaacatttgggtatctttttgttttaggtcttattttctgactgttaggcctatcttacacataagttctactatcagtatacttggcagcatgacttttttttttttttacagttaatttaatgaaaatcagcaccattgtaaatgatagtaattgtaacaacatagttactgggtgaaggagtaggggagacactcagtaaccatctatttacctagacacttatgcaggggtacatgctaggtggctttattcagattcgggtacattggaatcacatcatgactttgagtctgatggctgtgtagataaagatttaagcaagtgccttgtgtttgctggaaaatattaaaactcatttgggtgaaagcttcccagatgatgataattaatagcacttctgcctttttcctggagtaacttttagattgagtcacatatgatagtataaaagtccaaaattttctgggtttacctttgttttatttttcatatatatattcactgtctgcctggaaatagccttggtttaccttatttttttgtatatgtaaaactattcatatttgattttattccaatattatatatgatggaaaagccagaattgtctggcagaatttaattcttccttggatctctagttctgtttttaatatcaggttccttcatcaaattttactactgtagctctgtgatataatttcatttcttgtcaattatggtcacatatagacaagtacttggtcacaattagctcaaaagaatccccatttcttaaggtgctcagtcaatcacctttattttgagatggtagtttttcaagttagtattacttactagctttcttgatgaatataaaaatgttgtctccatcatacagagctgagcctcttgtggtatattaagataagtcccattcttaatcacagaagaacatggatattttagtttttggagtacccagaattgtaaagattttgtttcattttgttttaggatagcttctctgcctaatactataggatatgtcatgttcgttattgtagccacctccctcagatgtttttcactatttttaaattatataatgaccagtagattcacagtagcatgtacttgacaagtgccatggatatttaagaagaaggtaaataattttaatattttttgctgtaattttataggagcagtggactgtaagagaaatatctataaatcagagagtatttaggaaactttgtattttataggtggtcattaaagtgatcttcaggatataagatagtttacacaaactttattctcctgataggaaatttttattcattttcctaccactcagcacttttgttctgccttgtactgcttatgaggattaatgttttaaatttgctttatttgtgcttttcagagagttgtcataattgtggcagttgtgtttgtggcactgtaaatgctgaaattcatgggaaacttaccaaatgactgcttgagtgttatttcccattaaattgggtagctgtcacaataaccagaagaaatcttgtggcccttttgaagaaagccatgtatgttttgttacctaggttcatagtattttaatttaaaggcaaagagaagcattctacttatttgtcttataaaccattaatcgttttttgtgcagaagagagcttattttgttatactgctttgtataatggaaataagtcacattctgggggaaaaaaactggaattgtttgtattttgtttttttggggggggatctttatgtgaaaaatcagagctacttgttaccataagcccttactatcaacaagataattatttgtaatcacttttttatcccaggttggaattgctttccccttctaagttatcttcccttaataatatttatgataccaggacagtgagggtataagagcaaatgtagtgaggtattcaaaaatcctgcatatatggactcaaaagttctttagttatttgaattatatatagctatattattttattagcttgggttgtcagaagattgccaattttaagagtaaagaggagagagataagtaataaaaatagaggaggggaagaaaatggctcccttactggtcttagtaatcttctatatagttaatgagctaaaaaatgatacttaaagttccaggtttggtaccgctagcatagaaacattgcctttcctacacattcctcatcattgtttcctcagaaaattattttaagagtttgtgaaaccagattaaatatctatattcagtttggcctaatttttaaaaataaatatttatactccagcttttgtgtatttggtgtacatcaccacttatgcaaatcaaggatcagaaaactggaggttagccatctccattatttccttttgcacattgggtacagtgggtggcattagtatgcactagctgcaaagtcacagcaccttatggaaataagtatgtttattataataaaaaaaagttaagctgcatctctgtagattatttactttgcagactgtaaagctgccctatcttttccagcagaatttactcttccattcttaattcttttttgaaatatcttaaataatttaacattcctttataacttcttaacagtgtcaaaactggggtagaagggattttattttttcccaaaagggttccatctttgctatctgttgatcagccttagaaaatctaagtatgatcaataaattttaatggttgatggcatcctgtgtcagctggagtagttggttgtgaatattaaaacctagtactattttccctcagtaacatgtaattgctacattttttataagaaggtatggttagaaaaaaatgtgaaagatcacttaaaccaaagccagttacaaggagtaatctctcctgttggtttaccttcacctcagaactacaagaatattacaatacatagtgaatagttgtctgtaacatttctaccagttgtttcagtagcatattggtcttggcatttcttggcactgtggttctgctgtattatttgtgatgtcttattgtttgtgagcttttgttttttttttaaagaaaaaacaaaaactaagtgggactatgtatgtagatgtgtgtcagtaccaaaaagttattttctcaaatccctaaatttctgatttccattcaagtcttttaaactctttcctgctgaatagcaaagaacttttattttccactttcctatattcctaaaaagtgtgaacaatgcgtttcagttgactgtattgcatacttttttgctgaagactttttctgtaaacacaattgccttgttcagttttgttgtaaactgacttaccataagatgcactgttgataatgctttctgatgtgtgtttgataagagtgataaaataaaagcttaaaaataaaggagttgctttttaatttc

SEQ ID NO: 196839 - DNA, 8446 bp, Homo sapiens
  Payload ID: 18819
  Gene Name: U2AF homology motif (UHM) kinase 1
  Uniprot ID: Q8TAS1
  ENST ID: ENST00000538489
  CDS Start-End: 197-1231
atttccggcttctgggactcgggtgcaccacggcttccggtgtcatggctgcttgaagtcccgggagtcggtgaggcggctgcaggtccctccctgcggagccgctggtccggctggcggagatgtgaccgcgggcccggccggcctgcctcaggcgtcgcgtcagctcccgtgtccgtgcccttaacccacaccgatggcgggatccggctgcgcctggggcgcggagccgccgcgttttctggaggccttcgggcggctgtggcaggtacagagccgtctgggtagcggctcctccgcctcggtgtatcgggttcgctgctgcggcaaccctggctcgccccccggcgccctcaagcagttcttgccgccaggaaccaccggggctgcggcctctgccgccgagtatggtttccgcaaagagagggcggcgctggaacagttgcagggtcacagaaacatcgtgactttgtatggagtgtttacaatccacttttctccaaatgtgccatcacgctgtctgttgcttgaactcctggatgtcagtgtttcggaattgctcttatattccagtcaccagggttgttccatgtggatgatacagcattgtgcccgagatgttttggaggcccttgcttttcttcatcatgagggctatgtccatgcggacctcaaaccacgtaacatattgtggagtgcagagaatgaatgttttaaactcattgactttggacttagcttcaaagaaggcaatcaggatgtaaagtatattcagacagacgggtatcgggctccagaagcagaattgcaaaattgcttggcccaggctggcctgcagagtgatacagaatgtacctcagctgttgatctgtggagcctaggaatcattttactggaaatgttctcaggaatgaaactgaaacatacagtcagatctcaggaatggaaggcaaacagttctgctattattgatcacatatttgccagtaaagcagtggtgaatgccgcaattccagcctatcacctaagagaccttatcaaaagcatgcttcatgatgatccaagcagaagaattcctgctgaaatggcattgtgcagcccattctttagcattccttttgcccctcatattgaagatctggtcatgcttcccactccagtgctaagactgctgaatgtgctggatgatgattatcttgagaatgaagaggaatatgaaggtctttgttgagtatgcaaatgctggtgattccaaagctgcgcagaaattactgactggaaggatgtttgatgggaagtttgttgtggctacattctacccgctgagtgcctacaagaggggatatctgtatcaaaccttgctttaatcagtaacctaaggactgtttcctttttctcctcttccatttcttgggttattccacatatgaatgcaggactacccccttaccattttaagaaggtactttatacatttatttaatcctactaatgtgcagccattgcccaagcagtgactgcgttgcatacatttggcactgagtaggacaagacctctcagctatacattgaggggttttagagcatccatgtgggcaacccttttttgtgcgggagagcaggtgttgctcttcagtatgtagcctaaaaaaatcttaattatttcatggatcatgaagcaaggatgaataatatcatgtcttggtaaatactaacaaatttgttaggtttggtgacatcatttacagattatttctttatgttgtccagtggttcttccttattgttgatatccataagctggcactggatgctctcagtaatgttaagtaattgtcaagcagcagttacctactgtgttcttaacactgagttgtgaattttttcttaaagcagtactgtagtactgaatattcctttaaaggaactgcagtgagcctatctaagtttttttaaattaaggcttttaaaatagaaagctgatgcttgatcttgcacaatttttatgtctagtatgtatgcttgagtgaatgtgcgagtatgaatgattagagaaaatttgagtcagtgtactttatagtgtgaatcctgtgagctaatacagtctatacttatttcttccctacctgtttcacatccgtaagatttaagatatacattttttgagaggtagtctgtctgatacaatgtaaatgacaaaacataattcctgagaggcccagaacaaactggagtctagcctggagttaaattgagacttctaaaatgattggaacaaagactaagttgtgccagatgtaaatcaacccctcttttagtttactttagactttgtattagctcatcttttttgtagtaaatctatagttttaaggtttctcaagatgtggctctacctactatgatgaaaattgaagtgggtcaaaagaattagatgtacagtgaagggaaaagaaaaaaaatgggcgaagagagggtggaaaataaaaggattcttttttcttcctttctgtttctcgtatccctgctccctttttcctccccttccctcattctttgcctctatccttagctgaagacaaactagaggagcagcatcccaggtagtttggcttttgactgcaaggtagttaagaaaggtgtagatataatgaggtagaagtagaaaggaagaaaaactcaaagaattcttaaaaggattcatagcaacataatgtgtccctgagtagaggatgctgctatgcgtgagttcatggacacaagttgattacatggtttttagaattataattatggattcttcttatttcatggtaggttgtctttaaagatataaaaattaggatgcctttatgaagcactgattataccaaaaaaaaaagacaagttatatacaggttattaatttttttatttatttattttttcctaaggaaaaagtcttctatctttccctgctggaagcctcctcatatttccttatgtttgccatgcaggttgctgagagtccagttagaatttgcattttacagaatgaaatactttaccccattcaaacaattattgtttgacattttagttatttataattgtcaaattcaggactctcctttaatgtttattatgaaaccaaatttggcataaggaggctgatttatgaattaccaaagggtcttgtggcatgttccccaatacatgcccttagaaggaagaactattattttttattttggccctttcaggagttgattataaattggtttgttttcaagtcagaattcaagtgggcagaacccgtattgtgaagacctaaactttcctaaatgttcatatgggtagcagattttgtggtgattagaaacatcaggtccttaaatacgatgaacatgggatacaaaggaattctttataagggcaagtatcctaagttagcacatttacttttctctcccctccgcccccaaaagaaaaatccttacaaataaactgcaggtaggcttctaagcctagtcctgcagtatgctgctaacatcttgatgccaatcttcacagcattctttgattgtcatcttattgctgatacattcatacatatatttagtgcttgacactgtagaattttgttacagaagatggttactagattttaagggagctgagggaataattgatgagccttgaattaaccatgcatttaattagattttttgttgttgttgttgttgttttgagatgatgtcttgctctgttgcccaggctggagtgcagtggctcaatctcggctcactgcaacctctgcctcgcaggtttgagcgattctcctgtctcagcctccccagtagctgggtttacaggcgcttgccaccacacctggctagatgttttatattaaagccagagaattgaaaaagaaatgcctcctgtgattgaaattattttatagctcttagcccgttctaccaaagatcacattagcagattacccctccctcctgtgatattatctttcttaaacctgaaccaaatatcaaaagatacaagtttcatgattaggatgaaatatatacatagggattttggtttattgaagttattgaaagacctagaaattttctttttgagagaaagggtaaagaggtgagggttcatgtcacttaacccctacccttttgggcaaattttgtctcaggtagtgtttcattccctaaattaatacctgtgcttccttgcctctcaccttcccagttacttctttggggtattactgtggcacattgtacacccagaaaaggcacatacagtgattattttgtgggaaatacttgattcttttgaaatatatttggagggggtagctagctagccactgtcaaaactaatgctgtatttacaggacaaaaacaagtagagttggacacctcagtaagagacagcattaactaaaagtactgactgccttttaaaggaatttttaaaactattctcttgcaataagagatccgcatttattaccactggatgtcttccttttttgtggccaccaatatagcagctctctttagagggattccctttctgctatgccttgagccaaactggctgcttttagaacaaaaaccataagtatggttttactcgaacttctctttgtttttattgagagaaatattgccttctttttggtactccagctgctaaagagtgctgagatatgttaaattattttttaaaagaaaatctccaaatacttatttaacttgtcttctagattcatgttgcttatattttaactattgagcaagtttattataaggaatgctgccatatagagaaagctgaagagaaaccatgggcagaaggcttttttctgtcttattacactggaccttcactctggtaagggcatcagttacttttctggaataaaaggcggagttagagcacttatcagatgctgtttcatggcttgttttagttaatttatcatgcagataactaacatttgggtatctttttgttttaggtcttattttctgactgttaggcctatcttacacataagttctactatcagtatacttggcagcatgacttttttttttttttacagttaatttaatgaaaatcagcaccattgtaaatgatagtaattgtaacaacatagttactgggtgaaggagtaggggagacactcagtaaccatctatttacctagacacttatgcaggggtacatgctaggtggctttattcagattcgggtacattggaatcacatcatgactttgagtctgatggctgtgtagataaagatttaagcaagtgccttgtgtttgctggaaaatattaaaactcatttgggtgaaagcttcccagatgatgataattaatagcacttctgcctttttcctggagtaacttttagattgagtcacatatgatagtataaaagtccaaaattttctgggtttacctttgttttatttttcatatatatattcactgtctgcctggaaatagccttggtttaccttatttttttgtatatgtaaaactattcatatttgattttattccaatattatatatgatggaaaagccagaattgtctggcagaatttaattcttccttggatctctagttctgtttttaatatcaggttccttcatcaaattttactactgtagctctgtgatataatttcatttcttgtcaattatggtcacatatagacaagtacttggtcacaattagctcaaaagaatccccatttcttaaggtgctcagtcaatcacctttattttgagatggtagtttttcaagttagtattacttactagctttcttgatgaatataaaaatgttgtctccatcatacagagctgagcctcttgtggtatattaagataagtcccattcttaatcacagaagaacatggatattttagtttttggagtacccagaattgtaaagattttgtttcattttgttttaggatagcttctctgcctaatactataggatatgtcatgttcgttattgtagccacctccctcagatgtttttcactatttttaaattatataatgaccagtagattcacagtagcatgtacttgacaagtgccatggatatttaagaagaaggtaaataattttaatattttttgctgtaattttataggagcagtggactgtaagagaaatatctataaatcagagagtatttaggaaactttgtattttataggtggtcattaaagtgatcttcaggatataagatagtttacacaaactttattctcctgataggaaatttttattcattttcctaccactcagcacttttgttctgccttgtactgcttatgaggattaatgttttaaatttgctttatttgtgcttttcagagagttgtcataattgtggcagttgtgtttgtggcactgtaaatgctgaaattcatgggaaacttaccaaatgactgcttgagtgttatttcccattaaattgggtagctgtcacaataaccagaagaaatcttgtggcccttttgaagaaagccatgtatgttttgttacctaggttcatagtattttaatttaaaggcaaagagaagcattctacttatttgtcttataaaccattaatcgttttttgtgcagaagagagcttattttgttatactgctttgtataatggaaataagtcacattctgggggaaaaaaactggaattgtttgtattttgtttttttggggggggatctttatgtgaaaaatcagagctacttgttaccataagcccttactatcaacaagataattatttgtaatcacttttttatcccaggttggaattgctttccccttctaagttatcttcccttaataatatttatgataccaggacagtgagggtataagagcaaatgtagtgaggtattcaaaaatcctgcatatatggactcaaaagttctttagttatttgaattatatatagctatattattttattagcttgggttgtcagaagattgccaattttaagagtaaagaggagagagataagtaataaaaatagaggaggggaagaaaatggctcccttactggtcttagtaatcttctatatagttaatgagctaaaaaatgatacttaaagttccaggtttggtaccgctagcatagaaacattgcctttcctacacattcctcatcattgtttcctcagaaaattattttaagagtttgtgaaaccagattaaatatctatattcagtttggcctaatttttaaaaataaatatttatactccagcttttgtgtatttggtgtacatcaccacttatgcaaatcaaggatcagaaaactggaggttagccatctccattatttccttttgcacattgggtacagtgggtggcattagtatgcactagctgcaaagtcacagcaccttatggaaataagtatgtttattataataaaaaaaagttaagctgcatctctgtagattatttactttgcagactgtaaagctgccctatcttttccagcagaatttactcttccattcttaattcttttttgaaatatcttaaataatttaacattcctttataacttcttaacagtgtcaaaactggggtagaagggattttattttttcccaaaagggttccatctttgctatctgttgatcagccttagaaaatctaagtatgatcaataaattttaatggttgatggcatcctgtgtcagctggagtagttggttgtgaatattaaaacctagtactattttccctcagtaacatgtaattgctacattttttataagaaggtatggttagaaaaaaatgtgaaagatcacttaaaccaaagccagttacaaggagtaatctctcctgttggtttaccttcacctcagaactacaagaatattacaatacatagtgaatagttgtctgtaacatttctaccagttgtttcagtagcatattggtcttggcatttcttggcactgtggttctgctgtattatttgtgatgtcttattgtttgtgagcttttgttttttttttaaagaaaaaacaaaaactaagtgggactatgtatgtagatgtgtgtcagtaccaaaaagttattttctcaaatccctaaatttctgatttccattcaagtcttttaaactctttcctgctgaatagcaaagaacttttattttccactttcctatattcctaaaaagtgtgaacaatgcgtttcagttgactgtattgcatacttttttgctgaagactttttctgtaaacacaattgccttgttcagttttgttgtaaactgacttaccataagatgcactgttgataatgctttctgatgtgtgtttgataagagtgataaaataaaagcttaaaaataaaggagttgctttttaatttc

SEQ ID NO: 196840 - DNA, 581 bp, Homo sapiens
  Payload ID: 18820
  Gene Name: U51561.1
  ENST ID: ENST00000625149
  CDS Start-End: 31-564
agttggaacctcccactgacagccagaacgatgagccactcccgaagagctgctcctactcaggaccaatgccacactccaggattccccacctcccgtgaaaccagtgggagcatatggcaggccaggatctgtggatctttacaggctctggacacatggcgaacacacatccccagaaagagcccagctcccactcaggcatcacagatctgtctgctgttgcctgaaagcccctggagaaatcccacaccccggggatttcttaaacctttgattaactgggatgctatcctgtacttcaaagaaaagaggaatatccaagtaacaacacaagctcatccccagaaccaggccagctgcagctctcaggaggtagccacacccgggctagtgccactggcagctgcaccaaaggtgtatgagcggtcacatgataacctgaacgctgaggcccaaggactggcaggtgctcaggtgtcgaaaccacagaatcccattaccaggctctgttctctgaaggaacagtcaatcttgaagatcttcactaagcagagcatctgaggtttaccggcttgaag

SEQ ID NO: 196841 - DNA, 2282 bp, Homo sapiens
  Payload ID: 18821
  Gene Name: U6 snRNA biogenesis 1
  Uniprot ID: Q9BQ65
  ENST ID: ENST00000219281
  CDS Start-End: 112-909
gcggtgccagcccaggccccgcccctgggagggcgcttccggcacagcggaactccgggtgccggttgaggttgctggtggacctgctctggtggtcttggatgaggccccatgagcgcggcgcccctggtgggctacagcagcagcggctccgaggatgagtccgaggacgggatgcggaccaggccgggggatgggagccaccgtcgtggccagagcccccttcccaggcagagatttccagtacctgacagtgtgctgaacatgttcccgggcaccgaggaggggcctgaagatgacagcacaaaacacgggggacgggtgcgcaccttcccccacgagcgaggcaactgggccacccacgtctatgtaccatatgaagccaaggaggagttcctggatctgcttgatgtgttgctgccccatgcccagacatatgtcccccggctggtaaggatgaaggtgttccacctcagcctgtcccagagtgtggttctgcgccaccactggatcctccccttcgtgcaggctctgaaagcccgtatgacctccttccacagattcttctttactgccaaccaggtaaagatttacaccaatcaagagaaaaccaggacctttattgggcttgaggtcacttcagggcatgcccagttcctggacctggtttcagaggtggacagagtcatggaggaattcaacctcaccactttctaccaggatccttctttccacctcagcctggcctggtgtgtgggtgatgcacgtctccagctggaggggcagtgcctgcaggaactacaggcaatcgtggatgggtttgaagatgctgaggtgctgctgcgcgtgcacactgagcaagtccgctgcaagtctgggaacaagttcttctcgatgcctttgaagtgagcaccagaggccttcctcctccagggccctctgcagaccaggctgagatggaggaacctgctaaaatcgatggagatgcttctagcctcccagtaggaggccccagccatgccttcaacctggcaggaggtgtagccactcctcatcctccctgagtgctgatattctctctctctctttctcttcctcttctttctctctcttctcctctctttctctcctctgtctctcttcctctcctctcttcctctcttctctcttcctctcctctctctcttcctcttctctctcttcccctcctgtctctcctcccctcctctcttcctctcctctctcttcctctcctctctctacccctcctgtctctcctcccctcctctctcttcctctcctctctctcttcctctcctctctcttcccttcctgtctctcttcccctcctctctctcttcctgtcctctatctcttcccctcctctatctcttcctctcctctctctcttcctctcctctctctctcttgctttcttctctctctcctgtctcggctgttgtgggttgcaggttgggtgctgctgttgtggtccttcccagaaactgccagtagagggcagcctgggcatcctaatgcttactctggttgttacacaaagaaaatattggggtcactggcgagcccacccacactcaccagaatctccactgtagtccccctaacaaacagcccttcacttcctctcccacttcagcaatttgtattttgatgccattggcctcagatcagagtgttttaaatcatcacgccctggcttatccctggtcgagccaggacacggggtgcttcagtgggtctgtcaccctctctccttgaagcatgttgcttttatttatttacttttactctcaccctgctcctgtaccagcaggggccacttcaaagccaaggtacagggtgataacttgtggtccagcatcagttttctccacttctttctcccactcacccccagcaaggtgcctggggagacttgagcagatgtttcattttggcctggccagtggctgaaagccaggcctccaatgcactgtgacctctggcttccccagcagctttcccagagaggcagaggggccttccacagcccgggttctcctgctgcctcctgcctgctgcagctgcaggcattctgaggggcaacgtggaggaagggccagggatgcatgggattttaattgtttcatcacaccttccccgtggcaaagaaacagtcagtcctcttcaggtgtcttctggatttctggtgatggacagagaaatctttttacagtttcaaattatgttcaacaaataaaaattgcattttttattttgga

SEQ ID NO: 196842 - DNA, 1217 bp, Homo sapiens
  Payload ID: 18821
  Gene Name: U6 snRNA biogenesis 1
  Uniprot ID: Q9BQ65
  ENST ID: ENST00000423271
  CDS Start-End: 78-638
gcttccggcacagcggaactccgggtgccggttgaggttgctggtggacctgctctggtggtcttggatgaggccccatgagcgcggcgcccctggtgggctacagcagcagcggctccgaggatgagtccgaggacgggatgcggaccaggccgggggatgggagccaccgtcgtggccagagcccccttcccaggcagagatttccagtacctgacagtgtgctgaacatgttcccgggcaccgaggaggggcctgaagatgacagcacaaaacacgggggacgggtgcgcaccttcccccacgagcgaggcaactgggccacccacgtctatgtaccatatgaagccaaggaggagttcctggatctgcttgatgtgttgctgccccatgcccagacatatgtcccccggctggtaaggatgaaggtgttccacctcagcctgtcccagagtgtggttctgcgccaccactggatcctccccttcgtgcaggctctgaaagcccgtatgacctccttccacagcccccatccaggacctcattgcctcattggaaccaaagatgcccctgtcacccaggaaattccaaaggatttaggagctctgcgtcaggagccaggatcacagaccagataatagaacaaaagatgctcctagcacccctgctgcttaggaaatgacacaggttttaggatctctgtgtcaggaactggaggctgagaccaacacatatgttatcatttcacagtgataggtcaaacaggtcatggtaatggtgggagctacctcactgggggcctatgggggtgaaaggagatcatgggtgccctcagcacaccacttgggtgaagggttagtaccagaccccacttctggttttgtctgccagcctggggctttttttttccccttacctattagattatttcataactcttttcctaccagaaatgcatctcctgctagactggtccagatcaaaaccctgctctttcactgaggctctcccggttggcatatcctgcagaatccctccgtccagagatcagtcggtcctgtggttgtttcacaggtgactcctctgtccagagatcagtcggtcctgtggttgtttcacaggtgacacctccgtccagagatcagttggccctgtggttgtttcacaggtgacccctccatccagagatcagttggtcctgtggttctttacccctg

SEQ ID NO: 196843 - DNA, 1212 bp, Homo sapiens
  Payload ID: 18821
  Gene Name: U6 snRNA biogenesis 1
  Uniprot ID: Q9BQ65
  ENST ID: ENST00000539737
  CDS Start-End: 80-823
gcgcttccggcacagcggaactccgggtgccggttgaggttgctggtggacctgctctggtggtcttggatgaggccccatgagcgcggcgcccctggtgggctacagcagcagcggctccgaggatgagtccgaggacgggatgcggaccaggccgggggatgggagccaccgtcgtggccagagcccccttcccaggcagagatttccagtacctgacagtgtgctgaacatgttcccgggcaccgaggaggggcctgaagatgacagcacaaaacacgggggacgggtgcgcaccttcccccacgagcgaggcaactgggccacccacgtctatgtaccatatgaagccaaggaggagttcctggatctgcttgatgtgttgctgccccatgcccagacatatgtcccccggctggtaaggatgaaggtgttccacctcagcctgtcccagagtgtggttctgcgccaccactggatcctccccttcgtgcaggctctgaaagcccgtatgacctccttccacaggacctttattgggcttgaggtcacttcagggcatgcccagttcctggacctggtttcagaggtggacagagtcatggaggaattcaacctcaccactttctaccaggatccttctttccacctcagcctggcctggtgtgtgggtgatgcacgtctccagctggaggggcagtgcctgcaggaactacaggcaatcgtggatgggtttgaagatgctgaggtgctgctgcgcgtgcacactgagcaagtccgctgcaagtctgggaacaagttcttctcgatgcctttgaagtgagcaccagaggccttcctcctccagggccctctgcagaccaggctgagatggaggaacctgctaaaatcgatggagatgcttctagcctcccagtaggaggccccagccatgccttcaacctggcaggaggtgtagccactcctcatcctccctgagtgctgatattctctctctctctttctcttcctcttctttctctctcttctcctctctttctctcctctgtctctcttcctctcctctcttcctctcttctctcttcctctcctctctctcttcctcttctctctcttcccctcctgtctctcctcccctcctctcttcctctcctctctcttcctctcctctctctacccctcctgtctctcctcccctcctctctcttcctc

SEQ ID NO: 196844 - DNA, 1751 bp, Homo sapiens
  Payload ID: 18821
  Gene Name: U6 snRNA biogenesis 1
  ENST ID: ENST00000563149
  CDS Start-End: 65-556
cggaactccgggtgccggttgaggttgctggtggacctgctctggtggtcttggatgaggccccatgagcgcggcgcccctggtgggctacagcagcagcggctccgaggatgagtccgaggacgggatgcggaccaggccgggggatgggagccaccgtcgtggccagagcccccttcccaggcagagatttccagtacctgacagtgtgctgaacatgttcccgggcaccgaggaggggcctgaagatgacagcacaaaacacgggggacgggtgcgcaccttcccccacgagcgaggcaactgggccacccacgtctatgtaccatatgaagccaaggaggagttcctggatctgcttgatgtgttgctgccccatgcccagacatatgtcccccggctggtaaggatgaaggtgttccacctcagcctgtcccagagtgtggttctgcgccaccactggatcctccccttcgtgcaggctctgaaagcccgtatgacctccttccacaggtgccagaagcccatgccagaagcccaacccaaagtggcttaaaccaaagagaaatttataggctggtataactaaaagattcagaggtagcactggctcatgcatgagtggaccggggtgacaagatatcagatggcacctgactgtcaccaccacaggcagactgttcaccatctcagctctgtccccttcctttgtcacaatgacgaagccaccgcatctcccggctaatggtgtaccagcctggaaagacagcctccctctctgattggcttcagcacaagtcacaggaatgactgcctggtctgacccgtctcctgtgtgctttctttgggagtaaagagttaacaggcccttcccccttccacagagagtgcttcccttatcctgcggaagctctgcccctggatgaaggaggagagcggctatgttagtgctgatgactggcacactgcacttgcgctaggaagacagcatgaactgcacccctccagggaagccacggcctgggctcccctgcatacagtggttccttaactgggcacgagtcccttgctgggacttaggaaaactctgcctaaagtccattgcaagaaatactgatccctgtgggatgtatatgtggctggttcccttgctcactgagagactagaaaacagcacctggacccctgggctggttccctctgaggaaaggatctgtgtcatgagtgaagcccgggcaggtgtggtctgttcaactttgatcatctggttgagcctaaggtgaccaagagtgggcggtgcacccctgattctgttgctgtgactgaggaaatgctaagctctgtttggccaggcctgggcagcctgcctctggagtaggggtggagagccatcctgcaacacgaggttaccaggagaaggagttttggttgggcacagacatccagtgtccactccaggatgtttgggagacaccttgagaactcttcctaaaagctgcacttaaccaagctcctggtggttctgtgatcccttacattttctccagaggcagagagttggctgactgacttttgcccttgggcagattgtgaggctctacccagcatgctggtatattatgttccctcagatgggggtgagacccttggcctgggggctgtaaaatgatctgtttctgtgaggagactttccatggtgagattgctagtgtctcagagaataaaggacagaaccagtccaagtcaaagca

SEQ ID NO: 196845 - DNA, 1135 bp, Homo sapiens
  Payload ID: 18821
  Gene Name: U6 snRNA biogenesis 1
  ENST ID: ENST00000561743
  CDS Start-End: 194-838
agatgcaacccacttccaggttcccagctcatctgcctcttacatttaaaagtttgtaagttttctcctgagcagaggaagaaggaaggagaagccttcacaggacagtctggcctctaactgctctgccaaagaaattggccagagcccccttcccaggcagagatttccagtacctgacagtgtgctgaacatgttcccgggcaccgaggaggggcctgaagatgacagcacaaaacacgggggacgggtgcgcaccttcccccacgagcgaggcaactgggccacccacgtctatgtaccatatgaagccaaggaggagttcctggatctgcttgatgtgttgctgccccatgcccagacatatgtcccccggctggtaaggatgaaggtgttccacctcagcctgtcccagagtgtggttctgcgccaccactggatcctccccttcgtgcaggctctgaaagcccgtatgacctccttccacagattcttctttactgccaaccaggtaaagatttacaccaatcaagagaaaaccaggacctttattgggcttgaggtcacttcagggcatgcccagttcctggacctggtttcagaggtggacagagtcatggaggaattcaacctcaccactttctaccaggatccttctttccacctcagcctggcctggtgtgtgggtgatgcacgtctccagctggaggggcagtgcctgcaggaactacaggcaatcgtggatgggtttgaagatgctgaggtgctgctgcgcgtgcacactgagcaagtccgctgcaagtctgggaacaagttcttctcgatgcctttgaagtgagcaccagaggccttcctcctccagggccctctgcagaccaggctgagatggaggaacctgctaaaatcgatggagatgcttctagcctcccagtaggaggccccagccatgccttcaacctggcaggaggtgtagccactcctcatcctccctgagtgctgatattctctctctctctttctcttcctcttctttctctctcttctcctctctttctctcctctgtctctcttcctctcctctcttcctctcttctctcttcctctcctctctctcttcctcttctctctcttcccc

SEQ ID NO: 196846 - DNA, 558 bp, Homo sapiens
  Payload ID: 18821
  Gene Name: U6 snRNA biogenesis 1
  ENST ID: ENST00000564387
  CDS Start-End: 64-351
ggaactccgggtgccggttgaggttgctggtggacctgctctggtggtcttggatgaggccccatgagcgcggcgcccctggtgggctacagcagcagcggctccgaggatgagtccgaggacgggatgcggaccaggccgggggatgggagccaccgtcgtggccagagcccccttcccaggcagagatttccagtacctgacagtgtgctgaacatgttcccgggcaccgaggaggggcctgaagatgacagcacaaaacacgggggacggatgaagccaaggaggagttcctggatctgcttgatgtgttgctgccccatgcccagacatatgtcccccggctggtaaggatgaaggtgttccacctcagcctgtcccagagtgtggttctgcgccaccactggatcctccccttcgtgcaggctctgaaagcccgtatgacctccttccacagattcttctttactgccaaccaggtaaagatttacaccaatcaagagaaaaccaggacctttattgggcttgaggtcacttcagggcatgcccagttcctgg

SEQ ID NO: 196847 - DNA, 671 bp, Homo sapiens
  Payload ID: 18821
  Gene Name: U6 snRNA biogenesis 1
  ENST ID: ENST00000561568
  CDS Start-End: 124-671
gcttccggcacagcggaactccgggtgccggttgaggttgctggtggacctgctctggtggtcttggatgaggccccatgagcgcggcgcccctggtgggctacagcagcagcggctccgaggatgagtccgaggacgggatgcggaccaggccgggggatgggagccaccgtcggtgaggatggccagagcccccttcccaggcagagatttccagtacctgacagtgtgctgaacatgttcccgggcaccgaggaggggcctgaagatgacagcacaaaacacgggggacgggtgcgcaccttcccccacgagcgaggcaactgggccacccacgtctatgtaccatatgaagccaaggaggagttcctggatctgcttgatgtgttgctgccccatgcccagacatatgtcccccggctggtaaggatgaaggtgttccacctcagcctgtcccagagtgtggttctgcgccaccactggatcctccccttcgtgcaggctctgaaagcccgtatgacctccttccacagattcttctttactgccaaccaggtaaagatttacaccaatcaagagaaaaccaggacctttattgggcttgaggtcacttcagggcatgcccagttcctggacctggtttcagaggtggacagagtcatggaggaatt

SEQ ID NO: 196848 - DNA, 2596 bp, Homo sapiens
  Payload ID: 18822
  Gene Name: U82695.5
  ENST ID: ENST00000633844
  CDS Start-End: 221-1330
gggagcccgggtgactgttggcgccaagtgcctcagagagccacacgcttccacgctgcggagctgaggtgatctcttcagacccttcggagagacccagatatctgacttcccactgagagacccggaattgcccagagtttgagaaagctgtgtcggagactgcaacagtcagcacacattcctgattgatcaggctccctccctcaagtcctctgcgatggctctggcgatgcttcgggactggtgcaggtggatgggtgcgaacgcagagcgctccctgctcatcctgggtatccctgatgactgcaaggaacatgagttccaggaggccgtgcgggctgccctgtcgcccctgggcaggagggagcagccaggctgcgaggaagagtcctttgagagctgggtggagcatgccaaggatatgctgcagctgtggtgccatgcgtcggaaagggagaagaagaggtggctgctggagagcttgggcggcccggccctggaagtcgtgagcggcctcctggaggaagataccaacttgtccgcgctggactgcctggcggcgctggggcaggtatttaggaaccaggacactcgaatgacttcgaggctgaagttcctgacctgcacgcaggggccccaggaggggctgtttgccttcgtggtgcgcctggaaggcctgctgcagagggctgtggagaagggggccgtctgcccagccttggccaattacctgcgactacagcaggtgctgtcttgggcccgccccagcgaggcactccaggataccctgagagggatgcagctggagaagaggccacctggcttcctggggctgctccggctcatccgggagatggaggcatgggcagccttcccagcgaggagccagcagggtgtggcctgggcagcggccccagtggagagtgaagacccagctgctgcccaggcctccccagcccaggggaatgccagcgaggctggtcccggagcagaagatgctgccgaggccgcttctgccaccaaagaggctgcaaggggagcccctgccgctggggaaggtgaaagtgcccctgcaggccccgaaggcctaggtcaggcaaggcccatagaggtcccctggggctcctccccagcccggatgagcagtgctgtctgggtgttcccaagaggtcttagctggggtccagagggcctcatccaggtgagaggccaggaagccaggaaacccccactggaggggctccagaccatcttggaggagccggaaaacgaggatgaggatggggccggggacgagggccagcccaagtcctcccagggcaaataggctcctagggccccggggcctcctctcctctcaggcagcagcgccttggaggcagacagaggccaggccagggccagtccctcaccccacattcaggagtaagggccccccacctcccccaaggggctctggccaccacccccattccttccctgtgacccggatgaccacgtttgatacaaaatggggtggggagaggcgcccccccgctcccttgcacccagcacacccagccccagccccaaaccctgccgccacggggggctggcctggagggagccctgagtgggcagctgtggcctgggtgggggcacctgaagatgtctgcccccaacccaggccgtgagttgggagagacagggggaaagaggccctctcaaggttgccagctgcctgggtctctcaagaggggtcagcccacttgccatctccggggcaggctgccctctgttccgggaagctcaccctcacctgtgtgacccacgcgcccagcagacgcccacccactgctagccatcatttctgcgaaaagtcatgtactgtgcgcccatgcaggcggccacctctgggcccggggcacgtgctgtgagcttcctgcgagcccaggctctgcttgctgctgtcctgcatcgtgagcaccacctctgctttcctggcgtagatctaggccaggggctgcttgttctcgtggagctgcgtgtgttcttctctgagcagcctctccccggagacccccagcgcagtcccaggagatggcgggaaggaggcaccagggcacggcggacgctcaccccgtgaccacgatggtgaccctgactgcgggaagaagaaccggacccggggcacagcggggctgcgtgaggatccacaagaactatgctttggcgtttcacccctgttgttacttgtgactcagtttcttcagcctggtggggtgttccctggtgtttcccagtgttctgtgactgtcctgtgaaggccatagggatgggctcaggagggggctccctgaagccagtggacactgccagagtccactgtcctggcaaaaggcagaccctggggccctcgggaaggagggaggtggcagcgggggcagcagcgggagggggagcagatgacgtgccttgccaggaaccccaggaggagggggcctgggacctgtgtcctgtggtggctgtttacagtttctctctgtattgtggtttccttctcttcaatagtttcagtatatgtttctcttcaataaatttcattccgtgttcc

SEQ ID NO: 196849 - DNA, 2192 bp, Homo sapiens
  Payload ID: 18822
  Gene Name: U82695.5
  ENST ID: ENST00000445091
  CDS Start-End: 249-2192
gtggcttccgggagaaccaggggtttctgggagcccgggtgactgttggcgccaagtgcctcagagagccacacgcttccacgctgcggagctgaggtgatctcttcagacccttcggagagacccagatatctgacttcccactgagagacccggaattgcccagagtttgagaaagctgtgtcggagactgcaacagtcagcacacattcctgattgatcaggctccctccctcaagtcctctgcgatggctctggcgatgcttcgggactggtgcaggtggatgggtgcgaacgcagagcgctccctgctcatcctgggtatccctgatgactgcaaggaacatgagttccaggaggccgtgcgggctgccctgtcgcccctgggcaggtaccgagtactcaccaagcacttcagaaaggagctcggggccaaggcagccttggtggagttcgctgagtatttaaaccgaagcttgattccccatcaaataccaggcaatggggggccctggaaagtgatcttcctgccccaagtacctgttattgagtttcaggatatgcccagttttcctgcacagccccagggtcaagcagtagcaaaagctgcaggtgagggaggaggcgcaggtgaggcaggaggtgtaggtgaggtaggagcagcaggtgaggcaggaggcacaggtgaggcaggagcaacaggtgaggcaggagcagcaggtgaggcaggaggcgcaggtgaggcaggaggtgtaggtgaggcaggagcagcaggtgaggcaggaggcgcaggtgaggcaggagcagcaggtgagggaggagcagcaggtgaggcaggaggcgcaggtgaggcaggaggtgtaggtgaggcaggagcagcaggtgaggcaggaggcgcaggtgaggcaggaggtgtaggtgaggcaggagcagcaggtgaggcaggaggcgcaggtgaggcaggagcagcaggtgaggcaggaggcgcaggtgagggaagagcagcaggtgaggcaggagcagcaggtgaggcaggagctgtgggtgaggcaggagcagcaggtgaggcaggagctgtgggtgaggcaggagctgcaggtgaggcaggagctgtgggtgaagcaggagggacaaatgtaacaaaagcctgggtccagccttggcgctgcaccctacagcctgtgctggaaaacagggcctaccgggaattgagacccttttccaggagggagcagccaggctgcgaggaagagtcctttgagagctgggtggagcatgccaaggatatgctgcagctgtggtgccatgcgtcggaaagggagaagaagaggtggctgctggagagcttgggcggcccggccctggaagtcgtgagcggcctcctggaggaagataccaacttgtccgcgctggactgcctggcggcgctggggcaggtatttaggaaccaggacactcgaatgacttcgaggctgaagttcctgacctgcacgcaggggccccaggaggggctgtttgccttcgtggtgcgcctggaaggcctgctgcagagggctgtggagaagggggccgtctgcccagccttggccaattacctgcgactacagcaggtgctgtcttgggcccgccccagcgaggcactccaggataccctgagagggatgcagctggagaagaggccacctggcttcctggggctgctccggctcatccgggagatggaggcatgggcagccttcccagcgaggagccagcagggtgtggcctgggcagcggccccagtggagagtgaagacccagctgctgcccaggcctccccagcccaggggaatgccagcgaggctggtcccggagcagaagatgctgccgaggccgcttctgccaccaaagaggctgcaaggggagcccctgccgctggggaaggtgaaagtgcccctgcaggccccgaaggcctaggtcaggcaaggcccatagaggtcccctggggctcctccccagcccggatgagcagtgctgtctgggtgttcccaagaggtcttagctggggtccagagggcctcatccaggtgagaggccaggaagccaggaaacccccactggaggggctccagaccatcttggaggagccggaaaacgaggatgaggatggggccggggacgagggccagcccaagtcctcccagggcaaatag

SEQ ID NO: 196850 - DNA, 1867 bp, Homo sapiens
  Payload ID: 18823
  Gene Name: UBA domain containing 1
  Uniprot ID: Q9BSL1
  ENST ID: ENST00000371756
  CDS Start-End: 219-1436
ccgcgacggcgcgcccccggcggctgctgcggcggcgggagcgaggcgaccgctgaggccgcggagagtgacggcggcccggccgacgggagccggggcggggcggcggcccagcgaaggagcgcgcgggcggtctggccccgccccctccccgcccgccttcccggtgaccttcaggggcccgggtggcgggcgcaggcccctgcggcggcggcgggatgttcgtgcaggaggagaagatcttcgcgggcaaggtgctgcggctgcacatctgcgcgtccgacggcgccgagtggctggaggaggccaccgaggacacctcggtggagaagctcaaggagcgctgcctcaagcactgtgctcatgggagcttagaagatcccaaaagtataacccatcataaattaatccacgctgcctcagagagggtgctgagtgatgccaggaccatcctggaagagaacatccaggaccaagatgtcctattattgataaaaaagcgtgctccatcaccacttcccaagatggctgatgtctcagcagaagaaaagaaaaaacaagaccagaaagctccagataaagaggccatactgcgggccaccgccaacctgccctcctacaacatggaccgggccgcggtccagaccaacatgagagacttccagacagaactccggaagatactggtgtctctcatcgaggtggcgcagaagctgttagcgctgaacccagatgcagtggaattgtttaagaaggcgaatgcaatgctggacgaggacgaggatgagcgtgtggacgaggctgccctgcggcagctcacggagatgggctttccggagaacagagccaccaaggcccttcagctgaaccacatgtcggtgcctcaggccatggagtggctaattgaacacgcagaagacccgaccatagacacgcctcttcctggccaagctcccccagaggccgagggggccacagcagctgcctccgaggctgccgcgggagccagcgccaccgatgaggaggccagagatgagctgacggaaatcttcaagaagatccggaggaaaagggagtttcgggctgatgctcgggccgtcatttccctgatggagatggggttcgacgagaaagaggtgatagatgccctcagagtgaacaacaaccagcagaatgccgcgtgcgagtggctgctgggggaccggaagccctctccggaggagctggacaagggcatcgaccccgacagtcctctctttcaggccatcctggataacccggtggtgcagctgggcctgaccaacccgaaaacattgctagcatttgaagacatgctggagaacccactgaacagcacccagtggatgaatgatccagaaacggggcctgtcatgctgcagatctctagaatcttccagacactaaatcgcacgtaggtggcgttgttccactcggctatcaggccacagcagccccctggtgcggcccgagaccgggcagagtggacctcacctggaaactcaccttcagcgcctcagccctggactgttagaggtgctgcagctgctcctgctctctgatcttattgcttataaactttggtgacggtagtgtgtaaggccgtatttttagcatctgacaggtgtttacaaaaaagtggttgtcgcactgggaagtggagtgatggcctcgtctccagtgctcctctgggctcttgagttgctgcttgaattgccgtgtagacatttgcttggagagtccacttgttatttgacggaggtaggtttcaacccagagttaatgtcaagcatgctaatttaactagtcactcacagatgacttttctttaataaagtcccttttccta

SEQ ID NO: 196851 - DNA, 748 bp, Homo sapiens
  Payload ID: 18824
  Gene Name: UBA domain containing 2
  ENST ID: ENST00000355700
  CDS Start-End: 136-748
ccgttcgtcagcggcgagtggcctcgcggcgccggattcgtcgctccgccaagagtgcgcctgcgcggtcgctggggctcgcacttcagcttcccctcccccggcgccctctggggctccgagcccggcgggaccatgttcaccagcaccggctccagtgggctctacaaggcgcctctgtcgaagagccttctgctggtccccagtgccctctccctcctgctcgccctcctcctgcctcactgccagaagctctttgtgtatgaccttcacgcagtcaagaacgacttccagatgtccggtctgtgctacgacagcaaaatgttccaggtgcatcaggtgctctgcatccccagctggatggcaaaattcttttcttggacacttgaacccatcttctcttcttcagaacccaccagcgaagccagaattgggatgggagccacgctggacatccagagacagcagagaatggagctgctggaccggcagctgatgttctctcagtttgcacaagggaggcgacagagacagcagcagggaggaatgatcaattggaatcgtctttttcctcctttacgtcagcgacaaaacgtaaactatcagggcggtcggcagtctgagccagcagcgccccctctagaagtttctgaggaacaggtcgcccggctcatggagatgggattttccagaggtgatgctttggaagccctgagagcttcaaacaatgacctcaatgtcgccacca

SEQ ID NO: 196852 - DNA, 2525 bp, Homo sapiens
  Payload ID: 18824
  Gene Name: UBA domain containing 2
  Uniprot ID: Q8NBM4
  ENST ID: ENST00000376440
  CDS Start-End: 504-1433
atgttcaccagcaccggctccagtgggctctgtgagtaccggcctccgccatcctggctgccccctacacgccaccctaggcacctctttgaggaggctggggcagcggggaccctcgggtttgccggaggtggtggggccgaccctccagacccgcgtccgaaccctgctagttcccggtcttgggggtcagcggaaaccgcccccatttcggcctggaggggcgaatggggacaaagccccgccgcccgccccgaccccacctggtatccccaggtgctctgcccaggagtctcttggggccgctgcaagtgggcaggtgccctggtgttctcgtgggccggccccaggccctttgcggagcgtgtgccgcgctgaaggaaggggccgtcccccttaccatgccccattcttttaggcttgggggaccgaactaactccccccgcccccacttgcaaagttcagcctccgctttagaagctgacctctcagtttcacttggatgtgtttcttcttcagtctccaagaagagtttttagacaaacacacactgatgagagtgctttcaagtggagggaagttaggaagtcgtggcgagggagcgcagctgtgctgctggatgttgctgttttcctggcgtgttagcggtggtcagcagacaaggcgcctctgtcgaagagccttctgctggtccccagtgccctctccctcctgctcgccctcctcctgcctcactgccagaagctctttgtgtatgaccttcacgcagtcaagaacgacttccagcctggcacctgtgtttgctctgtttgtaccattttactgctccataccaagagtccaagtggcacaaattctgggtccgttgtccatcacaaacaagacattgatttatatattgggactgcagcttttcacctctggttcctacatctggattgtagccataagtggacttatgtccggtctgtgctacgacagcaaaatgttccaggtgcatcaggtgctctgcatccccagctggatggcaaaattcttttcttggacacttgaacccatcttctcttcttcagaacccaccagcgaagccagaattgggatgggagccacgctggacatccagagacagcagagaatggagctgctggaccggcagctgatgttctctcagtttgcacaagggaggcgacagagacagcagcagggaggaatgatcaattggaatcgtctttttcctcctttacgtcagcgacaaaacgtaaactatcagggcggtcggcagtctgagccagcagcgccccctctagaagtttctgaggaacaggtcgcccggctcatggagatgggattttccagaggtgatgctttggaagccctgagagcttcaaacaatgacctcaatgtcgccaccaacttcctgctgcagcactgatagtcccaggccaacactgggaccggaccggcagccgagtgacagtgcgtggtccccaccatcagatcagcccggggaccgagcatctctggtgctgatgttcttgtgggaagagggaggttccaccgcacccctgccctcaaccgcaagactgttgccgttttagtgtggagataagtttgccattacattagcatgtattttctatctatattttttattgggcattttccctaggttggagagtcagcactcgttttgaatgtgtttaaaatgcattaaaatggaagatttctgcaggcagttgaatggcactccagatggggaattgctgtaaccctcttactgtaacatgtcatctcctgcgtcgtgatggggagagggtaatgttacttcacaaaggacatgtcagatccttcttcatggacttttttagttactgttttttctctcaaacttgttttcgaatctcctgggagtgagggagaaacagggagctgaatcctcccccaagctgttccaggccagaggactctgcagtaccttctcctacatctagtaacaaagaatggtgataaccatgcactggttcaaggttctggagttctccatgaaacttgggttaattttgctcagagtatccagagttagccactaggctgcgggtgaaatgggatggagaagaacaacagcaggcttcctggagccacatgggctgactagggcactctgtggctggcctggcatgggctcagcccaggaagaggagaaacgatcccttgcctgcccctccctgtggcagggctaactgcctggccctcctggctcgcagccagccagccccctggcagcaggttctcctcagggcttgggtcttcaacctgtggcgacaggaggcagggcagactgtggaggacaggatgcaggtcagggagagggaaggcaggggtggaccgccatgagcatgaaaagacccgaagcaagttgactcttgcaatgtgcaactgttatgttctgcaaaatgagcaacgatgtatcaaattgatgcaaatttagatgttgatacttacaataaagtttttaatgtgtttt

SEQ ID NO: 196853 - DNA, 1375 bp, Homo sapiens
  Payload ID: 18824
  Gene Name: UBA domain containing 2
  Uniprot ID: Q8NBM4
  ENST ID: ENST00000403766
  CDS Start-End: 136-1170
ccgttcgtcagcggcgagtggcctcgcggcgccggattcgtcgctccgccaagagtgcgcctgcgcggtcgctggggctcgcacttcagcttcccctcccccggcgccctctggggctccgagcccggcgggaccatgttcaccagcaccggctccagtgggctctacaaggcgcctctgtcgaagagccttctgctggtccccagtgccctctccctcctgctcgccctcctcctgcctcactgccagaagctctttgtgtatgaccttcacgcagtcaagaacgacttccagatttggaggttgatatgtggaagaataatttgccttgatttgaaagatactttctgcagtagtctgcttatttataattttaggatatttgaaagaagatatggaagcagaaaatttgcatcctttttgctgggttcctgggttttgtcagccttatttgactttctcctcattgaagctatgcagtatttctttggcatcactgcagctagtaatttgccttctggattcctggcacctgtgtttgctctgtttgtaccattttactgctccataccaagagtccaagtggcacaaattctgggtccgttgtccatcacaaacaagacattgatttatatattgggactgcagcttttcacctctggttcctacatctggattgtagccataagtggacttatgtccggtctgtgctacgacagcaaaatgttccaggtgcatcaggtgctctgcatccccagctggatggcaaaattcttttcttggacacttgaacccatcttctcttcttcagaacccaccagcgaagccagaattgggatgggagccacgctggacatccagagacagcagagaatggagctgctggaccggcagctgatgttctctcagtttgcacaagggaggcgacagagacagcagcagggaggaatgatcaattggaatcgtctttttcctcctttacgtcagcgacaaaacgtaaactatcagggcggtcggcagtctgagccagcagcgccccctctagaagtttctgaggaacaggtcgcccggctcatggagatgggattttccagaggtgatgctttggaagccctgagagcttcaaacaatgacctcaatgtcgccaccaacttcctgctgcagcactgatagtcccaggccaacactgggaccggaccggcagccgagtgacagtgcgtggtccccaccatcagatcagcccggggaccgagcatctctggtgctgatgttcttgtgggaagagggaggttccaccgcacccctgccctcaaccgcaagactgttgccgttttagtgtggagataagtttgccattacattagcatgtattttc

SEQ ID NO: 196854 - DNA, 627 bp, Homo sapiens
  Payload ID: 18824
  Gene Name: UBA domain containing 2
  ENST ID: ENST00000457666
  CDS Start-End: 221-627
ccagcaccggctccagtgggctctgtgagtaccggcctccgccatcctggctgccccctacacgccaccctaggcacctctttgaggaggctggggcagcggggaccctcgggtttgccggaggtggtggggccgaccctccagacccgcgtccgaaccctgctagttcccggtcttgggggtcagcggaaaccgcccccatttcggcctggaggggcgaatggggacaaagccccgccgcccgccccgaccccacctggtatccccagacaaggcgcctctgtcgaagagccttctgctggtccccagtgccctctccctcctgctcgccctcctcctgcctcactgccagaagctctttgtgtatgaccttcacgcagtcaagaacgacttccagatttggaggttgatatgtggaagaataatttgccttgatttgaaagatactttctgcagtagtctgcttatttataattttaggatatttgaaagaagatatggaagcagaaaatttgcatcctttttgctgggttcctgggttttgtcagccttatttgactttctcctcattgaagctatgcagtatttctttggcatcactgcagctagtaatttgccttctggatt

SEQ ID NO: 196855 - DNA, 853 bp, Homo sapiens
  Payload ID: 18824
  Gene Name: UBA domain containing 2
  ENST ID: ENST00000474510
  CDS Start-End: 1-132
ggaggaatgatcaattggaatcgtctttttcctcctttacgtcagcgacaaaacgtaaactatcagggcggtcggcagtctgagccagcagcgccccctctagaagtttctgaggaacagaccaatgaatgactgcaagcccatgaagccaacactgacgaagttgcagtatgcagcgccgtgcctcgcctcgcctcgcctcaccattgcctccactcacgccagaacaagtgtctatcctagcacagtcttttccagagtctcagtgtcctaccagcattctcattttgtcctccacatgtttattggtcacttttgatcttcacattcagccttctctaactggtgctgggcaccgggtgtgtcaggctctgtgttggggggaagcaagccaggcctggtgccagccctcaagggagctcaccgtctatgagggagaccagatccatgcaaggccctaacccagtacccaactcatgcaagtacctagtgccagtccttagagcagaggagacctgtaaacattcattcctgtactttaacaacttgacatcaggagattttacattgaaactttctcttcctgtggatgttagatcggatcaggtgctcatggtgagttctgatgcttctcatcccagtagctggactacagagacaggaagcagcctgcagagaaaatgaagtagtccagggtttcagtgtgagttaatgtgtgttgtggctaaaatgtggtgctttcgatagggagagagatgggctgaccatctataataccattatttatatagtcatcagagttgtgtatttgctaaactttataaatacataaagtgtattttagaacaacaca

SEQ ID NO: 196856 - DNA, 1413 bp, Homo sapiens
  Payload ID: 18825
  Gene Name: UBA-like domain containing 1
  Uniprot ID: Q8TB05
  ENST ID: ENST00000283474
  CDS Start-End: 130-663
gcgaggcgcggtgagtcagagccgcacagtaaatatttgtattagccggagccggctcgctaatggtggacgcgtgaggcggaggcgcgggcggaggagggaggccggagcgggcagcgcggcggcgccatgtccgtgaacatggacgagctcaagcaccaggtcatgatcaaccagttcgtgctgacggcgggctgcgcggccgaccaggcgaagcaactgctgcaggcggcccactggcagttcgagacagccctcagcgcctttttccaggagaccaacatcccctacagccaccatcaccaccagatgatgtgcacccccgccaatacccctgctacaccccccaacttccctgacgctctcaccatgttctcccgtctcaaggcctccgagagcttccacagcggtggcagcggcagcccgatggccgcgacagccacgtcacccccgccacacttcccccatgccgccaccagcagctctgcggcctccagctggcccacggcggcctcgcccccggggggcccacagcaccaccagccacagccgcccctgtggactccaacacccccttctccggcttcagactggccacccctggccccccaacaggccacctcagaacccagggcccaccctgccatggaggcagagagataagggaggcccctcccccctcccggaggccaggaccccgtggggcgggggagaggacgtctctgcgggcccccttcaccccttttctgtctgcaccccttgttccccggagccctggaggggagagcgcggactctagccaggcagggacacgtctggtgccagaacacgcagctgcccacacgcaaggtcatggccccagcggccccggcacatggagtggttcagcgcggcctgggtgcctggcggacagaacttcagagaccacgcagccttccttcgaagacgcacctgcccagcccagcccaggggtgccgtggaggaccaccctggcagagacattgctgatccctggcttggagctccttgggggccggcaggcctcgacccccaccctagggaatgcagagcctctccgcatgtgtgcgcgtggccgtgtctgtgtatttctacgtgtgtcgctcttcagaagcaacctagttcctggggcagctggactttgcatgttagtgtgagcccccagccccctgcccgccgccccctccccagggccctgcctcctccccaccccctcgtcagccagcgttgctgttccttgcagagaaaaggattgtgggaaactccaggactcttcccaccgcctcccagcgcctgcctgctggggctgcctgcatgcctcccctgcacctgggggtacccgcatccacttcctttcccccttttaacaaaagagaagaacgaattccaaaccac

SEQ ID NO: 196857 - DNA, 1275 bp, Homo sapiens
  Payload ID: 18825
  Gene Name: UBA-like domain containing 1
  ENST ID: ENST00000591897
  CDS Start-End: 172-525
cgggcttcgcgtcccctagggtgccggccccgctcccccggggcgcccggcgcaccgtggggactacatatcccagcatgccgcggcgccggcggagcgaggcgaggcgcgacagccctcagcgcctttttccaggagaccaacatcccctacagccaccatcaccaccagatgatgtgcacccccgccaatacccctgctacaccccccaacttccctgacgctctcaccatgttctcccgtctcaaggcctccgagagcttccacagcggtggcagcggcagcccgatggccgcgacagccacgtcacccccgccacacttcccccatgccgccaccagcagctctgcggcctccagctggcccacggcggcctcgcccccggggggcccacagcaccaccagccacagccgcccctgtggactccaacacccccttctccggcttcagactggccacccctggccccccaacaggccacctcagaacccagggcccaccctgccatggaggcagagagataagggaggcccctcccccctcccggaggccaggaccccgtggggcgggggagaggacgtctctgcgggcccccttcaccccttttctgtctgcaccccttgttccccggagccctggaggggagagcgcggactctagccaggcagggacacgtctggtgccagaacacgcagctgcccacacgcaaggtcatggccccagcggccccggcacatggagtggttcagcgcggcctgggtgcctggcggacagaacttcagagaccacgcagccttccttcgaagacgcacctgcccagcccagcccaggggtgccgtggaggaccaccctggcagagacattgctgatccctggcttggagctccttgggggccggcaggcctcgacccccaccctagggaatgcagagcctctccgcatgtgtgcgcgtggccgtgtctgtgtatttctacgtgtgtcgctcttcagaagcaacctagttcctggggcagctggactttgcatgttagtgtgagcccccagccccctgcccgccgccccctccccagggccctgcctcctccccaccccctcgtcagccagcgttgctgttccttgcagagaaaaggattgtgggaaactccaggactcttcccaccgcctcccagcgcctgcctgctggggctgcctgcatgcctcccctgcacctgggggtacccgcatccacttcctttcccccttttaacaaaagagaagaacgaattccaaaccac

SEQ ID NO: 196858 - DNA, 281 bp, Homo sapiens
  Payload ID: 18825
  Gene Name: UBA-like domain containing 1
  ENST ID: ENST00000588691
  CDS Start-End: 80-281
gccggctcgctaatggtggacgcgtgaggcggaggcgcgggcggaggagggaggccggagcgggcagcgcggcggcgccatgtccgtgaacatggacgagctcaagcaccagcgttgctgttccttgcagagaaaaggattgtgggaaactccaggactcttcccaccgcctcccagcgcctgcctgctggggctgcctgcatgcctcccctgcacctgggggtacccgcatccacttcctttcccccttttaacaaaagagaagaacgaattccaaacca

SEQ ID NO: 196859 - DNA, 2641 bp, Homo sapiens
  Payload ID: 18825
  Gene Name: UBA-like domain containing 1
  Uniprot ID: Q8TB05
  ENST ID: ENST00000590891
  CDS Start-End: 1253-1891
tgacagtccacggccccgctgggatggagccctgctgggtgcccgcaccgtgctcagtgtggcatgcggcccgggtgtggagggagacggtggagcatcccgtgcctagcgtggtgccagccaagggcgggtggctggggagctgtgctgggagctgtcgtaaacccgtggtggctttgatcctagggccgtctttctgctccacttcccgggcactgttccgagggaggctcaggtggggaagcgagtgagcctaaagcccaggcttgtctccttggtgccaggccctgcttgctggaatctggtgatcttaggaggtcactgttgcaagggaggggacccaggagccacctagtcgaacctctttgtggtacagatggagaaaccaaggcccaaacagtggcccccttgatcagccagaagcagagctgggtggggcagcaggggatccccaccaccaggctcagactccttcaggatgcttttgcttcgcagatgaggagaccgaggcttagagaagagtagagacttgctacccgttgaggtggtaacagccaggctagaatctcctgaaacggggcagggtggggaggtctggttgggctacctggggccgggcgcctttcccccaggatggggtgtactgcccgccctcccccagtcatggtgctggtgccagctggtgcagggggagggctctgcaggccttaggcactgaggcaggtggcgagcagcaggggaagggtcttctccacccaccccaactgcccaaggttccgtggctcctccttagacagcagtgagggttgggggtgacaggcaagccactgagcctcagcaccgcgactcacccctcccactcagcagtccagccagggtcatccccagcctcagaggagcctgggaacaagggcagcggcagggccggcgggggcctggagggtgagcaggggcctttcttcctgcagacagccctcagcgcctttttccaggagaccaacatcccctacagccaccatcaccaccagatggtaagtgtccccggagtccccagttctggattgggcggaaggaggccgagctagttctgtgtataagcagcccctggccccggtgtacgagggcgctggtgcaggcggggctcgacctctttggagatgggtcagcaggagtcccggctccgtgggtcctgcacttaatcttgcctgtgccagctccccctgagacctggggggcgctggcctctggggcaatgaagctccttaccctacagcccccggggatgctgtggctgatggaaaggggtgggctgggaaagcctcgtggccccaggcaccgtgggctcctgagagtgaggctgggtcggttcatctcaaggcttctcctctgggaacccctgggcggcggacaggcttggggatctggggaaggaacacagagccttccgagaatgggccagccacgcatctccccttgggaggcagtgggggcccctccaggaaggggtgctcaccccatctctcctctcttcccctcacagatgtgcacccccgccaatacccctgctacaccccccaacttccctgacgctctcaccatgttctcccgtctcaaggcctccgagagcttccacagcggtggcagcggcagcccgatggccgcgacagccacgtcacccccgccacacttcccccatgccgccaccagcagctctgcggcctccagctggcccacggcggcctcgcccccggggggcccacagcaccaccagccacagccgcccctgtggactccaacacccccttctccggcttcagactggccacccctggccccccaacaggccacctcagaacccagggcccaccctgccatggaggcagagagataagggaggcccctcccccctcccggaggccaggaccccgtggggcgggggagaggacgtctctgcgggcccccttcaccccttttctgtctgcaccccttgttccccggagccctggaggggagagcgcggactctagccaggcagggacacgtctggtgccagaacacgcagctgcccacacgcaaggtcatggccccagcggccccggcacatggagtggttcagcgcggcctgggtgcctggcggacagaacttcagagaccacgcagccttccttcgaagacgcacctgcccagcccagcccaggggtgccgtggaggaccaccctggcagagacattgctgatccctggcttggagctccttgggggccggcaggcctcgacccccaccctagggaatgcagagcctctccgcatgtgtgcgcgtggccgtgtctgtgtatttctacgtgtgtcgctcttcagaagcaacctagttcctggggcagctggactttgcatgttagtgtgagcccccagccccctgcccgccgccccctccccagggccctgcctcctccccaccccctcgtcagccagcgttgctgttccttgcagagaaaaggattgtgggaaactccaggactcttcccaccgcctcccagcgcctgcctgctggggctgcctgcatgcctcccctgcacctgggggtacccgcatccacttcctttcccccttttaacaaaagagaagaacgaattccaaaccac

SEQ ID NO: 196860 - DNA, 707 bp, Homo sapiens
  Payload ID: 18825
  Gene Name: UBA-like domain containing 1
  ENST ID: ENST00000587649
  CDS Start-End: 77-445
ggctcgctaatggtggacgcgtgaggcggaggcgcgggcggaggagggaggccggagcgggcagcgcggcggcgccatgtccgtgaacatggacgagctcaagcaccaggtcatgatcaaccagttcgtgctgacggcgggctgcgcggccgaccaggcgaagcaactgctgcaggcggcccactggcagttcgaggtgcgcggcgccggagccgggcgagggccggggccacgggcggagtgtgtcccgcgtggccgccgggcgggggcggacggcgtggacgcgtgccggctgtgcgccccctccgggccgcagacccgacccgctttcccgacggcggtgcccggcgtccggatcccaagggctcgcggcgggcggagacagccctcagcgcctttttccaggagaccaacatcccctacagccaccatcaccaccagatgatgtgcacccccgccaatacccctgctacaccccccaacttccctgacgctctcaccatgttctcccgtctcaaggcctccgagagcttccacagcggtggcagcggcagcccgatggccgcgacagccacgtcacccccgccacacttcccccatgccgccaccagcagctctgcggcctccagctggcccacggcggcctcgcccccggggggcccacagcaccaccagccacagccgcccctgtggactccaacaccccc

SEQ ID NO: 196861 - DNA, 659 bp, Homo sapiens
  Payload ID: 18825
  Gene Name: UBA-like domain containing 1
  ENST ID: ENST00000591113
  CDS Start-End: 504-659
gtccgggtaacggccgagggccgggcggccccgcggtgcagacggacagtcgggcgggcggccggaaggaggacgccccaggcctcggcagagctgggccggagggcggagccgctccgggcgagtggtccgagggtccgcgtgcctggtgggcggtcggcggcgtgcgcacacgtccatgtgcatttgtgtttacgcacgcaccgcgccacggcgtcggccgggcaccggggaggtggcggacctgcgggcacgttggcgcgcgtgtgaacgcgcagccccctggtgcgtttggtgtgtgatcaacgcgtacacatgtggcgggtgtgcagatgccgcccgtgcccggcacggtgtgatgtgtgtacacggcctggagtgtaggggtggcgtgtcggagccccacactacaccacagggatgagcgtgtatccccttcagagacagccctcagcgcctttttccaggagaccaacatcccctacagccaccatcaccaccagatgatgtgcacccccgccaatacccctgctacaccccccaacttccctgacgctctcaccatgttctcccgtctcaaggcctccgagagcttccacagcggtggcagcggcagcccgatggccgcgacagccacgtcacccccgccacacttcccc

SEQ ID NO: 196862 - DNA, 1462 bp, Homo sapiens
  Payload ID: 18825
  Gene Name: UBA-like domain containing 1
  ENST ID: ENST00000590965
  CDS Start-End: 78-362
cggctcgctaatggtggacgcgtgaggcggaggcgcgggcggaggagggaggccggagcgggcagcgcggcggcgccatgtccgtgaacatggacgagctcaagcaccaggtcatgatcaaccagttcgtgctgacggcgggctgcgcggccgaccaggcgaagcaactgctgcaggcggcccactggcagttcgagtccagccagggtcatccccagcctcagaggagcctgggaacaagggcagcggcagggccggcgggggcctggagggtgagcaggggcctttcttcctgcagacagccctcagcgcctttttccaggagaccaacatcccctacagccaccatcaccaccagatgatgtgcacccccgccaatacccctgctacaccccccaacttccctgacgctctcaccatgttctcccgtctcaaggcctccgagagcttccacagcggtggcagcggcagcccgatggccgcgacagccacgtcacccccgccacacttcccccatgccgccaccagcagctctgcggcctccagctggcccacggcggcctcgcccccggggggcccacagcaccaccagccacagccgcccctgtggactccaacacccccttctccggcttcagactggccacccctggccccccaacaggccacctcagaacccagggcccaccctgccatggaggcagagagataagggaggcccctcccccctcccggaggccaggaccccgtggggcgggggagaggacgtctctgcgggcccccttcaccccttttctgtctgcaccccttgttccccggagccctggaggggagagcgcggactctagccaggcagggacacgtctggtgccagaacacgcagctgcccacacgcaaggtcatggccccagcggccccggcacatggagtggttcagcgcggcctgggtgcctggcggacagaacttcagagaccacgcagccttccttcgaagacgcacctgcccagcccagcccaggggtgccgtggaggaccaccctggcagagacattgctgatccctggcttggagctccttgggggccggcaggcctcgacccccaccctagggaatgcagagcctctccgcatgtgtgcgcgtggccgtgtctgtgtatttctacgtgtgtcgctcttcagaagcaacctagttcctggggcagctggactttgcatgttagtgtgagcccccagccccctgcccgccgccccctccccagggccctgcctcctccccaccccctcgtcagccagcgttgctgttccttgcagagaaaaggattgtgggaaactccaggactcttcccaccgcctcccagcgcctgcctgctggggctgcctgcatgcctcccctgcacctgggggtacccgcatccacttcctttcccccttttaacaaaagagaagaacgaattccaaaccac

SEQ ID NO: 196863 - DNA, 799 bp, Homo sapiens
  Payload ID: 18825
  Gene Name: UBA-like domain containing 1
  ENST ID: ENST00000587615
  CDS Start-End: 76-534
gctcgctaatggtggacgcgtgaggcggaggcgcgggcggaggagggaggccggagcgggcagcgcggcggcgccatgtccgtgaacatggacgagctcaagcaccaggtcatgatcaaccagttcgtgctgacggcgggctgcgcggccgaccaggcgaagcaactgctgcaggcggcccactggcagttcgagacagccctcagcgcctttttccaggagaccaacatcccctacagccaccatcaccaccagatggcctccgagagcttccacagcggtggcagcggcagcccgatggccgcgacagccacgtcacccccgccacacttcccccatgccgccaccagcagctctgcggcctccagctggcccacggcggcctcgcccccggggggcccacagcaccaccagccacagccgcccctgtggactccaacacccccttctccggcttcagactggccacccctggccccccaacaggccacctcagaacccagggcccaccctgccatggaggcagagagataagggaggcccctcccccctcccggaggccaggaccccgtggggcgggggagaggacgtctctgcgggcccccttcaccccttttctgtctgcaccccttgttccccggagccctggaggggagagcgcggactctagccaggcagggacacgtctggtgccagaacacgcagctgcccacacgcaaggtcatggccccagcggccccggcacatggagtggttcagcgcggcctgggtgcctggcggacagaacttcagagaccac

SEQ ID NO: 196864 - DNA, 1305 bp, Homo sapiens
  Payload ID: 18825
  Gene Name: UBA-like domain containing 1
  ENST ID: ENST00000591401
  CDS Start-End: 85-555
ccggagccggctcgctaatggtggacgcgtgaggcggaggcgcgggcggaggagggaggccggagcgggcagcgcggcggcgccatgtccgtgaacatggacgagctcaagcaccaggtcatgatcaaccagttcgtgctgacggcgggctgcgcggccgaccaggcgaagcaactgctgcaggcggcccactggcagttcgagatgtgcacccccgccaatacccctgctacaccccccaacttccctgacgctctcaccatgttctcccgtctcaaggcctccgagagcttccacagcggtggcagcggcagcccgatggccgcgacagccacgtcacccccgccacacttcccccatgccgccaccagcagctctgcggcctccagctggcccacggcggcctcgcccccggggggcccacagcaccaccagccacagccgcccctgtggactccaacacccccttctccggcttcagactggccacccctggccccccaacaggccacctcagaacccagggcccaccctgccatggaggcagagagataagggaggcccctcccccctcccggaggccaggaccccgtggggcgggggagaggacgtctctgcgggcccccttcaccccttttctgtctgcaccccttgttccccggagccctggaggggagagcgcggactctagccaggcagggacacgtctggtgccagaacacgcagctgcccacacgcaaggtcatggccccagcggccccggcacatggagtggttcagcgcggcctgggtgcctggcggacagaacttcagagaccacgcagccttccttcgaagacgcacctgcccagcccagcccaggggtgccgtggaggaccaccctggcagagacattgctgatccctggcttggagctccttgggggccggcaggcctcgacccccaccctagggaatgcagagcctctccgcatgtgtgcgcgtggccgtgtctgtgtatttctacgtgtgtcgctcttcagaagcaacctagttcctggggcagctggactttgcatgttagtgtgagcccccagccccctgcccgccgccccctccccagggccctgcctcctccccaccccctcgtcagccagcgttgctgttccttgcagagaaaaggattgtgggaaactccaggactcttcccaccgcctcccagcgcctgcctgctggggctgcctgcatgcctcccctgcacctgggggtacccgcatccacttcctttcccccttttaacaaaagagaagaacgaattccaaaccac

SEQ ID NO: 196865 - DNA, 1593 bp, Homo sapiens
  Payload ID: 18826
  Gene Name: UBA-like domain containing 2
  Uniprot ID: Q8IYN6
  ENST ID: ENST00000327490
  CDS Start-End: 305-799
aggattcgaatcgaacgtccttacgggagccgggcgctggcggagcggcgccccggccaatcagcggcagtccccgaacgttgggccggcccagccccgccccgcgctgttgtttgtggtgtcggccgggccgcgggagtcgaaccacaacattcgccgggcgggcggcggcggagcgggcggcggagcggcggcagcagcggtgagcgcgagccccggagccccgggcggccggcctcccgcgcccgcgcagccccgcgtctgcgtccggccggagacgccgggccccgcgccgcgccgcgccatgtcggtgaacatggacgagctgcggcaccaggtcatgatcaaccagttcgtgctggccgcgggctgcgcggccgaccaggcgaagcagttgctgcaggcggcccactggcagttcgagaccgcgctgagcacgttcttccaagaaaccaacattcccaacagccaccaccaccaccagatgatgtgcactcccagcaacacccctgccacgccgcccaacttccccgatgcgctggccatgttctccaagctccgcgcctccgagggcctgcagagcagcaacagccccatgacagccgcagcctgctccccacctgcaaacttcagccccttctgggcctcgtccccgcccagccaccaggcgccctggatcccgccctcctcccccaccaccttccaccacctccaccgcccacagcccacgtggcccccaggagcacagcaggggggcgcccagcagaaagccatggcggccatggacggccagagatgagactggacgccgccgggcgctgggctggagctgggggcagcccagggttgtggggacacaggagggccagggaggggggagccggggagggcagggggtttcccgaagatcgcactggaagattttataaaagaatttttgtgggtcggggggacagtaaacttcctgggccacgtgggtccttcaggagtttttcaggcaagtttttcctctgtttttaatatataactataatatatatgaatagataaatataactaatgtgcgtgagaatgggcctggcacacctggggtgctcgggggtagggctgccatgctgcagagctgatggagtgatgttgtgggcacaaggcatctgtcagctgcctcctttaacagccatgccttctggaatctggaagaggacaccactcctgcagtcactgggcagccacatagcagctgcaggtcccaggagggcctgaggtcaaagctgtggaaggccctcttggtatcagggctctctccccatggcctcttccccacctctgattgctggttgtggccccatagctcatcacccctgtctcctgctgaatgtgcagggctgatgtggcactgaggagctgactttggtcaaaggccaggctctgcccagcaggggacttgactgccctgggcgccctgcccctcccgctgcgtgtccaggtccaaagtggagagcctgcctttgggtttagttcccgaatcagaatcccatctcaccagggcgaaattttaatttaaaaacttaaaaagagacttttctaacttcc

SEQ ID NO: 196866 - DNA, 660 bp, Homo sapiens
  Payload ID: 18826
  Gene Name: UBA-like domain containing 2
  ENST ID: ENST00000589240
  CDS Start-End: 265-579
gttgtcggcccggaaggcgatcggcgcccgcgagcgggtcttacgcgggaccggggccgggaccggctcccctctgcacgtggggcagccgagggtcgggggccgcgggccgggcgcggaggcggggagagccggtggggggcccagccgctgcgtttcctgactccgcctggcccgccgtgtcactgccctgtttgtccgcagaccgcgctgagcacgttcttccaagaaaccaacattcccaacagccaccaccaccaccagatgatgtgcactcccagcaacacccctgccacgccgcccaacttccccgatgcgctggccatgttctccaagctccgcgcctccgagggcctgcagagcagcaacagccccatgacagccgcagcctgctccccacctgcaaacttcagccccttctgggcctcgtccccgcccagccaccaggcgccctggatcccgccctcctcccccaccaccttccaccacctccaccgcccacagcccacgtggcccccaggagcacagcaggggggcgcccagcagaaagccatggcggccatggacggccagagatgagactggacgccgccgggcgctgggctggagctgggggcagcccagggttgtggggacacaggagggccagggaggggggag

SEQ ID NO: 196867 - DNA, 286 bp, Homo sapiens
  Payload ID: 18826
  Gene Name: UBA-like domain containing 2
  ENST ID: ENST00000587913
  CDS Start-End: 94-286
ggcggagcgggcggcggagcggcggcagcagcgaccgcgctgagcacgttcttccaagaaaccaacattcccaacagccaccaccaccaccagatgatgtgcactcccagcaacacccctgccacgccgcccaacttccccgatgcgctggccatgttctccaagctccgcgcctccgagggcctgcagagcagcaacagccccatgacagccgcagcctgctccccacctgcaaacttcagccccttctgggcctcgtccccgcccagccaccaggcgccctgga

SEQ ID NO: 196868 - DNA, 951 bp, Homo sapiens
  Payload ID: 18827
  Gene Name: UBE2F-SCLY readthrough (NMD candidate)
  ENST ID: ENST00000449191
  CDS Start-End: 75-470
cccggaccgggcatggtgttgggcgccgggcccgcctcgcctgtctcggggagcccagggtaaaggcagcagtaatgctaacgctagcaagtaaactgaagcgtgacgatggtctcaaagggtcccggacggcagccacagcgtccgactcgactcggagggtttctgtgagagacaaattgcttgttaaagaggttgcagaacttgaagctaatttaccttgtacatgtaaagtgcattttcctgatccaaacaagcttcattgttttcagctaacagtaaccccagatgagggttactaccagggtggaaaatttcagtttgaaactgaagttcccgatgcgtacaacatggtggatcttttgaattttgatgatccactgaatattgaagctgcagaacatcatttgcgggacaaggaggacttccggaataaagtggatgactacatcaaacgttatgccagatgataaaaggggacgattgcaggcccatggactgtgttacagtttgtctctaacatgaaacagcaagagcttatgtcagggccagatggaaatgacagtgcctactccaagagttccccatgctgggaaagagaacacctgtgaacagggcctccatgcacagccaactggggtgagaattctatttggtgcacgtgctattgtgtccggaattggtgggttcttggtctcactgacttcaagaatgaagccgcggaccctcgcggaaagtttatatggactataatgcaacgactcccctggagccagaagttatccaggccatgaccaaggccatgtgggaagcctggggaaatcccagcagcccgtattcagcaggaagaaaggccaaggatattataaatgcagctcgggaaagcctcgcgaagatgataggggggaaacctcaagatataatcttcacttccgggggcactgaggtaaa

SEQ ID NO: 196869 - DNA, 2902 bp, Homo sapiens
  Payload ID: 18827
  Gene Name: UBE2F-SCLY readthrough (NMD candidate)
  ENST ID: ENST00000449891
  CDS Start-End: 136-357
acttccggtcccgccgccgggagccggtgcggctgtgaggggccgcgtctcgcagcagccgcccggaccgggcatggtgttgggcgccgggcccgcctcgcctgtctcggggagcccagggtaaaggcagcagtaatgctaacgctagcaagtaaactgaagcgtgacgatggtctcaaagggtcccggacggcagccacagcgtccgactcgactcggagggtttctgtgagagacaaattgcttgttaaagaggttgcagaacttgaagctaatttaccttgtacatgtaaagtgcattttcctgatccaaacaagcttcattgttttcagctaacagtaaccccagtttattgagagaacattcaattgatggcactggctgggctcccacaagaacattaaaggatgtcgtttggggattaaactctttgtttactgatcttttgaattttgatgatccactgaatattgaagctgcagaacatcatttgcgggacaaggtgagaattctatttggtgcacgtgctattgtgtccggaattggtgggttcttggtctcactgacttcaagaatgaagccgcggaccctcgcggaaagtttatatggactataatgcaacgactcccctggagccagaagttatccaggccatgaccaaggccatgtgggaagcctggggaaatcccagcagcccgtattcagcaggaagaaaggccaaggatattataaatgcagctcgggaaagcctcgcgaagatgataggggggaaacctcaagatataatcttcacttccgggggcactgagtcaaataatttagtaatccattctgtggtgaaacatttccacgcaaaccagacctcaaagggacacacaggtgggcaccacagcccagtgaagggggccaagccccatttcattacttcctcggtggaacacgactccatccggctgcccctggagcacctggtggaagaacaagtggcagcggtcacctttgtcccggtgtccaaggtgagcgggcaggcagaggtggacgacatcctcgcggcagtccgcccgaccacacgcctcgtgaccatcatgctggccaacaatgagactggcattgtcatgcctgtccctgaaatcagtcagcgcattaaagccctgaaccaggaacgggtggcagctgggctacctcccatcctcgtgcacacggatgctgcacaggccttggggaagcagcgcgtggatgtggaggacctgggcgtggacttccttacaatcgtggggcacaagttttatggtcccaggattggcgcactttatatacgaggacttggtgaatttacccctctctaccctatgctatttggaggtggacaagaacggaatttcaggccagggacagagaacaccccaatgattgctggccttgggaaggccgcggagctggtgacccagaactgcgaggcttatgaggcccacatgagggacgtccgcgactacctggaagagaggctggaagctgaattcggtcagaagagaatccatctgaatagccagtttccaggcacccagcggcttcccaatacctgtaacttttccatccggggaccccggcttcaaggccacgtggtgcttgcgcagtgccgagtgctgatggccagtgtgggggccgcgtgccactcggaccacggggaccagccgtccccagtgctgctgagctacggtgtccccttcgacgtggccaggaacgcgctccggctcagcgtgggccgcagcaccaccagggccgaggtggacctcgtcgtgcaggacctgaagcaggccgtggcgcagctggaggaccaggcctagcactggggccgccttccccaccccgcttctgggaagcccgtggcagggcacagggttgtccctccagttccctcctgagggctgtgccaggatgactgtctcatgccccctctgcattttgtcctggagtgccagcgagtgtgcacccccagtttccttccctggacccctgcagagctcacagggcccaggacaccaacgccgcataggactgcccacatgggaccgcccacataggaccgcccacataggaccgcccacatgggaccgcccacatgggaccgcccacatgggaccgcccacatagaaccgtcctccagtggtgaagcggaaacacttagctttatccaccctccccactgggaactgggcacgcctgttgtgagtgccctttcctggaaggtgtttttatctggaagatagaatccaagtatttataactcattgtcagccaaatgctatcatgaacgtaggaaacttgatttttttgttttgatcatggcctctacatgcacctttccagagtggtctcttctcaggccctttttagtccctttccaaagctgcccccaccaccctgctcctctggcctcagtgcacagtggcccccagcctcggccaggcctgctctgctcagcgcccaccgcccaccacccctcctgcttccccgagcctgaccctgttccgcccactggcaatcagggctgcgcacttccctgtccacggtccccaggccttcctgtcttgtcccttttgatcattattaactcagggtttcagctccaacctcgctgagttggtgcagctccaggtcattcctggggtgggaatcggatcatccctgactcagcttttaccttaattttatttgcagaggattcttttctcaaaatgctctggcatttggacacacatcacatgtcgatatttgcataggagtcattttcagtggaataacatttttaatgtgtggttttacggttcaaggaactacttgatgattttgaggaaacacttgccagaaactaaattaacgaataaaagatttcagtgcccg

SEQ ID NO: 196870 - DNA, 825 bp, Homo sapiens
  Payload ID: 18828
  Gene Name: UbiA prenyltransferase domain containing 1
  Uniprot ID: Q9Y5Z9
  ENST ID: ENST00000376804
  CDS Start-End: 5-544
ttccatggcggcctctcaggtcctgggggagaagattaacatcctgtcgggagagactgtcaaagctggggacagggacccgctggggaacgactgtcccgagcaagataggctcccccagcgctcctggaggcagaagtgtgcctcctacgtgttggccctgaggccctggagcttcagtgcctcactcacaccggtggccctgggcagtgcccttgcctacagatcccacggtgtcctggatcccaggctcttggtgggttgtgccgtggctgtcctggctgtgcacggggccggtaatttggtcaacacttactatgacttttccaagggcattgaccacaaaaagagtgatgacaggacacttgtggaccgaatcttggagccgcaggatgtcgtccggttcggagtcttcctctacacgttgggctgcgtctgtgccgcttgcctctactacctgtcccctctgaaactggagcacttggctcttatctactttggaggcctgtctggctcctttctctacacaggagtcctcatctagccactgaagcagagtgcccacatcaggagcagccagtgctcaagctcccagaaactgcctagtgacctgccttctagacctgcctcctgagaatggggctggccaccttcgaggagagggaagtgagccccttcctgcctcggggtgggcagcatctggagctgacaattgtatgcatgttcaggacacaggatactcaactcttcgggttcagtgtgctgtgtggagggagaggaagttgacacacgtgaaccatagaataaacaacgaccacagaacat

SEQ ID NO: 196871 - DNA, 3646 bp, Homo sapiens
  Payload ID: 18828
  Gene Name: UbiA prenyltransferase domain containing 1
  Uniprot ID: Q9Y5Z9
  ENST ID: ENST00000376810
  CDS Start-End: 327-1343
gcgggcctccagaggccggcgcacaagatggcggctctggcggcctaaagaaggcggccgcggctcagccgtgggctctaacgcggggctgggggccggagacagacttcgcccaggtgacgggtagtaggggcggcgccgcttggcctcgtggggtgtaagacccacttgctgttgcccccggaccttgccgccacaccagccctgtcctggggcggaaccgaaggaaggtcgggccctgctgccccgccccgtccttcctccttcccgggcggtcactgtgcgtggctcacttttagagtttacttcaaccacgtggagcttccatggcggcctctcaggtcctgggggagaagattaacatcctgtcgggagagactgtcaaagctggggacagggacccgctggggaacgactgtcccgagcaagataggctcccccagcgctcctggaggcagaagtgtgcctcctacgtgttggccctgaggccctggagcttcagtgcctcactcacaccggtggccctgggcagtgcccttgcctacagatcccacggtgtcctggatcccaggctcttggtgggttgtgccgtggctgtcctggctgtgcacggggccggtaatttggtcaacacttactatgacttttccaagggcattgaccacaaaaagagtgatgacaggacacttgtggaccgaatcttggagccgcaggatgtcgtccggttcggagtcttcctctacacgttgggctgcgtctgtgccgcttgcctctactacctgtcccctctgaaactggagcacttggctcttatctactttggaggcctgtctggctcctttctctacacaggaggaattggattcaagtacgtggctctgggagacctcatcatcctcatcacttttggcccgctggctgtgatgttcgcctacgccatccaggtggggtccctggccatcttcccactggtctatgccatccccctcgccctcagcaccgaggccattctccattccaacaacaccagggacatggagtccgaccgggaggctggtatcgtcacgctggccatcctcatcggccccacgttctcctacattctctacaacacactgctcttcctgccctacctggtcttcagcatcctggccacacactgcaccatcagcctggcactccccctgcttaccattcccatggccttctcccttgagagacagtttcgaagccaggccttcaacaaactgccccagaggactgccaagctcaacctcctgctgggacttttctatgtctttggcatcattctggcaccagcaggcagtctgcccaaaatttaaggggacaagtagctccccccacgacatgtctccctttcttagaatatattaaagtcagagtctctgaggaaggaatgtgatttggcagtcagggtactaagcatgggtgggaactcctgccttataaaaattgtttttgtgttcttaaagataatatgttgtttttctgttttttgttttttccattttatggggaatttaaaaaccattcttgtatcagaaggtgaattaggcgcatggtctttgttttattaataatttccactagagggtgttctcaggtcactttgcagtgaagtggacttagttcctccttgttctgtacaaaatgtctccagactttgtaaaggagctgcccagtttggcctcctgtcccgaaaagaccctaataactaggcagagtgttgtcctgctttcttcgtctcgtaggatgtgctatgattggtgccaggcctcactaacacaggggctacctgtctcttattctcagcacctgtgtcctgagatacgctgcctgagacagagagagtccctcattaacagcctgtgtggctgtcagctttttgcctaaattgtgattcagatgcttttgttctctctcctttcacttattgccacagttgaggaaaagtgtcagattaccctgcagcaagacaagccaaggactgggagggaaaaaaaaaccactctggaggcaactgagaaaatcactgcttttggataggaatcagtagggtggctgttttccctttgttgaatctactagagtgacaggaaggactcccagccctttcagtaactatcaggagccctgaaacggtagaggcactgccatccttgtgggatactcaaagcccacagggcttttccctccctattgcatcttctgatgctccccacacctaccctccacctctccacctctgtggtgttcccatttgtgtgtttcccatctgtggagccagactgagcaatagcttagcagcgagtcagggacagctgccactttccacagagccacaggatgggcagagcagggacccagggaatgaatagccagtggacaaacagtcttgagctctgttcagccagagtgatgggccctgccagttaaggggctgtgtcttcatccttgaagacagatgtgcaatattgaccctgcctctccccagggctttgtggaaagatagttgagggctttagtgagatcacactcagagtggggcaattccagcatttatcctggctgcgtttcattgcattgtctgtgaagtataatttctgggccagaattgctcagttgcatttgatccaggactatagattggaaatgggtcatcattgttttctgttgtgattatagccattctagtaggcgtttaaggtcatggcctgcagaaaatgatgtaagaactagttcttaatctttcagatcaagctaatgatgatatggaaccttgagttcgaattgattggtttacttggaaaaaaacatgtttgaaaattgcaaaagttccgccgggcgcggtggctcatgcctgtaatcccagcactttgggaggccgagacgggcggatcacgaggtcaggagatcgagaccatcttggctaacacggtgaaaccccgtttctactaaaaatacaaaaaattagccaggcgtgttggcgggcgcctgtagtcccagctacctgggcggctgaggcaggagcatggcgtgaacccaggaggcggagcttgcagtgagctgagatcatgccactgcactccaacctgggggacacagcaagactccgtctcaaaaaaaaaaaaagaaaaagaaaattgcaaaagttcctctaaagttaaatcaaaggtggtttgtctagcagagagccagaatcttctaatagtgggcagagcccagagacaaggggaagaaagatgaccttctccccagtccttcccagcaccatttttgtttcacaccaggcttgtggcattttggtgctcacaggggttttgccttctgacctctccttggagtaggccattctcatgcagggctcaccctgaggcaggaggaccaagggctccctgcgtccacggaccacgtatgccttggtggtcactcccatcggggctatcagttctgcactgtgccctggtgcggattttaatgcatatttttatatataaatgttcccaaaggccaaatttgttgccaggttttatacgcaggtcaccataatttgtattatgttccctgagtcaatgaaggttttctttagacttcttaattaaaaagagaagaaagaaaatgttca

SEQ ID NO: 196872 - DNA, 1393 bp, Homo sapiens
  Payload ID: 18828
  Gene Name: UbiA prenyltransferase domain containing 1
  ENST ID: ENST00000483738
  CDS Start-End: 1-234
ggagtcttcctctacacgttgggctgcgtctgtgccgcttgcctctactacctgtcccctctgaaactggagcacttggctcttatctactttggaggcctgtctggctcctttctctacacaggaggaattggattcaagtacgtggctctgggagacctcatcatcctcatcacttttggcccgctggctgtgatgttcgcctacgccatccagtcctcatctagccactgaagcagagtgcccacatcaggagcagccagtgctcaagctcccagaaactgcctagtgacctgccttctagacctgcctcctgagaatggggctggccaccttcgaggagagggaagtgagccccttcctgcctcggggtgggcagcatctggagctgacaattgtatgcatgttcaggacacaggatactcaactcttcgggttcagtgtgctgtgtggagggagaggaagttgacacacgtgaaccatagaataaacaacgaccacagaacatcaaggtagagatggggctgctgggtatcaggaaggcttccaggaagaggtgacaatgagcggcgatcaaggtttctaggaagaggtggccataagaggtgactgttccatggaaaccgaggtgctgatggacagctcaattcccccagctggagaaagcccccctgttgctgcctgagagagtaagactcgaagttttccttaatcagcctcttttggctgtgcagttagacaactggagcattgaggcaggtgtgccaagggcactctgaccactgccaaggtcaaagccttctgcagaatgaaaactccgacacttccttgctgagaaacaaacaagagagaatggcggggcatttaatcatccacagctgccaatacctaatcaagatgaatggcctggagagacaaggccagggaaagcatcccgtgaagcaggagcgctgagcccaagtctcctgcgagtcaggggagcccctcagccctgggccacattgaggccaagggaataccaggtgggaggccctcagattcaggggaagtgctgagggggtcagaggtcaccatggtcaccaatgagggccttccagctgacacttgccttggccaaagacctttactgagagcctgctctgtcccaggaggcaagataaacgaggcacacccctgccctttgaggacacacagtgaactaatagcaaaagctacatgcatacattatcctgccacctcaagtgtcaacatagacacttgtccctagagatccttaaagcccctctgaaggacaggccactcacagccatgtgtgagacatagaggcataaaggctgtggggaaatgagggcagaagagatgaacttctccatgccccattgttccagactgc

SEQ ID NO: 196873 - DNA, 831 bp, Homo sapiens
  Payload ID: 18828
  Gene Name: UbiA prenyltransferase domain containing 1
  ENST ID: ENST00000486588
  CDS Start-End: 1-357
acacttgtggaccgaatcttggagccgcaggatgtcgtccggttcggagtcttcctctacacgttgggctgcgtctgtgccgcttgcctctactacctgtcccctctgaaactggagcacttggctcttatctactttggaggcctgtctggctcctttctctacacaggaggaattggattcaagtacgtggctctgggagacctcatcatcctcatcacttttggcccgctggctgtgatgttcgcctacgccatccaggctggagtgcaatggtgcaatctcagctcgctgcaacctctgcctccagggttcaagcgattctcctgcctcagcctcctgagtagctgggattaacagcccatctcagcactagcacagtgcatggtgcaacagagcaggcagtcagtaactggttgttgaatgactgagttacatgggaagggctgggccctccagggctgactgacaggtgtgagagtttggaccactgcatcacatcagctgtcagtaaggacagtcctcatctagccactgaagcagagtgcccacatcaggagcagccagtgctcaagctcccagaaactgcctagtgacctgccttctagacctgcctcctgagaatggggctggccaccttcgaggagagggaagtgagccccttcctgcctcggggtgggcagcatctggagctgacaattgtatgcatgttcaggacacaggatactcaactcttcgggttcagtgtgctgtgtggagggagaggaagttgacacacgtgaaccatagaataaacaacgaccacagaacatcaaggtagagatggggctg

SEQ ID NO: 196874 - DNA, 6252 bp, Homo sapiens
  Payload ID: 18829
  Gene Name: ubinuclein 1
  Uniprot ID: Q9NPG3
  ENST ID: ENST00000262376
  CDS Start-End: 620-4024
ctcggcgcttccgttacgcccgttggtccggcgcgggccccggggccattcccgagcccgaggcgctggtcggccccgtcgcagcgccagtgagctaccctgacggagctcggcgcggcctggaactcagcctccgccgggtctgggctcccgcgcccggcaactctgcttggccgcaggccgggaggccccggtgtccgcgcccgtccgctcccgccgcccgtgttctttggagcgctcctcccgacggccgctttcggaggcgccgtctgagcgcggggtcccgcgccgcaagttctcctggggcgaccggaggctgctcccccgaccccctggtgtccccggagtggctgcgcggacgtcgagttggcatttcttcgcttcctcctgggccggcgcgcggcgcggcacaccaggctcccctgggctcggggacccggccatgggccgaggcgcgggccgcccgcccgctgggagccacggcttagcagccgaccgctagctgcgccgccgcccggggaccggcatgaggaccgccgcggggggacgtctgcggcccgcgtcggcgctggggacaaagaagccatgcagtgacacccgctaagacttgttggtagccatgtcggagccccacagggtccagttcacctctctcccaggttccctgaatcctgcgtttttgaagaagtcccggaaggaggaggctggggcaggagaacagcatcaggactgtgagccggctgcagcagctgttcggattacactcaccctctttgaaccagatcacaaacgctgcccagagttcttctacccagagctggtgaagaatatccgagggaaggtaaaaggccttcagcctggagataagaagaaagatctgtcagatcctttcaatgacgaagaaaaggaaaggcataaagtagaggcccttgcccgaaaatttgaagaaaaatacggtggaaagaaacgtagaaaagaccgaatacaggacttgatcgatatggggtatggttatgatgaatccgactccttcatcgataactctgaggcgtatgatgagcttgttcctgcttctttgactacgaagtatggaggattttacattaactcgggaaccctgcagtttagacaagcatcagagtctgaagatgacttcattaaagaaaagaagaaaaaatctccaaagaagcggaagttgaaggaaggtggtgagaagataaagaagaagaaaaaagatgacacttatgacaaggagaagaaatcgaaaaagtccaagttttccaaagccggcttcacagccctcaatgccagtaaggagaagaagaagaagaaatattctggggctttaagcgttaaagagatgctaaagaaatttcagaaagagaaagaggctcagaaaaaaagggaggaggagcataagcctgttgcggtcccatcagcggaagctcagggcctgcgggaactggagggtgcctctgaccccttgctctcactctttggctctacttctgacaacgacttgctccaggcggccactgccatggactcgctgacggatttggacttggagcatctgctcagtgagtctccagaaggaagtcccttccgagatatggatgatggaagtgattcccttggggtgggattggaccaggaattcaggcagccctcttctctccccgaaggcctgccagcacccctggagaagcgcgttaaggagctggctcaggctgccagagctgctgagggggagagcagacagaagttcttcacccaggatattaatggaatcctattagacatagaggcgcagactcgggagctgagcagtcaggtccgctctggggtgtatgcctatcttgcgtcattcctgccctgcagcaaggatgccctgctcaagcgtgctcggaaacttcacctctatgaacaggggggccgtctgaaggagcctctccagaagctcaaggaagccattggcagggcgatgccagagcagatggccaagtaccaggacgaatgccaggcacacacgcaggcaaaggttgccaagatgctggaagaggagaaagacaaggagcagagggaccggatttgttcggatgaggaagaagatgaagaaaaagggggcaggaggataatgggacctcggaagaagttccaatggaatgatgagatcagggagctactgtgccaggtggtgaagatcaaactggagagccaggacctggagaggaacaacaaagcccaggcttgggaggactgtgtgaagggctttctggatgcggaagtcaagcccctctggcccaaaggctggatgcaggccagaactctgtttaaggagagcagacgaggccatgggcacctgacttcaatcctggccaagaagaaagttatggccccttctaaaatcaaggtgaaggaatcgtctacgaagcctgataaaaaggtttctgtcccatcaggacagattggtggccccattgctttgccctcagatcaccaaacaggaggcctgagtattggggcctcgagcagggagctcccatcccaggcatcgggcggccttgctaaccctcctcctgtcaacctggaggactcattggatgaagacttgatccgcaatccagcctcctcggtggaagccgtgtccaaggaattggctgcattgaatagcagagcagctgggaactctgaattcacactgcctgcaccctcaaaagcacctgcagaaaaagttggaggcgttttatgtacagaagaaaaaaggaactttgcgaagcctagtccttctgctccaccaccagctagctctctgcagtcacccctcaattttctggcagaacaggctctggcactggggcagtcctctcaggagaaaaaaccagagagttctggctacaaagagctgtcctgccaggctcccctcaataagggcctgccagaagtacatcagtccaaagctaagcaccacagcttgccacggacgtctcacgggccccaagtggcagttcctgtgcctggcccccaggtcaaagtctttcatgccggcactcagcagcagaaaaacttcacgcccccatctccatttgccaataagctccaaggcccaaaggcttctcccacacagtgtcatcgttccctcctgcagttagtgaagacagcggccaaaggccagggcttccatccctctgcaccagccacctcaggaggcctgtcagcctccagcagcagctctcacaagaccccagcctcgtcctcttctgccctgagccatccagcaaagccacattcagtcagctctgcaggctcatcttacaagaataatccctttgccagctcaatctccaaacatggggtttcttctggcagctcttcctcgggaggaacaccagtccagagttctgtttctgggagcctggtccctggcatacagcctccctccgtgggacaggccaccagccgacccgtcccaagttcagcagggaaaaaaatgcctgtttcccagaagttgactctggtagcccctccaggcggtccaaacggagattccagtggtgggacccagggagtggcaaagttgctgacctcgccgtccctaaagccctctgcagttagtagtgtgacatcgtctacctccttgtcaaaaggagcgagtgggactgtgctgctggccggctcctctttgatggcttcaccctacaaatccagcagcccaaagctgtctggggccatgagctcgaactccttgggaattataacccctgtccctattcctgtccatgtgctctccttcagcgctgactcctctgccaaagcaggggtctccaaggatgccatcgtcacaggccctgcccccgggtccttccaccatggccttggccacagtcttctggctggcttgcactccagcccgccccatgcagcgcctctcccacacgctgcggtgcccacccatatcccgcagagtctgccaggtgcttctcagcttcacgggaaagggcctgctgtaccacggaaattgtgaccgcttcagaggcaaggcttgccacttgggtctgggtggaatcagaacgtgcaggtctcccaggatgtacactcactgcgccctttctgctgcttggtgttcttctggaggagcgtgagttctcagcggagcgcttctcggcacttctgatgtgcctcccatggagggagccgggcccttgctgctcaggaggtgcagactgccccgtgctctgggccttgcagctctgtcgctagacggttgttagaggggcagctctaggctggggcttgcgctgggccgtggtgggaggcacagtgtttacaggctctggtggcagagcagttggcacacctgtgggtgaatctgcctgatcccctggcatttggtcagagtacctcagagcaccccactgctcaggggctccttctggctgcagtaagctccctggatggtcacagtgccgccccatccccaggctgtgtgctcaaagcggacaaaactcaggccagagccacagctgggagacctgcactgtccctgcgaaatactaagaacacctagggtgtgctcactgtgggggccagtttctcctcggaacatgacaatgaagctcttttagagaaaagacctttgtagattcaacaattatgataggatttttacagacacctattttgggctcagttttcatcattaccattaaatgcattggatagaaggggactgttcttcacacatcatattataggaagacataattccagtgcctttatggtggagcagaattcgacaacacatgtccattcagccctctgaatggatctgagacgaagacctttttaaagatatgtctgtattgaagagaaagccagttttgagttttttacacttgcacatcattatctgtgccgtcctgactagaaggttgtctgggcccccaaattccaagtcccagtatagccagggctcccattttgtttttccagagttcgtggaggtggactgcagagcccagagcccttcatctctctgagggtcaaggataccaggggtcccaagtcacagatagacattccagtttgtattcttaggaatcattcttaggcagtgcggcagaagcaggcctctgtgaagtgtctgccgggtagaaataggccttgaagtcctggggctctccaggcagtggggttatgtgtcgactgaagggtgatgtgcagaagagcttggagagtggatcagagagactaggacagttactgcagagctcctaagtcaccactcaaccagtggctgtttcacaaggatttgagggcacttgcctgtcttgtgaggtctgtgccacaaggtgagtctgaactgactgctccagctaagtgatcaggcacgttgagagtatacggtgtcctcagcacatacacctgtgggaaaacggaccgctcttggctcctgactcccagggtacagcgcccagtaactcatccttcattcagaggtttgctggccttcccggtttcccaaggagcaagacctctgtccgccctttggcccggcctctgctctgtctcctttttttacataagaaccaatccgtgtttcacattgggctaagtggattccttatccctttgttatatatattttttgcaacttggatttccagtttgtttacagagtagtcttaggtagtagcaaaagagccaaagaagagatttgtattgctgagctcaaagccaagcagaggccggcagtggaggctgagcagggactctccaggcttctctgcccataaacacccgggtcccaggccctccttcctttccctttggtgctccctcctccccacgtaccattgcgcgtgcagctggagcagaataccctcatttttaggaatctagtgatgcctcttgcctcagggaaacgtttctttgatggggagtttgagatttcttttccttgtttatgctttatttgtggtaatgaaagagcgaatgactgaacagccatggcaaggcagacctacaggcgaggccgcagcagagggtggggcagagcagcctcggggtctgggggctgcaggggtttccctggcgcagcgaaagtctctgagcacttaccgggcgtgaccgtttcttaggtgtgagaggggctgtggcttttgtgcagcgactatgttggtgttaggggtggtgtggagattgttaatcttgtataaagcaattcaataaattgtttcaaggtttccaaaa

SEQ ID NO: 196875 - DNA, 6336 bp, Homo sapiens
  Payload ID: 18829
  Gene Name: ubinuclein 1
  Uniprot ID: Q9NPG3
  ENST ID: ENST00000396658
  CDS Start-End: 704-4108
ttctgtgaacatttggaattctgtattcaaaatctattttgaccattcccaagtgattttgaaggtctttggcatgtcataatttgttattttgtcaaggccagtgtttgggtgtgagagtggtgcacagggcaggagtgtgtaactttgttaggaagtgagcctagccacaccctcctgagtcactggttctttactatcctggggtaggcaatatcttttgttcagctgataaaagctttgtcattgtgaagattggctcccaatgataggaaactgctggtgatgaaaataaaggggtcttaaagattattctcagccagaaaaaataagtgttagacaaattaaatggaaaataattaatattttagtagtctttacaatttggaggtctaaggctctgtcagcatgggttctttaaggtcaaggatctaggatacacatgcacaggaaaaaagactggaagtatgctaagcagtgactatctctgaatgattgtgaaaaaattttaggatgaataagcagaaaaaaacaataaatgacaaaatataacaatggagttttcttgacaatgaaattctcttaaacttaaatctctttaattaggcaggtaaactattttatcatcttcgtttgacctggcccttcttttcaatgttaacagaagccatgcagtgacacccgctaagacttgttggtagccatgtcggagccccacagggtccagttcacctctctcccaggttccctgaatcctgcgtttttgaagaagtcccggaaggaggaggctggggcaggagaacagcatcaggactgtgagccggctgcagcagctgttcggattacactcaccctctttgaaccagatcacaaacgctgcccagagttcttctacccagagctggtgaagaatatccgagggaaggtaaaaggccttcagcctggagataagaagaaagatctgtcagatcctttcaatgacgaagaaaaggaaaggcataaagtagaggcccttgcccgaaaatttgaagaaaaatacggtggaaagaaacgtagaaaagaccgaatacaggacttgatcgatatggggtatggttatgatgaatccgactccttcatcgataactctgaggcgtatgatgagcttgttcctgcttctttgactacgaagtatggaggattttacattaactcgggaaccctgcagtttagacaagcatcagagtctgaagatgacttcattaaagaaaagaagaaaaaatctccaaagaagcggaagttgaaggaaggtggtgagaagataaagaagaagaaaaaagatgacacttatgacaaggagaagaaatcgaaaaagtccaagttttccaaagccggcttcacagccctcaatgccagtaaggagaagaagaagaagaaatattctggggctttaagcgttaaagagatgctaaagaaatttcagaaagagaaagaggctcagaaaaaaagggaggaggagcataagcctgttgcggtcccatcagcggaagctcagggcctgcgggaactggagggtgcctctgaccccttgctctcactctttggctctacttctgacaacgacttgctccaggcggccactgccatggactcgctgacggatttggacttggagcatctgctcagtgagtctccagaaggaagtcccttccgagatatggatgatggaagtgattcccttggggtgggattggaccaggaattcaggcagccctcttctctccccgaaggcctgccagcacccctggagaagcgcgttaaggagctggctcaggctgccagagctgctgagggggagagcagacagaagttcttcacccaggatattaatggaatcctattagacatagaggcgcagactcgggagctgagcagtcaggtccgctctggggtgtatgcctatcttgcgtcattcctgccctgcagcaaggatgccctgctcaagcgtgctcggaaacttcacctctatgaacaggggggccgtctgaaggagcctctccagaagctcaaggaagccattggcagggcgatgccagagcagatggccaagtaccaggacgaatgccaggcacacacgcaggcaaaggttgccaagatgctggaagaggagaaagacaaggagcagagggaccggatttgttcggatgaggaagaagatgaagaaaaagggggcaggaggataatgggacctcggaagaagttccaatggaatgatgagatcagggagctactgtgccaggtggtgaagatcaaactggagagccaggacctggagaggaacaacaaagcccaggcttgggaggactgtgtgaagggctttctggatgcggaagtcaagcccctctggcccaaaggctggatgcaggccagaactctgtttaaggagagcagacgaggccatgggcacctgacttcaatcctggccaagaagaaagttatggccccttctaaaatcaaggtgaaggaatcgtctacgaagcctgataaaaaggtttctgtcccatcaggacagattggtggccccattgctttgccctcagatcaccaaacaggaggcctgagtattggggcctcgagcagggagctcccatcccaggcatcgggcggccttgctaaccctcctcctgtcaacctggaggactcattggatgaagacttgatccgcaatccagcctcctcggtggaagccgtgtccaaggaattggctgcattgaatagcagagcagctgggaactctgaattcacactgcctgcaccctcaaaagcacctgcagaaaaagttggaggcgttttatgtacagaagaaaaaaggaactttgcgaagcctagtccttctgctccaccaccagctagctctctgcagtcacccctcaattttctggcagaacaggctctggcactggggcagtcctctcaggagaaaaaaccagagagttctggctacaaagagctgtcctgccaggctcccctcaataagggcctgccagaagtacatcagtccaaagctaagcaccacagcttgccacggacgtctcacgggccccaagtggcagttcctgtgcctggcccccaggtcaaagtctttcatgccggcactcagcagcagaaaaacttcacgcccccatctccatttgccaataagctccaaggcccaaaggcttctcccacacagtgtcatcgttccctcctgcagttagtgaagacagcggccaaaggccagggcttccatccctctgcaccagccacctcaggaggcctgtcagcctccagcagcagctctcacaagaccccagcctcgtcctcttctgccctgagccatccagcaaagccacattcagtcagctctgcaggctcatcttacaagaataatccctttgccagctcaatctccaaacatggggtttcttctggcagctcttcctcgggaggaacaccagtccagagttctgtttctgggagcctggtccctggcatacagcctccctccgtgggacaggccaccagccgacccgtcccaagttcagcagggaaaaaaatgcctgtttcccagaagttgactctggtagcccctccaggcggtccaaacggagattccagtggtgggacccagggagtggcaaagttgctgacctcgccgtccctaaagccctctgcagttagtagtgtgacatcgtctacctccttgtcaaaaggagcgagtgggactgtgctgctggccggctcctctttgatggcttcaccctacaaatccagcagcccaaagctgtctggggccatgagctcgaactccttgggaattataacccctgtccctattcctgtccatgtgctctccttcagcgctgactcctctgccaaagcaggggtctccaaggatgccatcgtcacaggccctgcccccgggtccttccaccatggccttggccacagtcttctggctggcttgcactccagcccgccccatgcagcgcctctcccacacgctgcggtgcccacccatatcccgcagagtctgccaggtgcttctcagcttcacgggaaagggcctgctgtaccacggaaattgtgaccgcttcagaggcaaggcttgccacttgggtctgggtggaatcagaacgtgcaggtctcccaggatgtacactcactgcgccctttctgctgcttggtgttcttctggaggagcgtgagttctcagcggagcgcttctcggcacttctgatgtgcctcccatggagggagccgggcccttgctgctcaggaggtgcagactgccccgtgctctgggccttgcagctctgtcgctagacggttgttagaggggcagctctaggctggggcttgcgctgggccgtggtgggaggcacagtgtttacaggctctggtggcagagcagttggcacacctgtgggtgaatctgcctgatcccctggcatttggtcagagtacctcagagcaccccactgctcaggggctccttctggctgcagtaagctccctggatggtcacagtgccgccccatccccaggctgtgtgctcaaagcggacaaaactcaggccagagccacagctgggagacctgcactgtccctgcgaaatactaagaacacctagggtgtgctcactgtgggggccagtttctcctcggaacatgacaatgaagctcttttagagaaaagacctttgtagattcaacaattatgataggatttttacagacacctattttgggctcagttttcatcattaccattaaatgcattggatagaaggggactgttcttcacacatcatattataggaagacataattccagtgcctttatggtggagcagaattcgacaacacatgtccattcagccctctgaatggatctgagacgaagacctttttaaagatatgtctgtattgaagagaaagccagttttgagttttttacacttgcacatcattatctgtgccgtcctgactagaaggttgtctgggcccccaaattccaagtcccagtatagccagggctcccattttgtttttccagagttcgtggaggtggactgcagagcccagagcccttcatctctctgagggtcaaggataccaggggtcccaagtcacagatagacattccagtttgtattcttaggaatcattcttaggcagtgcggcagaagcaggcctctgtgaagtgtctgccgggtagaaataggccttgaagtcctggggctctccaggcagtggggttatgtgtcgactgaagggtgatgtgcagaagagcttggagagtggatcagagagactaggacagttactgcagagctcctaagtcaccactcaaccagtggctgtttcacaaggatttgagggcacttgcctgtcttgtgaggtctgtgccacaaggtgagtctgaactgactgctccagctaagtgatcaggcacgttgagagtatacggtgtcctcagcacatacacctgtgggaaaacggaccgctcttggctcctgactcccagggtacagcgcccagtaactcatccttcattcagaggtttgctggccttcccggtttcccaaggagcaagacctctgtccgccctttggcccggcctctgctctgtctcctttttttacataagaaccaatccgtgtttcacattgggctaagtggattccttatccctttgttatatatattttttgcaacttggatttccagtttgtttacagagtagtcttaggtagtagcaaaagagccaaagaagagatttgtattgctgagctcaaagccaagcagaggccggcagtggaggctgagcagggactctccaggcttctctgcccataaacacccgggtcccaggccctccttcctttccctttggtgctccctcctccccacgtaccattgcgcgtgcagctggagcagaataccctcatttttaggaatctagtgatgcctcttgcctcagggaaacgtttctttgatggggagtttgagatttcttttccttgtttatgctttatttgtggtaatgaaagagcgaatgactgaacagccatggcaaggcagacctacaggcgaggccgcagcagagggtggggcagagcagcctcggggtctgggggctgcaggggtttccctggcgcagcgaaagtctctgagcacttaccgggcgtgaccgtttcttaggtgtgagaggggctgtggcttttgtgcagcgactatgttggtgttaggggtggtgtggagattgttaatcttgtataaagcaattcaataaattgtttcaaggtttccaaaa

SEQ ID NO: 196876 - DNA, 937 bp, Homo sapiens
  Payload ID: 18829
  Gene Name: ubinuclein 1
  ENST ID: ENST00000586716
  CDS Start-End: 1-937
gttcggatgaggaagaagatgaagaaaaagggggcaggaggataatgggacctcggaagaagttccaatggaatgatgagatcagaactctgtttaaggagagcagacgaggccatgggcacctgacttcaatcctggccaagaagaaagttatggccccttctaaaatcaaggtgaaggaatcgtctacgaagcctgataaaaaggtttctgtcccatcaggacagattggtggccccattgctttgccctcagatcaccaaacaggaggcctgagtattggggcctcgagcagggagctcccatcccaggcatcgggcggccttgctaaccctcctcctgtcaacctggaggactcattggatgaagacttgatccgcaatccagcctcctcggtggaagccgtgtccaaggaattggctgcattgaatagcagagcagctgggaactctgaattcacactgcctgcaccctcaaaagcacctgcagaaaaagttggaggcgttttatgtacagaagaaaaaaggaactttgcgaagcctagtccttctgctccaccaccagctagctctctgcagtcacccctcaattttctggcagaacaggctctggcactggggcagtcctctcaggagaaaaaaccagagagttctggctacaaagagctgtcctgccaggctcccctcaataagggcctgccagaagtacatcagtccaaagctaagcaccacagcttgccacggacgtctcacgggccccaagtggcagttcctgtgcctggcccccaggtcaaagtctttcatgccggcactcagcagcagaaaaacttcacgcccccatctccatttgccaataagctccaaggcccaaaggcttctcccacacagtgtcatcgttccctcctgcagttagtgaagacagcggccaaaggccaggg

SEQ ID NO: 196877 - DNA, 2305 bp, Homo sapiens
  Payload ID: 18829
  Gene Name: ubinuclein 1
  ENST ID: ENST00000592120
  CDS Start-End: 1769-2305
gcagaccgcgggaggcacccaagcgtgcactggtcactgccaagccatcggttgtaaaggagaagtccccccgccgtttcttcgcggggcaacgccagcagtccggtttagacaaccccggctgagccggccgcacaggtcggctgcatcgcaacctgggctttgaccgaatggcaccggccagatctcgcaggtccggtccccggcgcttctgctttctgggaagccccaacaagaccccggggaccggtcgtccggggaagcctcgcggcaccggcggctcccttcacgggggccgccagtatctgggccccgagtgcagaccccacccggccggcctcggggatcaaagccggtgcccgacgtggccaccctcggcctcggtcccccgggactggactgccccttccgcctggcgccgctcgcaagcgccggcaccttctcttcccctctctccgcgacctggagcgcataaaaaggcagctccagggccggcagcgaaccccgcgcccaggcgggtagctccccggcgcgtctcggttggcccggccgctcggactcaccacaccaagtcgccgagccgcagactcacagccgccatcttaccacccaaccaccgccgacgcacgggccgccgggaacagcaagtcgccccggcgccgcccattggagtgggcccgaccacgtgacgggggccggctgtcactggccacgccgctactctgacgtcaccgcgcccgccggggatcattggtcgaccgaggggcacgtgacgcgagcgccgcggtctccgcgcgccggagcgcagagactcccggctccttccccctcccttcggctcgtgacaacgaagcgcccgcggtctgaggcggcggcggcggcgacggtgcgaccggctgagcgcgagagggagccggcctcgcggctcgccccgcccccgggtcttggactccgcgcccctcccctctcggcgcttccgttacgcccgttggtccggcgcgggccccggggccattcccgagcccgaggcgctggtcggccccgtcgcagcgccagtgagctaccctgacggagctcggcgcggcctggaactcagcctccgccgggtctgggctcccgcgcccggcaactctgcttggccgcaggccgggaggccccggtgtccgcgcccgtccgctcccgccgcccgtgttctttggagcgctcctcccgacggccgctttcggaggcgccgtctgagcgcggggtcccgcgccgcaagttctcctggggcgaccggaggctgctcccccgaccccctggtgtccccggagtggctgcgcggacgtcgagttggcatttcttcgcttcctcctgggccggcgcgcggcgcggcacaccaggctcccctgggctcggggacccggccatgggccgaggcgcgggccgcccgcccgctgggagccacggcttagcagccgaccgctagctgcgccgccgcccggggaccggcatgaggaccgccgcggggggacgtctgcggcccgcgtcggcgctggggacaaaggtgcgtgtcgttgtcgggtccgggctctctcgttagccttgccctagttttgcacttttgaaaaagttgtgacaacaggaagacagatgccgggcgtagtttggacactttaaaactgaaccatgaactgggaagtgttaactgcagttgagcgcagcgtcggcccaaacttcagcagaccagaagccatgcagtgacacccgctaagacttgttggtagccatgtcggagccccacagggtccagttcacctctctcccaggttccctgaatcctgcgtttttgaagaagtcccggaaggaggaggctggggcaggagaacagcatcaggactgtgagccggctgcagcagctgttcggattacactcaccctctttgaaccagatcacaaacgctgcccagagttcttctacccagagctggtgaagaatatccgagggaaggtaaaaggccttcagcctggagataagaagaaagatctgtcagatcctttcaatgacgaagaaaaggaaaggcataaagtagaggcccttgcccgaaaatttgaagaaaaatacggtggaaagaaacgtagaaaagaccgaatacaggacttgatcgatatggggtatggttatgatgaatccgactccttcatcgataactctgaggcgtatgatgagcttgttcctgcttctttgactacgaagtatggaggattttacattaactcgggaaccctgcagtttagacaagcatcagagtctgaagatgacttc

SEQ ID NO: 196878 - DNA, 837 bp, Homo sapiens
  Payload ID: 18829
  Gene Name: ubinuclein 1
  ENST ID: ENST00000587027
  CDS Start-End: 1-216
aagaaacgtagaaaagaccgaatacaggacttgatcgatatggggtatggttatgatgaatccgactccttcatcgataactctgaggcgctcagacattcatgtttgaccagaggatgttttagcatgctcttggaagtggcagaggagcacagtcacatctctctcgagacccactttgcaccttcggactgcagaagcagaacttggagctgacagtttgtttcccatcttcagtatgatgagcttgttcctgcttctttgactacgaagtatggaggattttacattaactcgggaaccctgcagtttagacaagcatcagagtctgaagatgacttcattaaagaaaagaagaaaaaatctccaaagaagcggaagttgaaggaaggtggtgagaagataaagaagaagaaaaaagatgacacttatgacaaggagaagaaatcgaaaaagtccaagttttccaaagccggcttcacagccctcaatgccagtaaggagaagaagaagaagaaatattctggggctttaagcgttaaagagatgctaaagaaatttcagaaagagaaagaggctcagaaaaaaagggaggaggagcataagcctgttgcggtcccatcagcggaagctcagggcctgcgggaactggagggtgcctctgaccccttgctctcactctttggctctacttctgacaacgacttgctccaggcggccactgccatggactcgctgacggatttggacttggagcatctgctcagctgccagagctgctgagggggagagcagacagaagttcttcacccaggatattaatggaatcctattaga

SEQ ID NO: 196879 - DNA, 3530 bp, Homo sapiens
  Payload ID: 18829
  Gene Name: ubinuclein 1
  Uniprot ID: Q9NPG3
  ENST ID: ENST00000590769
  CDS Start-End: 54-3368
cttcagcagaccagaagccatgcagtgacacccgctaagacttgttggtagccatgtcggagccccacagggtccagttcacctctctcccaggttccctgaatcctgcgtttttgaagaagtcccggaaggaggaggctggggcaggagaacagcatcaggactgtgagccggctgcagcagctgttcggattacactcaccctctttgaaccagatcacaaacgctgcccagagttcttctacccagagctggtgaagaatatccgagggaaggtaaaaggccttcagcctggagataagaagaaagatctgtcagatcctttcaatgacgaagaaaaggaaaggcataaagtagaggcccttgcccgaaaatttgaagaaaaatacggtggaaagaaacgtagaaaagaccgaatacaggacttgatcgatatggggtatggttatgatgaatccgactccttcatcgataactctgaggcgtatgatgagcttgttcctgcttctttgactacgaagtatggaggattttacattaactcgggaaccctgcagtttagacaagcatcagagtctgaagatgacttcattaaagaaaagaagaaaaaatctccaaagaagcggaagttgaaggaaggtggtgagaagataaagaagaagaaaaaagatgacacttatgacaaggagaagaaatcgaaaaagtccaagttttccaaagccggcttcacagccctcaatgccagtaaggagaagaagaagaagaaatattctggggctttaagcgttaaagagatgctaaagaaatttcagaaagagaaagaggctcagaaaaaaagggaggaggagcataagcctgttgcggtcccatcagcggaagctcagggcctgcgggaactggagggtgcctctgaccccttgctctcactctttggctctacttctgacaacgacttgctccaggcggccactgccatggactcgctgacggatttggacttggagcatctgctcagtgagtctccagaaggaagtcccttccgagatatggatgatggaagtgattcccttggggtgggattggaccaggaattcaggcagccctcttctctccccgaaggcctgccagcacccctggagaagcgcgttaaggagctggctcaggctgccagagctgctgagggggagagcagacagaagttcttcacccaggatattaatggaatcctattagacatagaggcgcagactcgggagctgagcagtcaggtccgctctggggtgtatgcctatcttgcgtcattcctgccctgcagcaaggatgccctgctcaagcgtgctcggaaacttcacctctatgaacaggggggccgtctgaaggagcctctccagaagctcaaggaagccattggcagggcgatgccagagcagatggccaagtaccaggacgaatgccaggcacacacgcaggcaaaggttgccaagatgctggaagaggagaaagacaaggagcagagggaccggatttgttcggatgaggaagaagatgaagaaaaagggggcaggaggataatgggacctcggaagaagttccaatggaatgatgagatcagggagctactgtgccaggtggtgaagatcaaactggagagccaggacctggagaggaacaacaaagcccaggcttgggaggactgtgtgaagggctttctggatgcggaagtcaagcccctctggcccaaaggctggatgcaggccagaactctgtttaaggagagcagacgaggccatgggcacctgacttcaatcctggccaagaagaaagttatggccccttctaaaatcaaggtgaaggaatcgtctacgaagcctgataaaaaggtttctgtcccatcaggacagattggtggccccattgctttgccctcagatcaccaaacaggaggcctgagtattggggcctcgagcagggagctcccatcccaggcatcgggcggccttgctaaccctcctcctgtcaacctggaggactcattggatgaagacttgatccgcaatccagcctcctcggtggaagccgtgtccaaggaattggctgcattgaatagcagagcagctgggaactctgaattcacactgcctgcaccctcaaaagcacctgcagaaaaagttggaggcgttttatgtacagaagaaaaaaggaactttgcgaagcctagtccttctgctccaccaccagctagctctctgcagtcacccctcaattttctggcagaacaggctctggcactggggcagtcctctcaggagaaaaaaccagagagttctggctacaaagagctgtcctgccaggctcccctcaataagggcctgccagaagtacatcagtccaaagctaagcaccacagcttgccacggacgtctcacgggccccaagtggcagttcctgtgcctggcccccaggtcaaagtctttcatgccggcactcagcagcagaaaaacttcacgcccccatctccatttgccaataagctccaaggcccaaaggcttctcccacacagtgtcatcgttccctcctgcagttagtgaagacagcggccaaaggccagggcttccatccctctgcaccagccacctcaggaggcctgtcagcctccagcagcagctctcacaagaccccagcctcgtcctcttctgccctgagccatccagcaaagccacattcagtcagctctgcaggctcatcttacaagaataatccctttgccagctcaatctccaaacatggggtttcttctggcagctcttcctcgggaggaacaccagtccagagttctgtttctgggagcctggtccctggcatacagcctccctccgtgggacaggccaccagccgacccgtcccaagttcagcagggaaaaaaatgcctgtttcccagaagttgactctggtagcccctccaggcggtccaaacggagattccagtggtgggacccagggagtggcaaagttgctgacctcgccgtccctaaagccctctgcagttagtagtgtgacatcgtctacctccttgtcaaaaggagcgagtgggactgtgctgctggccggctcctctttgatggcttcaccctacaaatccagcagcccaaagctgtctggggccatgagctcgaactccttgggaattataacccctgtccctattcctgtccatgtgctctccttcagcgctgactcctctgccaaagcaggggtctccaaggatgccatcgtcacaggccctgcccccgggtccttccaccatggccttggccacagtgcttctcagcttcacgggaaagggcctgctgtaccacggaaattgtgaccgcttcagaggcaaggcttgccacttgggtctgggtggaatcagaacgtgcaggtctcccaggatgtacactcactgcgccctttctgctgcttggtgttcttctggaggagcgtgagttctcagcggagcgcttctcggcacttctgatgtgcctcccat

SEQ ID NO: 196880 - DNA, 705 bp, Homo sapiens
  Payload ID: 18829
  Gene Name: ubinuclein 1
  ENST ID: ENST00000589191
  CDS Start-End: 1-169
agggaaaaaaatgcctgtttcccagaagttgactctggtagcccctccaggcggtccaaacggagattccagtggtgggacccagggagtggcaaagttgctgacctcgccgtccctaaagccctctgcagttagtagtgtgacatcgtctacctccttgtcacgctgactcctctgccaaagcaggggtctccaaggatgccatcgtcacaggccctgcccccgggtccttccaccatggccttggccacagtcttctggctggcttgcactccagcccgccccatgcagcgcctctcccacacgctgcggtgcccacccatatcccgcagagtctgccaggtgcttctcagcttcacgggaaagggcctgctgtaccacggaaattgtgaccgcttcagaggcaaggcttgccacttgggtctgggtggaatcagaacgtgcaggtctcccaggatgtacactcactgcgccctttctgctgcttggtgttcttctggaggagcgtgagttctcagcggagcgcttctcggcacttctgatgtgcctcccatggagggagccgggcccttgctgctcaggaggtgcagactgccccgtgctctgggccttgcagctctgtcgctagacggttgttagaggggcagctctaggctggggcttgcgctgggccgtggtgggaggcacagtgtttacaggctctgg

SEQ ID NO: 196881 - DNA, 2897 bp, Homo sapiens
  Payload ID: 18830
  Gene Name: ubinuclein 2
  ENST ID: ENST00000483726
  CDS Start-End: 1-1334
caaaatatggaggcttttatatcaacactggcactctacagtttcgccaagcttcagatactgaagaagatgatattacagacaaccaaaagcacaagccacccaaggtccccaaaataaaagaagatgatattgagatgaagaagcggaagcggaaagaggaaggggaaaaggagaagaagccaaggaaaaaagttcccaaacaactgggagttgtggctctaaattcacacaagtctgaaaaaaagaagaaacgttataaagattctctttctctagctgccatgattagaaaattccagaaagagaaggatgcattaaagaaggagtctaaccccaaagtcccagtgaccttgtcaaccccttctctgaataaacccccatgtgctgctgcagcactggggaatgacgtcccggacttaaatctgagcagcggtgatccagaccttcccatttttgttagcacaaatgaacatgagctgtttcaggaagctgaaaatgccctagagatgctagatgattttgacttcgacagattactggatgctgcttctgatggtagccccctatctgagtcggggggtgaaaatggaaccaccacccagccaacctacacttctcaggttatgcccaaagtggtacctacactcccagagggtctacctgtacttcttgaaaaacgtatcgaagaccttcgtgtagctgccaaactttttgatgaagaaggaaggaaaaaattctttacacaggatatgaataatattcttctggacattgagttacagctacaagaactaggccctgtcattcgcagtggtgtctactcccaccttgaagcttttgtgccatgcaataaagaaacactagtaaaacgtctgaagaagttacatctcaatgtccaggatgatcgtttaagagaacctctgcaaaaactgaaactggctgttagcaatgtcatgcctgaacagctatttaaataccaggaggactgccaggctcgtagtcaagctaagtgtgccaaattgcagacagatgaagaacgagaaaaaaatggatctgaagaggatgatgatgagaaaccaggaaaacgtgtcataggaccaagaaagaaattccactgggatgacactatcagaactttgttatgtaaccttgttgagatcaaattgggatgctatgagttagaaccaaataaaagccagtctgctgaagattatcttaagtcttttatggagacagaagtgaagcccctgtggcctaagggctggatgcaggcaagaatgctttttaaggaaagccggagtgttcataatcatcttacttctgctccgtgagtaaatgcagactccagattgcttcatttattcacattatgtgctttagtgaacaaaagtatcatttattaaatgctagttggaataggacttaaaaagatcattttgaccattgactatttagacttcagaacacatttatctattgaaataattgtcagggtactctctaaacacctactaaatccacactgtgacacataatggcctgggattctggtagtagggaagcatgaaggctcagggattttcctttgttcctgggccttctacctgccagtctttttctccacctcttaatgtccatctgcatttgtaatctacagccctctgtgtcctgagtttaccaggacagatccatatgcacacccaccctcgctgcactgcagagtgttttattccacaaaattaacctattcttgaggtcttctgttcaaaaccgtgtatttccttagtgatgtgattactagagaaagatcttttatcccctccacatacaacaaaaaggcaagttttttctgtggtcacctttttggttgaatattggtcaattccagaacagtttcatttttccctacaacgtagggctacttctctgtagcctgcaagggtggcattaacggttattaaagccaggcacagtggctcgcgcctgtaatcccagcactttgggaggctgaggcgggtggatcgcttgagcccaggagtttgagactggcccgggcaacatggcgaaactccatctctacaaaaactataaaaattagccaggcatggtgtgtgtgcctgtagtcccagctactcaggaggctgaggtgggaggatggcttatgccagagaggcggaggttgtagtaagtggagatcatgccaccgccctccagcctgggggacagaacagaccttgtttccagaaaaaaaaaaggggggggttattaaaatataaaattagcaagttactgagaatttactgaacactctaattcaatattctgctgagaggtctgtttaatatcttttgggcaacattataaaattcctactctccttgtatgcagttatataggaattttttagtttttaggaaggacagttcattattacggttgacccttggaacaacacgggagttagggatttcaccccctcatcccacacagtcagaaatccatgtgtaactttcagctctcccagaacttcactgctagtagtctactgttgacctgaagccttactgataacataaatagttcatgaacacattttatatgttttatgtacagtatactgtattcttacaataaagtaagctaaagaaaagaaaatgttaagaaaatcataaggaagagaaattatatttactattcattaggttgaagtgaatcatcataaaggtcttcatcctcaggggtcaactgtatatcagagatgcattgagttggttgtggtttttggttctgttttttttagtataaattctaagttgtttggtttcatatattacaggtttactttgttgcaagagtttttgttgtctttgaaataaattttatgtacatacgta

SEQ ID NO: 196882 - DNA, 589 bp, Homo sapiens
  Payload ID: 18830
  Gene Name: ubinuclein 2
  ENST ID: ENST00000486663
  CDS Start-End: 177-589
gattcccttcaggatgtgaagggcgagccctcaaatttactttttattcaatggattaaaatggccagtaattcttatccttttaaacccgacttccaattaattaattacaaaagaagctcattcacacagaagacccatttaatgatgaacatcaggagaggcaagaggtggaaatgttggctaagaagtttgaaatgaaatatggtgggaaaccccgtaaacaccggaaggatcggctacaagatttaattgatataggctttggctatgatgagacagatccatttattgataactcagaggcttatgatgaattagttcccgcttctctaacaacaaaatatggaggcttttatatcaacactggcactctacagtttcgccaagcttcagatactgaagaagatgatattacagacaaccaaaagcacaagccacccaaggtccccaaaataaaagaagatgatattgagatgaagaagcggaagcggaaagaggaaggggaaaaggagaagaagccaaggaaaaaagttcccaaacaactgggagttgtggctctaaattcacacaagtctgaaaaaaagaa

SEQ ID NO: 196883 - DNA, 14444 bp, Homo sapiens
  Payload ID: 18830
  Gene Name: ubinuclein 2
  Uniprot ID: Q6ZU65
  ENST ID: ENST00000473989
  CDS Start-End: 1-4044
atggcggagccgcgcagagtagcgttcattagcttgtcaccggtgcggcggcgcgaggccgagtacccggggcccgagcgtgagcccgagtacccccgcgagcccccccggctggagccgcagccgtaccgcgagccggcccgggcggagccgccggccccgcgggagcctgccccccgctcggacgcgcagcccccgtcgcgggagaagccgctcccccagcgcgaggtcagccgcgccgagccgcccatgtcgctgcagcgggagcccccgcggcccgagccgccgccgccgttcccgccgctgcccttgcagccgcccccgccgcgggagtcggcttcccgggctgagcagccgccgcggccgccgagggagacggtgcgcctggagctggtgcttaaggaccccaccgacgagagctgcgtggagttcagttacccggagctgctgctgtgcggagaacaacggaagaagctcattcacacagaagacccatttaatgatgaacatcaggagaggcaagaggtggaaatgttggctaagaagtttgaaatgaaatatggtgggaaaccccgtaaacaccggaaggatcggctacaagatttaattgatataggctttggctatgatgagacagatccatttattgataactcagaggcttatgatgaattagttcccgcttctctaacaacaaaatatggaggcttttatatcaacactggcactctacagtttcgccaagcttcagatactgaagaagatgatattacagacaaccaaaagcacaagccacccaaggtccccaaaataaaagaagatgatattgagatgaagaagcggaagcggaaagaggaaggggaaaaggagaagaagccaaggaaaaaagttcccaaacaactgggagttgtggctctaaattcacacaagtctgaaaaaaagaagaaacgttataaagattctctttctctagctgccatgattagaaaattccagaaagagaaggatgcattaaagaaggagtctaaccccaaagtcccagtgaccttgtcaaccccttctctgaataaacccccatgtgctgctgcagcactggggaatgacgtcccggacttaaatctgagcagcggtgatccagaccttcccatttttgttagcacaaatgaacatgagctgtttcaggaagctgaaaatgccctagagatgctagatgattttgacttcgacagattactggatgctgcttctgatggtagccccctatctgagtcggggggtgaaaatggaaccaccacccagccaacctacacttctcaggttatgcccaaagtggtacctacactcccagagggtctacctgtacttcttgaaaaacgtatcgaagaccttcgtgtagctgccaaactttttgatgaagaaggaaggaaaaaattctttacacaggatatgaataatattcttctggacattgagttacagctacaagaactaggccctgtcattcgcagtggtgtctactcccaccttgaagcttttgtgccatgcaataaagaaacactagtaaaacgtctgaagaagttacatctcaatgtccaggatgatcgtttaagagaacctctgcaaaaactgaaactggctgttagcaatgtcatgcctgaacagctatttaaataccaggaggactgccaggctcgtagtcaagctaagtgtgccaaattgcagacagatgaagaacgagaaaaaaatggatctgaagaggatgatgatgagaaaccaggaaaacgtgtcataggaccaagaaagaaattccactgggatgacactatcagaactttgttatgtaaccttgttgagatcaaattgggatgctatgagttagaaccaaataaaagccagtctgctgaagattatcttaagtcttttatggagacagaagtgaagcccctgtggcctaagggctggatgcaggcaagaatgctttttaaggaaagccggagtgttcataatcatcttacttctgctccggcaaagaaaaaggtgattcctgcacctaaacccaaagtaaaggaggtgatggtaaagacccttcctctccattctttccccactatgcttaaggagtgtagtccaaaaaaggaccagaaaactccaacatccctggtggcttcggttagcggtcctccaacgagctccagcacagctgccattgctgcagctagctctagctctgcaccagcccaagaaaccatctgcctcgacgactcactagatgaagacctttctttccattcaccttcactggatcttgtttctgaagctttagcggttatcaacaatgggaacaagggccctccagttggctcaaggataagcatgccaaccacaaagcctcgtccaggactgagagaagaaaaattagcaagtatcatgagtaagctgccactagctactcccaaaaaactagattctactcagactacacattcttcaagtcttattgctggtcacacagggccagtaccaaagaaaccccaggatttagctcatactggcatctcttcaggccttattgctggttcttccattcagaaccctaaagtttctttagaacctttgccagccaggctacttcaacaaggacttcagaggtcaagccagattcacacttcttcctcttcacagacccatgtctcctcttcttcccaagcccaaattgctgcctcttctcatgctctgggaacatccgaggcccaagatgcttcttcgttaacacaagtaacaaaggtgcaccagcattcagctgtccagcagaactatgtgtctccattacaggccaccatcagtaaatcccagaccaaccccgtcgtgaagttaagtaataatccccaactctcctgttcctcctcacttattaagacttcagataagccacttatgtaccgccttcccttatctaccccctcacctggaaatggttctcaagggtcccaccccctggtttctaggacagtacctagcaccactacctccagtaactatttagccaaggctatggtgtcacagatctccacgcagggtttcaaatctcccttctcgatggctgcctccccaaaacttgccgcatctcccaagcctgccacatctcctaaacccctgccctcgcctaagccttctgcctcacccaagccctctctgtcagctaagccttcagtatcaactaaacttatttctaaatccaacccaactcccaagcctactgtatccccaagtagttccagtccaaatgcactagttgcccagggtagccactccagcactaacagcccagtccataaacagcccagtggaatgaacatcagcagacagtctcccaccttgaatttattgccctctagtcgcacttcaggccttccacctacaaaaaatcttcaggccccctcaaagctaacaaactcatcatccactggaactgttgggaagaacagcttgagtggaattgcaatgaatgtacctgccagcagaggtagcaaccttaactcaagcggagctaataggactagtctgtctgggggaacaggaagtggaacacagggtgctaccaaaccattgtctactccacatagaccatccactgcctcagggtcttcagtggtaacagccagtgtgcagtccacagcaggagcatcattattggctaatgcctcacctctgactctcatgacatcacctttgtctgtaacaaatcaaaatgtgactccttttgggatgctgggtggccttgttccagtgaccatgcccttccagtttcccttggagatatttggctttggaacggacacagctggagtgacaaccacctcgggatctacctcagccgctttccaccatagcctaactcagaatttactaaagggtttacagccaggaggagctcagcatgcagcaacgctttcccactcacctctgcctgcacacttacagcaagcatttcacgatggaggccaaagtaaaggggacactaaattaccacggaaatctcagtgactgcccagcaagcaaaggagacgaaatgtttagttgactgatggaatctacctgatgggaaagtacttatgtggtcatagggctgctgtttctgtcgatgtttacattctctcgtcccaagcactgtggtgaggaggaaaaagaaaagaaaacattacttgagcaaagccaggtgcaggaggaagaaatgcttttgtgcaaagttagtgacctttggtctcttctaaagaatgacagagttaccgtattaacagacttgaaagagactcagttgtcaaacccacagaaatacaaatttgatttttcccgggggaggaagaaggaagtgaagagaatttgggtaaactccatccatcctgggggttggatctgaacacttacagacataattggtaataaaaggcattaaaaactggaattaggccagtttgtcaggaataatgatcatgtctatttgaatggactgtgtagcagatttgccacaaaaagaaataataatgattctatctccgatagacagtagctgcatagcacaccctcgaaaatcctgaacaaacttgaatctcctccagtgtgtagcaacttccctcaatcagtggactaaagatccttcaggaaagttattttagcacagtgatatatattattaaatcatctagatttttaaaaatcaggaagttgagcctgttgctcttaagagatgaaacctagatgtcccctttttgtaaaagggtcaatttcatcttccgttcagaagcaggtacttaactcttttcttcaggtgatttgtgcatctagtattgactggttaattcttatttccattcttgatgttaaaatgtgactgtgttcacatttttctcctgagaaatggggatctttacagggttattgctttgctgcttttagcccttgcagcaacataaactctaagtttccccagttcatctaacttcacaacttctccttctgttcttttagctagtggtccttcaggtgattattagctattggtataaacaggtagaagtgtacactatgtttcttcattggtcattcaaatggcatgaatatagtttttgaatttttaagatggtattttaaagggaggaatcacattaggatcacaatcacgacatatttttactccctgtatccagtgtagtgaaattgtttggagcatttgagatcctaaagcttcactatttactcagtgtattggtatgtgagtaaatctgcagaaaataagactccttagttattatagcttccttatgcaaatagcatattcaacaaaggatgttaagggaaaaatttatggttctccttggatacatttgatttgatgggtttttttgccgcattattctagttttttaagcttctgaatattttcatactatatcagagaatggtgtaaactctaaatggtataagcttcatccatttataatgacactaacctaaaaaaaatagactggtagtgacaagatttattgcatatgtgtttattatacattaccctataccattagatttactcaattaagagtattaaccaggcccttttttcttttatacacaaaagtcccagataccctacaggactgtgaataaataaccacagatcggttcagatctgtatgcctatattttgacttcaaagtcacattggcttgcttcatagcgaaaaagttaataaataactgaaaactttagttccaagaacttgttacagtaaagggaaaggattatttcaaaggaatcactgatataatttcttgactctaagaatttagtttatcaataaaacaaatatggatgtagtatgaaccccagtagatattttggaaggatactgggaggatgttgcagagaggtttgacttgaattcagtatgtttgatgaagatttgcttggtttcaattaaggaagcttgcccaatttttttaattttttcaaatgtagtggacctcttgcttttacgaaatatgaataaaaaggtctttgcttcatactaggggaagtgatgggattttcctttgggaaggtagcctttgttttacttctcataccacaagagaagtcgaagtgcgtattaatttctcttcctgaatacttgtatatatgtttgtctgtatgtatatatacatacacacatacattcatataaatgactagtttgagtcaaaaaatcatttgaatttcttaaaaccatcaattctgaatcatgccatatgaagatccctggtgactgtcatcattagaaaagaacaagataatcagttcttttccctgtaacattttatactaaccagtaaaaatatctgaaggcccttggctccaagaatacaatgtggagattcttctgtgttctctttagtcttgattccttgaggactactgtcagatccctaccttaaacccccacctgcactgacgacttacattcatttcagtcaggaccccccttttatgttgtatgaatcagtcaaacatcgttgtatttctgtatagataaagtatgatcagagagtttctacatgtaaatagtaatctatttctttcctagatcataacattgaaaaaggtgcccatactttatggtcacctgtctttaccgtttttattactaaaaacaaacatataaattggttattttttagcacagagacttgtgactcatactgtatttttgcacttaaaaatcaaattatgttattttttaaaatggtgagtcattggaaaggatatctatagagcaacgtgtatttctgaagagcattagcaacatccaaatgcaaaaataatcagcacacatgattatatcccactccttgggattcttgattcaggaagattaagctgtttgttttcaactgttttatattttaaattgccttcactgatatataagctgttactgtacatacaagttaatcctcagtattcacaagcaataacagtcagcagggttgtcctcggagatagctgtgctgagcctcagttggagactgggagcaaagtgtcaagctcattcagagcatccagaataaatgcaagcaataatttccattataattcaattataattcttgtatgcttttgaggtcagagggtaaatgaaatcgtgattttaaaacagcctgaagaaaaaggttttgggaaaggaaatgaggctaatctgtagtcataaaattctgatactttgcggaaattagaagatggtgatagtgcattcttttgtgcccaccccccctctgatggatgttgttagcccaaattacatttttcatatcatggacattgaatagggtttattgaatcaggaaggtaaggggaagaaccgggcacatatgtgttggaatactgtgggtttgacacctggttgaaaacaacttattggacatgatttttaacccaggatatttttttcccaaagcagatctaaattgtttactacccagggttggaaagggcaggcacctctaatctagtctttgtcctctggttgccctctcccacacccctttccacctatacttggttcaagacattttctgaaacgaaaattctgctgttgttcaaactgccattggttatgagaactctgcgtcctttgggatcatctcttagaactccagtgatctatcatatttgctgctacatttgtaaaatgaactttgcctgtattggttgactttaatttacagttctttatttctaggatgttttgtcctctagtttgactcatgtatagaattaggatactttattttaggagtgtaccgtaaaagcacactggtccctttgttgtttttattatttaggtttggaatttgtttgctttttttttgtttgttttttgttttgtttctgtttttgtttttttttaaagttggaaatagaagaatgagaaaaatctataatcaggccaaacttgagaactttcctgtgcttcagcactgtaattctgctgacctaatgttctcaaaagaggcacttttactttctattgtgcatgtatgattgttgttttttgcttttgagggggcttttgtgtttgtaataatgaagcagaagaaaagtgcagtagtagataaatgatcacaacatgttatgcaattttattttataaaattttaaggggaaaagtttaactctttgtaaatcatttcttagctctggtaaaatgcttatattactcctctaaaacatgctcaattcaggcctttgtctttgttaagtgccttttttctttcttttttcctctcttttgaaactgttgtcacattatcttaaagtacagactgataagtcaggggattcaggaggaagaatctcacacttgtcaacatcatgtcatgctgtgtaaccctcttcctttgctttctatgtatatggatatatgtgtaagatacatacattacatatatataaaactaggagctgctgtaccattgcatcctttccaaacactcccctttccatgtttgcaaaacttctgccttgtttattccattgcttttagttgattaaagtgggtggattagaaaagtatcttttcggccgggtgcggtggctcacgcctgtaatcccagctctttgggaggctgaggcaggtggatcacgaggtcaggagatcgagaccatcctggctaatatggtgaaaccccgtctctactaaaaatacaaaaaattagccaggcgtggtggcaggcgcctgtagtcccagctacttgggaggctgaggcaggagaatgacataaacccgggaggcggaagttgcagtgagctgagatcgcgccactgcactccagcctgggcgacagagcaagactccgtctcaaaaaaagaaaataaaagtatagaaaagtatcttttcacaagaggccaccttcgccctttgaatatctgcttgtagaagttaacaataacaacacacacacacacacacacacacacgtcagttactacaagtaaaataaacttagtgaatcattgactattcttggatataacccacttttctgtgctctttaaacttggcataagtaatataggagacagcattggaataacaagagtaccttgcaagtcacattggtaaggtgcgctagactaaacatgtgacaaggctagcgttagaaccgcagtttggtgtctaagtttagaagcaggttagcaactgtcaacatgaaaaatgtatcatattttcttctggaaaatgatttttgaagaaatcatatagctgcatatctatctgttaaaaggttaataaactcagaagtagaaagacttcagatgctgaggaaaacatataatctatagcattcttgagagattttccatttgctttttatttgctagataattacatttggcttaatctgattttatggttatttagatttctcccttgagcaaaataacataattttcagtatctaagattcatcgattttttgttgaaaacaaatagatgtgacatgttaagggagaccaagttgaaccatccctcagacccagtacaaatatacctagtaagtgcccccctttcaatacattctaattgggaagaagaagagactagtggcttaaaaggagaaagcagaagctcctggtagtgttacctgatagcagaacttaccaggcagttggaattcacgagtgttattcttgaatgactatgtctagggggaatattgtttaaccttcgtgcctcagattacccattagacaattgggtataatcatattcacctacctcccagggatatcagagactttactatttcaaaaatattttgagtttttgtaaaatgtcctatataattaaaaatagtattatcatcttcctgcagaggctaaaaaatgttttccttataatgagtataaaaagcaccctatggtttttaaatttaaaaaaatcactggaattttaatttagatacatatttgttatttaaacattatctttgaggtgggataaaatgtttagtttcaggttaacaagggagagaaataacactaagtttaagtagttttttttagccttttacggtgttactgtgatttttcgtcaaggttgtggagctaaagttagataaagttatgatgcttggttattggagttgataaatgatcctggaagttttaactgtctcacttttccatcttctcagtctaatttccttttattgcttgtttgaggacggatagctaagctttttaactttctaagaatgagtatgatgtctcattcttgcaaatcagagattgtgtactaattccattaactgtaggtgtatccagctctgcactgaaggggtgagcactacacacagtcagctggatactcttgtagccattgcacctttgtaattcatgcttcttcaacccatgaaagaggtggagccatcagctgctcaggttgtaagaaaatgggagacggaaggcaggattcactttctaactgggtcggggtggggaaggtcagggtagaaggaaacatgttttccccagctcccaggaggagacgaagatcattttatcccaccttccatccctgtatattaagtagtactactacatagaattttcccgttatcgtttaaaataatagcaacaggaaaagaaaaatggatgctgcagttttagttggggctaaatgctgagcaacgattgttggagtgtgtgtgtaaatttaaattgtagcacatattcagggtcaggaaagcaaaatgttggggatgaggaaccagtgttaccaggttcaagtgagttagtagaaagcaccaggtccaagcagacaaagcatctggttaatttccagaattggctaaggtccactgaatctctaatgatagggtgtgtgtgtgtgtgtgtgtgtgtgtgtgtgtgtctgtaagtcactttttggatttttgttgctttttccagataaggccttagtagcctctaaatatcaactatgcagataaacatactccttttttttttcacatgtccctgtcttttccattctcagataacaaatgttaagacccaaagaaataaggcataagggtttttgttgaatgtgtgtttgttcttctagggaaaattaacagaagcataaaatagagatactttgtgtgttcatctatcgtaaaatgtgaactctgtattcaaaaactatctacagatgctttcactggtgcaaagctgtagttagtatcatggaatgtctttgggttgttaatgataaaatcatcccagtgttcaattctgagagttttagattatatgacacaatgttcaggtttatagagctgaatgggtgatcaaactctaattaaaaatagctttgaatattaatgttgaattcttctttcttggtttcctttagtcttcattctttattcagagctcttaatcatattgctacactagaatatgaattgtatattaggagtctggggaggaaaggttaaattgtcttttacatcctcttctcactcactctggcaacctatcctgtgtccccatagaactgagaagtaaagccctgtgcaggcctgctttagaagactttacatcccagcagaggattcaggcagggactctcaggattttaatcagactgcctttgaataatgtgatattaaattttatttttctcatagactctcaaagtaccacttgcttgaaagtagctacttgtgatctttaatttccttatattgtgatagttctacttttcagtctttcctgtgtatctccatttcatagtgcgttagtacttaaacttcggacacttttccaaactgttaaacaagtcaggaatgcttttcagaatcgcagtagtattattagggtctctgtgtctaggacttacagtcatcagtggtcatcactgggactagaggtgttcttttttttcctcttctcctttgtattaaaaaatagattttgctactgtataatgcggcatttcatgacttcctcttgttacttttcaaggttattctaaagagatggagatcttcattagaggctatttctcataatagtctgccttgcttattttcatactccccctgaaataagcctacttttgcaaacaggccatatgaatcaaattttatgtttgttcctcacaaaattttctacacattatttgttcccactttgctaataataatataatgattttattgtaaatctgtgttttaaatattttataacagagcactaatggaaacctaataaatacaaacaagataactattacccaagataacatggaaatacttctgtttttgaagttaacaacaccgtctgccctcaaagcacatttaggagtatcaaccaagaccagccagttgacatgtttttctgtgtggcaacctgcccttaaattgtcagatcttaactatcttgtgtttgctgtgcttgcagccataagctttcctccttttttgcttatccctgctgtttgtagggttagtgtgccctctgtcagaaaattgggttttctttactatacctgcaaaattaccaagggttaccccaatattgtctagaggaattaaaaagaacttattctcagttgacaaaagtattactgttatacatagttaattggaaagttggccaactttggtcacctatttttgagtcttggctatgcctttgtaattagttacatataccttctgagaccttcagataatcaatgggcctttccccattagaggtaggttcccagcctacaagtatttcctgtgatccatggcaagcctccagagaaaagattcaagctttgcactgcccttttgttgattgtcattgaaaacttactttatttcagaaagtatcaaaaataccaaattggtctttcagagagtatgtaaatctggggcttgcccttggatttcacttgttaaacaccctcaaacttaaaagaagaaaatagatctccagctggtgaaaattttgtgccccaaataatatattaatccaagtctaccaaggtaactaagtaatggatgttttctctcttttattacaagcaagaaagttcatttgcagttgtaaaaatgattaccgaactccagacctatttgctataactgattggaaataatgattctgatttttagtctgggtaaacacatacttcggtgtgaattttgataagggaaagacttgtttggtagcccaaggaaaaacaggatgtatttatacagtgaatgttcactctgcagaggaacttccctccagttacatcttcctcatacattagccacctccacacttgacatagatgccaacatgtttcaaaaccaatcttgaaggagcctaaagagttgatggtcctctaggtgaaagacaagaattactgtattgcatttgcttatagggaggtgtgtttttgctaacttgaagggatatactgtatttcaaataagtgtgtgacttaatattttgggatttttttttcctcctttaaaaactggacctgaacacaagctttgagttgatgtttgtaataatctcaggacctgaaagattgtagcatttagtgtgtcttaaaaattatgtactgtaccagccatggatttttgtaaatatacctgtctcccttttttgtattttagtaaaaaaaaaaaaaaataaatttaaataaaagggggtggtgatgacatgtgaatgggtgcgggtatgtgtgcgtgtgtgtttgtataaggctcttttgagatgaactggtgcttgtttaatttccagctcaaatcggagcaggaatatggacaaactgctgctactgaaccctgcactgagccgaggtatttccatttggttaactaaacgctagctaccaggaaatgacgcagaagtcacgttcttcttcccactgccatcttgcctttgcattctcagttctacgtgccctttgaactttaatggtaaaacatttcacactttggatggtttgcttgtctctagtttttagaaagctcttatcactccttcctaagaaaaaagaagggcaggtaaatttttttaaccaaaaaaaaatcacacatttcataaaaccctgatgaattttggatatgtgagagggcataaacattcctaaatatggacctgtgaatttagtaaattacccccatgaatatactccttcagtgcagggatttttgtgttttttttttttttttaatttttttgcaacagccttgctcatattccaggtgtagctagcaaacccctgtttttgaagcaagagccttatttgattcagtgtagatgtttcctgtctatcctttgtgacagggccttttaatgagtgttttttctttttgtatatgttacgtgtttgttgttgtattaaataaagaggaatgtacatacta

SEQ ID NO: 196884 - DNA, 2299 bp, Homo sapiens
  Payload ID: 18831
  Gene Name: ubiquilin 1
  Uniprot ID: Q9UMX0
  ENST ID: ENST00000257468
  CDS Start-End: 256-1941
gcggatgtcggtgtgagcgagcggcgcctgaacacacggcggctgccgagcgcctgacccgggcctgcgccagagcctgcaccgagctccggggccccacacccgctacggtggccctgcgcccgttgctactgaggcggcgtgctctgcattcttcgctgtccaggcctgccggctctggtgtctgctggctcctccttgctcgcctgctccctcctgcttgcctgagtcaccgccgccgccgccgccacagccatggccgagagtggtgaaagcggcggtcctccgggctcccaggatagcgccgccggagccgaaggtgctggcgcccccgcggccgctgcctccgcggagcccaaaatcatgaaagtcaccgtgaagaccccgaaggaaaaggaggaattcgccgtgcccgagaatagctccgtccagcagtttaaggaagaaatctctaaacgttttaaatcacatactgaccaacttgtgttgatatttgctggaaaaattttgaaagatcaagataccttgagtcagcatggaattcatgatggacttactgttcaccttgtcattaaaacacaaaacaggcctcaggatcattcagctcagcaaacaaatacagctggaagcaatgttactacatcatcaactcctaatagtaactctacatctggttctgctactagcaacccttttggtttaggtggccttgggggacttgcaggtctgagtagcttgggtttgaatactaccaacttctctgaactacagagtcagatgcagcgacaacttttgtctaaccctgaaatgatggtccagatcatggaaaatccctttgttcagagcatgctctcaaatcctgacctgatgagacagttaattatggccaatccacaaatgcagcagttgatacagagaaatccagaaattagtcatatgttgaataatccagatataatgagacaaacgttggaacttgccaggaatccagcaatgatgcaggagatgatgaggaaccaggaccgagctttgagcaacctagaaagcatcccagggggatataatgctttaaggcgcatgtacacagatattcaggaaccaatgctgagtgctgcacaagagcagtttggtggtaatccatttgcttccttggtgagcaatacatcctctggtgaaggtagtcaaccttcccgtacagaaaatagagatccactacccaatccatgggctccacagacttcccagagttcatcagcttccagcggcactgccagcactgtgggtggcactactggtagtactgccagtggcacttctgggcagagtactactgcgccaaatttggtgcctggagtaggagctagtatgttcaacacaccaggaatgcagagcttgttgcaacaaataactgaaaacccacaactgatgcaaaacatgttgtctgccccctacatgagaagcatgatgcagtcactaagccagaatcctgaccttgctgcacagatgcagaatcctgatacactatcagcaatgtcaaaccctagagcaatgcaggccttgttacagattcagcagggtttacagacattagcaacggaagccccgggcctcatcccagggtttactcctggcttgggggcattaggaagcactggaggctcttcgggaactaatggatctaacgccacacctagtgaaaacacaagtcccacagcaggaaccactgaacctggacatcagcagtttattcagcagatgctgcaggctcttgctggagtaaatcctcagctacagaatccagaagtcagatttcagcaacaactggaacaactcagtgcaatgggatttttgaaccgtgaagcaaacttgcaagctctaatagcaacaggaggtgatatcaatgcagctattgaaaggttactgggctcccagccatcatagcagcatttctgtatcttgaaaaaatgtaatttatttttgataacggctcttaaactttaaaatacctgctttatttcattttgactcttggaattctgtgctgttataaacaaacccaatatgatgcattttaaggtggagtacagtaagatgtgtgggtttttctgtatttttcttttctggaacagtgggaattaaggctactgcatgcatcacttctgcatttattgtaattttttaaaaacatcaccttttatagttgggtgaccagattttgtcctgcatctgtccagtttatttgctttttaaacattagcctatggtagtaatttatgtagaataaaagcattaaaaagaa

SEQ ID NO: 196885 - DNA, 4118 bp, Homo sapiens
  Payload ID: 18831
  Gene Name: ubiquilin 1
  Uniprot ID: Q9UMX0
  ENST ID: ENST00000376395
  CDS Start-End: 525-2294
ggaaactgcgatttagtttttggtgaaaggagtggaaaaaaaccatgaactgacctaccccgccccattttgcttttagtccttcacactggcttcgcctgcactttgggcaatggagcgggaaaggaaaaggcacgcaggctgagctcaaagtcgcgccagccggggatgactcggcgacgccgccaggcgcgttacccggcgtgctccgcgcggcgccggcgaagggacgtgggggaaggggcagggaggaggaagcggtggctgctgcggatgtcggtgtgagcgagcggcgcctgaacacacggcggctgccgagcgcctgacccgggcctgcgccagagcctgcaccgagctccggggccccacacccgctacggtggccctgcgcccgttgctactgaggcggcgtgctctgcattcttcgctgtccaggcctgccggctctggtgtctgctggctcctccttgctcgcctgctccctcctgcttgcctgagtcaccgccgccgccgccgccacagccatggccgagagtggtgaaagcggcggtcctccgggctcccaggatagcgccgccggagccgaaggtgctggcgcccccgcggccgctgcctccgcggagcccaaaatcatgaaagtcaccgtgaagaccccgaaggaaaaggaggaattcgccgtgcccgagaatagctccgtccagcagtttaaggaagaaatctctaaacgttttaaatcacatactgaccaacttgtgttgatatttgctggaaaaattttgaaagatcaagataccttgagtcagcatggaattcatgatggacttactgttcaccttgtcattaaaacacaaaacaggcctcaggatcattcagctcagcaaacaaatacagctggaagcaatgttactacatcatcaactcctaatagtaactctacatctggttctgctactagcaacccttttggtttaggtggccttgggggacttgcaggtctgagtagcttgggtttgaatactaccaacttctctgaactacagagtcagatgcagcgacaacttttgtctaaccctgaaatgatggtccagatcatggaaaatccctttgttcagagcatgctctcaaatcctgacctgatgagacagttaattatggccaatccacaaatgcagcagttgatacagagaaatccagaaattagtcatatgttgaataatccagatataatgagacaaacgttggaacttgccaggaatccagcaatgatgcaggagatgatgaggaaccaggaccgagctttgagcaacctagaaagcatcccagggggatataatgctttaaggcgcatgtacacagatattcaggaaccaatgctgagtgctgcacaagagcagtttggtggtaatccatttgcttccttggtgagcaatacatcctctggtgaaggtagtcaaccttcccgtacagaaaatagagatccactacccaatccatgggctccacagacttcccagagttcatcagcttccagcggcactgccagcactgtgggtggcactactggtagtactgccagtggcacttctgggcagagtactactgcgccaaatttggtgcctggagtaggagctagtatgttcaacacaccaggaatgcagagcttgttgcaacaaataactgaaaacccacaactgatgcaaaacatgttgtctgccccctacatgagaagcatgatgcagtcactaagccagaatcctgaccttgctgcacagatgatgctgaataatcccctatttgctggaaatcctcagcttcaagaacaaatgagacaacagctcccaactttcctccaacaaatgcagaatcctgatacactatcagcaatgtcaaaccctagagcaatgcaggccttgttacagattcagcagggtttacagacattagcaacggaagccccgggcctcatcccagggtttactcctggcttgggggcattaggaagcactggaggctcttcgggaactaatggatctaacgccacacctagtgaaaacacaagtcccacagcaggaaccactgaacctggacatcagcagtttattcagcagatgctgcaggctcttgctggagtaaatcctcagctacagaatccagaagtcagatttcagcaacaactggaacaactcagtgcaatgggatttttgaaccgtgaagcaaacttgcaagctctaatagcaacaggaggtgatatcaatgcagctattgaaaggttactgggctcccagccatcatagcagcatttctgtatcttgaaaaaatgtaatttatttttgataacggctcttaaactttaaaatacctgctttatttcattttgactcttggaattctgtgctgttataaacaaacccaatatgatgcattttaaggtggagtacagtaagatgtgtgggtttttctgtatttttcttttctggaacagtgggaattaaggctactgcatgcatcacttctgcatttattgtaattttttaaaaacatcaccttttatagttgggtgaccagattttgtcctgcatctgtccagtttatttgctttttaaacattagcctatggtagtaatttatgtagaataaaagcattaaaaagaagcaaatcatttgcactctataatttgtggtacagtattgcttattgtgactttggcatgcatttttgcaaacaatgctgtaagatttatactactgataattttgttttatttgtatacaatatagagtatgcacatttgggactgcatttctggaaacatactgcaataggctctctgagcaaaacacctgtaactaaaaaagtgaagataagaaaatactcttaaagctgagtatttcctaattgtatagaatcttacagcatctttgacaaacatctcccagcaaaagtgccggttagtcaggtttgttgaaaatacagtagaaaagctgattctggttatctctttaaggacaattaattgtacagacacataatgtaacattgtctcaacattcattcacagattgactgtaaattaccttaatctttgtgcagactgaaggaacactgtagtataccccaaagtgcatttgcctaggacttctcagcttctcccataggtagtttaacaggcattaaaatttgtaattgaaatgttgctttcactgaaaaagtgtcttgatgtttcagttatttttaatcgccataaaaaaatagaactatcttttgggtttatctgttttctcatgcacaggcaatacacaaatttaaaatgagttgtgagccaattgtttctgaagtgttttggtagttctattaagaaatagttaaatattgtgcttttcagagcctcagagaaagggggacggggtgggggggtggggcagcggaatctgtcctggatggggccagcttaaataatactggcaaccaagattctgttaggatttctgtgcatatagtgtagtaaagaagtatcattcaggggtgaaaaacaaagagccgttttaatgatgttgagtacatttggctgttttatagcctttttcttccctcccccaaagaattctgtttgcctaactcccaaactgttggggtggtacattcctttaggaccaattaaaacataattgagggtcagtgatacatttggctgactctggttcagtattctcttaggtgattatattctctcatgtacagttacaggaaattaaaatgttaaagtaacctaaaatgaattcagaccaataaaatcaagggaaatacaagttgattgcattacttctgtatgttgcttgctattaaaaaggttaagaggccaggttacccaccagtccttgcactgttctgacactttccccaggaggaaaacaagtacaaaggttacggtggaggcataagtagaagagattgttaagaagggtattcatgtgtctttgctctttctgctttatgcctcagtttggtttaaaaacttctgtactggcaaatggtggtattcagtgtgggatagtgtcataactaatttgacaatttattaatcataaaataacaataaatctctagcttttacacttga

SEQ ID NO: 196886 - DNA, 471 bp, Homo sapiens
  Payload ID: 18831
  Gene Name: ubiquilin 1
  ENST ID: ENST00000529923
  CDS Start-End: 1-471
gcggccgctgcctccgcggagcccaaaatcatgaaagtcaccgtgaagaccccgaaggaaaaggaggaattcgccgtgcccgagaatagctccgtccagcagacgttggaacttgccaggaatccagcaatgatgcaggagatgatgaggaaccaggaccgagctttgagcaacctagaaagcatcccagggggatataatgctttaaggcgcatgtacacagatattcaggaaccaatgctgagtgctgcacaagagcagtttggtggtaatccatttgcttccttggtgagcaatacatcctctggtgaaggtagtcaaccttcccgtacagaaaatagagatccactacccaatccatgggctccacagacttcccagagttcatcagcttccagcggcactgccagcactgtgggtggcactactggtagtactgccagtggcacttctgggcagagtactactgcg

SEQ ID NO: 196887 - DNA, 475 bp, Homo sapiens
  Payload ID: 18831
  Gene Name: ubiquilin 1
  ENST ID: ENST00000526134
  CDS Start-End: 1-475
tgcaacaaataactgaaaacccacaactgatgcaaaacatgttgtctgccccctacatgagaagcatgatgcagtcactaagccagaatcctgaccttgctgcacagcttcaagaacaaatgagacaacagctcccaactttcctccaacaaatgcagaatcctgatacactatcagcaatgtcaaaccctagagcaatgcaggccttgttacagattcagcagggtttacagacattagcaacggaagccccgggcctcatcccagggtttactcctggcttgggggcattaggaagcactggaggctcttcgggaactaatggatctaacgccacacctagtgaaaacacaagtcccacagcaggaaccactgaacctggacatcagcagtttattcagcagatgctgcaggctcttgctggagtaaatcctcagctacagaatccagaagtcagatttcagcaacaactgga

SEQ ID NO: 196888 - DNA, 4230 bp, Homo sapiens
  Payload ID: 18832
  Gene Name: ubiquilin 2
  Uniprot ID: Q9UHD9
  ENST ID: ENST00000338222
  CDS Start-End: 236-2110
cggaggaggcccagagaccggagcgcggagacctcagccagcggcctacgcccaggcctttctccaccggaggaccagggaaccgcagtcttcatcacagaggtaccgtgctccgcgctccccgcctgacccggcccagcccgctgcggcggtgcctccttccttcctccttccctcgcgctctctctttcgcccgcccgcgccttccctgcccgcctgcgtcaccgcggccgccatggctgagaatggcgagagcagcggccccccgcgcccctcccgcggccctgctgcggcccaaggctcggctgctgccccggctgagcctaaaatcatcaaagtcacggtgaagactcccaaagagaaagaggagttcgcggtgcccgagaacagctcggttcagcagtttaaggaagcgatttcgaaacgcttcaaatcccaaaccgatcagctagtgctgatttttgccggaaaaatcttaaaagatcaagataccttgatccagcatggcatccatgatgggctgactgttcaccttgtcatcaaaagccagaaccgacctcagggccagtccacgcagcctagcaatgccgcgggaactaacactacctcggcgtcgactcccaggagtaactccacacctatttccacaaatagcaacccgtttgggttggggagcctgggaggacttgcaggccttagcagcctgggcttgagctcgaccaacttctctgagctccagagccagatgcagcagcagcttatggccagccctgagatgatgatccaaataatggaaaatccctttgttcagagcatgctttcgaatcccgatctgatgaggcagctcattatggctaatccacagatgcagcaattgattcagagaaacccagaaatcagtcacctgctcaacaacccagacataatgaggcagacactcgaaattgccaggaatccagccatgatgcaagagatgatgagaaatcaagacctggctcttagcaatctagaaagcatcccaggtggctataatgctttacggcgcatgtacactgacattcaagagccgatgctgaatgccgcacaagagcagtttgggggtaatccatttgcctccgtggggagtagttcctcctctggggaaggtacgcagccttcccgcacagaaaatcgcgatccactacccaatccatgggcaccaccgccagctacccagagttctgcaactaccagcacgaccacaagcactggtagtgggtctggcaatagttccagcaatgctactgggaacaccgttgctgccgctaattatgtcgccagcatctttagtaccccaggcatgcagagcctgctgcaacagataactgaaaacccccagctgattcagaatatgctgtcggcgccctacatgagaagcatgatgcagtcgctgagccagaatccagatttggctgcacagatgatgctgaatagcccgctgtttactgcaaatcctcagctgcaggagcagatgcggccacagctcccagccttcctgcagcagatgcagaatccagacacactatcagccatgtcaaacccaagagcaatgcaggctttaatgcagatccagcaggggctacagacattagccactgaagcacctggcctgattccgagcttcactccaggtgtgggggtgggggtgctgggaaccgctataggccctgtaggcccagtcacccccataggccccataggccctatagtcccttttacccccataggccccattgggcccataggacccactggccctgcagccccccctggctccaccggctctggtggccccacggggcctactgtgtccagcgctgcacctagtgaaaccacgagtcctacatcagaatctggacccaaccagcagttcattcagcaaatggtgcaggccctggctggagcaaatgctccacagctgccgaatccagaagtcagatttcagcaacaactggaacagctcaacgcaatggggttcttaaaccgtgaagcaaacttgcaggccctaatagcaacaggaggcgacatcaatgcagccattgaaaggctgctgggctcccagccatcgtaatcacatttctgtacctggaaaaaaaatgtatcttatttttgataatggctcttaaatctttaaacacacacacaaaatcgttctttactttcattttgattcttttaaatctgtctagttgtaagtctaatatgatgcattttaagatggagtccctccctcctacttccctcactccctttctcctttgcttatttttcctaccttcccttcctcttgtctccccactccctccctctttgtttccttccttccttatttcctttagtttccttccttagccgttttgagtggtgggaatcaatgctgtttcactcaaaagtgttgcatgcaaacacttctctttattctgcatttattgtgatttttggaaacaggtatcaaccttcacagttgggtgaacaagtgttgtcctacagatgtccaatttatttgcatttttaaacattagcctatgatagtaatttaatgtagaatgaagatattaaaaacagaagcaaattatttgaagctctctaatttgtggtacgatattgcttattgtgactttggcatgtatttttgctagcaaaatgctgtaagatttataccattgatcttttttgctatatttgtatacagtacagtaagcacaattggcactgtacatctaaaaatattacagtagaatctgagtgtaatatgtgtaaccaaaatgagaaagaatacaagaaatgtttctggagctagttatgtctcacaattttgtagaatcttacagcatctttgataaacttctcagtgaaaatgttggctaggcaagttcagttaaaatatagtagaaatgtttatcctggtatctctaagtatacatttaattgtacagaaaatttacagtgtaacattgtgtcaacatttgcagattgactgtatatgaccttaatctttgtgcagcctgaaggatcagtgtagtaatgccaggaaagtgctttttacctaagacttccttctcagcttctcccataaagagaccctaatatgcattttgatttgtaattggaaatgtaactttcactgaaagtgtcatgtgatgtttgcattacttttaactgctatgtataaaggaaagtgtgtcttttgacttcatcagttatttctcttgtgcacagagaaaaatgcattaaaaatgactaaaaaaaataaaaaattaaaaaatggataaatcttttctttttgccttttggccctaggatcgtgtttaggaggattatcccaccccgagattatataaatcttatcctatatttctctaacttatatggttttatttagaaaatgttttgtcctgtctggaattatcttgatgtatggatttaggtattctaacttttttgccccaaagggttagccagttgttaacatatttaccttttcccccaacatatgaaatgtcatacatgtatatactttattctgtgtttggattccctttagttccattgaacattgtggcaccagtacaccagcctgtagatgagttagaaatgggactttgtatcttttaatgtgagacctcctcttgatcttttttattttttacaatattctgacgattctgacatgtttattttaccagatgaattttacagttaatagattcttcccccaaaaatatattgagaatttggttgggattctcttaaattgatatgactgtgaggactacagaattgcattgctttccagaaacatgttgccttgtttctgaaaaactttatatatccttcaagagagttttacttaaatcctatataatttgtaataaatatgttcctaggtaatacagacatacagggaacacgttgatactgcttattggagcttttaatatgttacctatgtggtcatttttgctatataggagaagaatttatttgcatcgattattttaaattggcaatttattgaaatctattaattttagagatattcatttgatccttttgagtttttccaggtgagaaatcctatcaattatgttataattatatgttttccttttcaaaatttataacataatttctgactgcatgggttaaacattttcataacagtgctaaataataaaggtggcagtggca

SEQ ID NO: 196889 - DNA, 2407 bp, Homo sapiens
  Payload ID: 18833
  Gene Name: ubiquilin 3
  Uniprot ID: Q9H347
  ENST ID: ENST00000311659
  CDS Start-End: 149-2116
agggacctgatagtgcgggttctggcccagaaggcctcaggggtggctgtgtagcaagatgagggaggtttggagccctgcataaagagaaggacgggaccacagctgactgctgtgtccccacagatctgggcctcctgctgccaccatggccaaaggtggagaagccctgccacagggcagcccagcaccagtccaggatccccacctcatcaaggtgacagtgaagacgcccaaagacaaggaggatttctcagttacagacacatgcactatccagcagctgaaggaagagatatctcagcgctttaaggcccaccccgatcagcttgttctaatctttgctggcaaaatcctcaaggatcctgactcactggcacagtgtggagtgcgagatggcctcactgtccacctggtcatcaagaggcagcaccgtgccatgggcaatgagtgcccagctgcctctgtccctacccagggcccaagtcctggatcactccctcagccaagctccatttacccagcagatgggccccctgcctttagcttaggtctcctcacaggcctcagtaggctgggcttggcctatcgtggcttccctgaccagccaagctccctgatgcggcagcatgtgtctgtgcctgagtttgtgactcagctcattgatgaccccttcatcccgggtctgctgtccaacacaggcctagtacgccagctggttcttgacaacccccatatgcagcagctgatccagcacaaccctgagattgggcatattcttaacaacccggaaattatgcggcagacactggagtttttacgtaaccctgccatgatgcaggagatgatacgtagccaggaccgggtgctcagtaacttggagagcattcctggtggctacaatgtgctttgcactatgtacacagatattatggacccaatgcttaacgcagtccaggagcagtttggcggcaatccctttgccactgccactactgataatgccaccaccaccaccagccaaccttcaaggatggagaattgtgaccctctccccaacccctggacttccacacatggaggctcaggtagcaggcaaggaaggcaggatggggatcaggatgcacctgacattagaaataggtttccaaactttctgggtattataaggctctatgactatctccagcaattacacgagaacccccagtccctaggaacttatctacaggggactgcatctgccctcagccaaagccaggaaccaccaccatcagtaaacagagttcccccatcgtcaccctcatctcaggagcctgggtcaggccagcctctccccgaggagtcagtagcaatcaagggaaggtcctcctgcccagctttcctgagataccccacagagaacagtactggacaaggtggagaccaagatggtgcagggaaaagctctactggacatagcacaaacttgcctgatcttgtctcggggctgggagattctgccaacagggttccatttgctcccttatctttttcccccacggcagccattcctggaatccctgagcctccctggctgccatccccggcttatccaagatctctgaggccagatggcatgaatccagctccacagttacaggatgagatacaaccacagctgccactgctgatgcaccttcaggcagccatggcaaacccccgtgccctgcaagccctgcggcagattgagcagggtctacaggtcctagctactgaagcacctcgcctcctactctggttcatgccttgcctagcagggacgggtagtgtggcaggaggtatagagtctagagaagatccccttatgtctgaggatcctctcccaaatccacctcctgaggtgttcccagcactggactctgcagagctgggcttcctttcccctccctttctccatatgctgcaagatttagttagtacaaatccccagcagctgcagcctgaggctcactttcaggtgcagctggagcaactgcggtccatgggctttctgaatcgtgaagccaatcttcaggccctcattgctacggggggcgacgtggatgctgctgtggagaagctgagacagtcgtaggagccttattcattcaaaccatacgttttcctctgtgcctttttcccatatcctagttccctagctctcccatttttgaatacagctgcattataaaccaaatttactatgaagtcctttgctgtggaggcaatgttgttccagagtcaacgaggaagactaatggccaaaacatagtggaggtgctgtgtgtgagtcaaccacttgtaccactataccactggggggccccagtctaagctctgcttatgcctatcttgagatgcaattacacccaatttccaatgtgaa

SEQ ID NO: 196890 - DNA, 817 bp, Homo sapiens
  Payload ID: 18833
  Gene Name: ubiquilin 3
  ENST ID: ENST00000445998
  CDS Start-End: 155-817
cagaaggcctcaggggtggctgtgtagcaagatgagggaggtttggagccctgcataaagagaaggacgggaccacagctgactggatgatcttggtctccaatccccatgcccctagctgtgtccccacagatctgggcctcctgctgccaccatggccaaaggtggagaagccctgccacagggcagcccagcaccagtccaggatccccacctcatcaaggtgacagtgaagacgcccaaagacaaggaggatttctcagttacagacacatgcactatccagcagctgaaggaagagatatctcagcgctttaaggcccaccccgatcagcttgttctaatctttgctggcaaaatcctcaaggatcctgactcactggcacagtgtggagtgcgagatggcctcactgtccacctggtcatcaagaggcagcaccgtgccatgggcaatgagtgcccagctgcctctgtccctacccagggcccaagtcctggatcactccctcagccaagctccatttacccagcagatgggccccctgcctttagcttaggtctcctcacaggcctcagtaggctgggcttggcctatcgtggcttccctgaccagccaagctccctgatgcggcagcatgtgtctgtgcctgagtttgtgactcagctcattgatgaccccttcatcccgggtctgctgtccaacacaggcctagtacgccagctggttcttgacaacccccatatgcagcagctgatccagcacaaccctgagattgggcatattcttaacaacccggaaattatgcggcagacactg

SEQ ID NO: 196891 - DNA, 3576 bp, Homo sapiens
  Payload ID: 18834
  Gene Name: ubiquilin 4
  Uniprot ID: Q9NRR5
  ENST ID: ENST00000368309
  CDS Start-End: 94-1899
gttggaggcgcagaagccgagccgggccggccgggcgggcggggaggaggaggagccgggcgggctggcgggcggccgggtggcggcggcggcatggcggagccgagcggggccgagacgaggccccccattcgggtcaccgtcaagacccccaaggacaaggaggaaattgtgatctgcgatcgagcctcggtcaaggagttcaaagaggaaatctcccggaggtttaaggctcagcaggatcagctggtcctgatcttcgcaggcaagatcctcaaggatggggacacactgaaccagcacggaatcaaggacgggctcactgtccatctggtcatcaagacccctcagaaggctcaagatccagctgctgccactgcttcttccccctccacacctgaccctgcctcagcaccctccaccacgcctgcttcacccgccacccctgcccagccctccacctctggcagtgcctcttcagatgctggcagtggaagccggaggagcagtggtggggggccctctccgggggctggggagggatcccccagtgctactgcgtccatactctctggctttgggggcatcctggggctgggcagcctaggcctgggctctgccaacttcatggagctgcagcagcagatgcagcggcagctgatgtccaatcctgagatgctgtcacagatcatggagaaccccctggtccaggatatgatgtctaaccctgatctgatgcgtcacatgattatggccaacccccagatgcagcagttgatggagcggaaccctgagatcagccacatgctcaataaccctgaactcatgaggcagacaatggagcttgctcggaatccagccatgatgcaagagatgatgcggaaccaggaccgggccctgagcaaccttgagagcatccctggagggtataatgccctccgccgcatgtacacggacatccaggagcccatgttcagtgctgcccgggaacagtttggcaacaatcccttctcttccctggccgggaactccgacagctcatcctcccagcctctgcggactgagaatcgagagcccctccctaacccctggagcccctcgccccccacctcccaggcccccgggtccggtggggagggcaccggaggatcggggaccagccaggtgcacccgacagtctcgaacccctttgggatcaatgcggctagcctggggtcagggatgttcaatagcccagaaatgcaagccctcctccagcagatctctgagaacccccagctgatgcagaatgtgatctcagcaccctacatgcgcagcatgatgcagacgcttgcccagaaccccgactttgctgctcagatgatggtgaatgtgccgctcttcgcggggaacccccaactgcaggagcagctccgcctgcagctcccagtcttcctgcagcagatgcagaacccagagtcactctccatccttaccaatccccgagccatgcaggcattgctgcagatccagcagggactacagaccttgcagaccgaggcccctgggctggtacccagccttggctcctttgggatatcccggaccccagcaccctcagcaggcagcaacgcagggtctacgcccgaggcccccacttcctcaccagccacgccagccacatcttctccaacaggggcttccagcgcccagcagcaactcatgcagcagatgatccagcttttggctggaagtggaaactcacaggtgcagacgccagaagtgagatttcagcagcagctggagcagctcaactccatgggcttcatcaatcgtgaggctaacctgcaggccctgattgccacaggaggggacatcaacgcagctatcgagagactgctgggctcccagctctcctaatccctcggcccatgcctcctgcctctcccctccctcgatgtcagcattcggttcttctgtcaatccttaccctctgcagcttgtcctcccttccgtcttctccctcatcctttccaaacagcagggtgactttagaggcatgggctccaaccccttagctctgtctgagaattatggttttactgctacgtctctaacagactcttctctcctggtctccttgagcagtgctacttaaacagttttcacagtttcattgattgactctacctccttgccccacaccacttttgcaatctttaaactttcagtggctgtgcagagtcgagggaggaaccagctctctggtttactggaacatagtcttccatctataccactagggttttgtcttatgtttacttttggtaactctcttccttctttttctccctaccccccaacccctagcccaaccaatgctagaatttcttgctctgaaggaggagcaggtgaaacaggtggtaattttccttctcggcccctattctggttcattcagcactttttggtgggaactgttggaaattccagggtaaggaggaagatgcctgttctccctgtctgaagagggagatgagacagctctctggacaggaattaacaaacgctggagcagcccagaggaaattcgtgtgaaagaggagggaatgagattattcggaggaagggaatgggggagacagcctgagtaaaaggcttggaagttggaattaacagtggggagcagaagcactcatagctcttttaggcagaagaatccaggcccgagctggcagaagagacttagagatgctaatggaatttaaactgaaaaaaggagcccaatgaagctaagcgccacgccccacaaggggtcatattggctttagttcctcaagcatatgtgcttatatgcacacacacacacatttccatggacccaggtcttgcttgtgtccccaggcaccagtagtttgagcccccctcaaaagacatgaagggggttggggtctgtgtgagtagtggggaggtgcatgtgtatccacatgtgtgcatacactcttaagttgggtgggaagtggattccttgttggtttctggttcagagtgctctcccaccaccagagacaagtgggtaaaaaggtcagtccattgcaggaatatatatccgggagagctaggtcccttggggctctggatgctgggtaacccagaggtaatgtgggtaccctttctgaagctgtcagggctgtgactagcacccttatcacccctcactgccttgtgggaatagtagagggtttttttcctccagagcccctggcctttcagttcttaactatttccctccaggccagaaagttttctttgaggaaggagaggagagggtggcaatgatgcctttgatctggaattggacatttctctgtcagagcacagaggaggctcatatcacctcttccctctcctacttggcccagctgcttggaggaccgaccccatggctgagaatatgacggcaagaggaacagagtttgctccaagtgggaaagggtcccaagcagtccagagaagatgtctgtgtggctttccctccctgcctcccccagctcccacactggcctttgtaaataaatggcgtggtctttgttgtga

SEQ ID NO: 196892 - DNA, 2313 bp, Homo sapiens
  Payload ID: 18835
  Gene Name: ubiquilin-like
  Uniprot ID: Q8IYU4
  ENST ID: ENST00000380184
  CDS Start-End: 265-1692
cactttgtccaccatgggtgaattatgaatcagtagctatgccaggcctcagctgggccacatctggagaactggggtgagggcacaacatcacaaaatatctggccccagtctggtcactcatcccttttagggcaacaaggaaactatcctgtggcctgagagcacaatacctgagacaaaggccagcagaaacatttgtctgccctcaccctttctgccccagcttccacctgctccccatctgcccacccactaaagcccatgtggcatgccatctctcgaacatccaggatgtcccagagtggatgtccatcaggtctgctggcagacaaaaatatctcttcaagtgccactcgagtgatagtgaagactgcaggcaaccagaaagactttatggtagctgatgacatctcggtaaggcagttcaaggagatgctattggctcacttccaatgccagatggaccaactagtgctggtcttcatgggttgccttctcaaagaccatgacacactgagccagaggggcatcatggatggccacaccatctacttggtcatcaagtccaagcagggctccagatctctagcccattccttccgggacctgccaacgaatgatccctgccaccgggacagaaacaccaaaggaaacagcagcagagtgcaccaaccaactggtatgaatcaagctccagtggaactggcccactttgtggggtctgatgcacccaaagtgcatacccaaaacttggaagtgagccacccagagtgcaaagcacagatgctggagaatcctagcatccagcggcttctgtccaacatggagttcatgtggcagttcatttcagaacatctagacacgcaacaattgatgcagcagaacccagaagtttcccgccttcttcttgataattctgagatcctattgcagactctggagctggccaggaaccttgctatgatccaagagataatgcagatccaacaaccttcacaaaaccttgagtatccactgaacccacagccatatctgggcttagagacaatgccaggtgggaataatgccctgggtcagaactatgctgatatcaatgatcaaatgctgaacagcatgcaagatccttttggaggaaaccctttcacagctctcctggcaggacaagtgctagaacaagtccagtcttcacccccacctccaccaccatcacaggaacaacaagaccagctcacacagcatcctgcaacccgagtcatctataatagctctggtggtttctcttcaaacacctcagccaatgacacccttaacaaggtcaaccacacttccaaagccaacactgctatgatttccaccaagggccagagccatatctgtgccactcggcagccagcttggataccagccttacctagcatagagcttacccagcagcttcaagaagaatacaaggatgccactgtttctctaagtagctccagacagacattaaagggtgatctccagctgtcagatgagcagagcagctcccagatcacaggaggcatgatgcagttgcttatgaacaacccctacctggcagctcagattatgttgttcacaagtatgccccagctgagtgaacagtggaggcagcagctgcccacattcctgcagcagacacagatttctgatctgcttagtgcttaggcaaccctaaagcattccaagcaatattgcagattgagcaggccctccagctgctggccacagaggctcctgttcttctgccttgggttgcaccctacctatggggcctgggttggcttcctgcccccagctgcagctatcctgacacagtgccctgttcctggaatgtttcagatacagctgagcccaagggacctgagtgctgccacaagcctggaacagtcctgcagaggctacaatccccggatggggacccttcccaccctctgcaagctcctgagatttgttttagcaaacagatggattctctccaggccatgggatttgggaaccaccatgccaatctacaggcactcattgctactgaaggggacaccaatgctgctatccgcaagctcaagagatcccagagattctaaccaccatgcctacttgtttgcttgctacctgcctgctgacccacctgaccatctcatttgccttttgcacctttcctgatgcttccagccaggagaagtcctggaataagagttatcaaccaatgtgtcttgtactgaataatagatcattggtcgtggctgaaacatctgtcaataaaatggctacactcacttgctgcga

SEQ ID NO: 196893 - DNA, 5575 bp, Homo sapiens
  Payload ID: 18836
  Gene Name: ubiquinol-cytochrome c reductase binding protein
  Uniprot ID: P14927
  ENST ID: ENST00000287022
  CDS Start-End: 105-440
agcggcctttctctgttcgcgatgtgacgtaacgcgcctgcggactgggcccagcttgtcctctatgacttacccagaaggcaacgcttctctttctggtcaaaatggctggtaagcaggccgtttcagcatcaggcaagtggctggatggtattcgaaaatggtattacaatgctgcaggattcaataaactggggttaatgcgagatgatacaatatacgaggatgaagatgtaaaagaagccataagaagacttcctgagaacctttataatgacaggatgtttcgcattaagagggcactggacctgaacttgaagcatcagatcttgcctaaagagcagtggaccaaatatgaagaggaaaatttctaccttgaaccgtatctgaaagaggttattcgggaaagaaaagaaagagaagaatgggcaaagaagtaatcatgtagttgaagtctgtggatgcagctgttatgaagatggttaaacttgaaacaaacaattttaagaattatttggtctgaagatgttttactttaaataaatgtctattgtaatggctggagtttttgaattccaaaccttatactgaataactactgaatccctttactgttaaatttttttccaaactttcaagatatatttagttgtgtttaactgctacttggagctcagaagccactttatcagttttcctcactggttggatagcctatcagtttatggaaggatataacttccgtaagttacatccttatggaagctactgaataaaagaagggggtatgcaccccctagtttgccaagattgagaaatagcctcttcactggtatgcaaacagatttgattttgcatcctatcatttaaaaagaaattatgtctgcaccccaacataggcatacttaagtaatatacatactcctgtgctaacatgtatactagaaaacaaaaagatgttagaaaaataaaagtataaagacaaatcatactgtccccatatcccagtgacttttccactttggaaatgattgttatgaagtttaagggttggatactagtcagttaaaagttttaagattatagggtaatttttaaaaatataaattagaatcattggcaaggcatggtggctcatgcctgtaatcccagcactttgggaggccgaggcgggcgggtcacctgaagtcaggaatttgagaccagcctggccaacatggtgaaaccctgtctctactaaaaatacaaaaaattagctaggcgtgatggtaggcacctgtaatcccagctactcgggaggctgagggaggagaattgcttgaccccaggaggtggaggttgcagtgagcctagatcacaccactgcacttcagcctgagcgacattgactgtctcaaaaaaaaaattaggattattcaatgttgtcatcatttccactcctaaattctgaaatgctttctttggtagaggtgagagtgtggagccacagctagtagagaaggaacagtaggacctgcagcctccctggttttccaggacaagtcattgctgtgtgtggcaggaatgccttacctcaaataacaaaacagtgtgaaaaacgaatttgtgttacatttaaagtttgtaaagcaatgagaaatgtgtgtatcataaagagcatctttaaatttttgctaaaatattagcctcttaaattctctaggaaccccctcccccgcttttttttttcctttcgctggtcgttatttttctaaacctatcctgaaatcatgtcaattttcttttgtatggttgaagacaactagatcacttgataatggttttgctcaggtcacattgtgacaaggttttaatgtagtcctactttgcagaaggaggccaagaagatgggctgtctagaaccccctttaaaagcatttgtctattcagaaaattttcctgagtagatctctgcaaaggctcttttaatagtgatttcaagatcacgtttgcaggactctggtctattcgttcagacgtctactgtgcacaattacaaggagactacaactgaggcatctcaaagagcactgtcaaggtgtgtagggagccgggtgggtggagggaggctgggctctgaccctagaaaccatgcttatgaatgctgttaatgtttaaagcaagcctaagggcactgctgaaggacaggggaacaaatagaactgaccaagactgaggtataacaggaacccccaggctatccacctgctcaaggtaaagtgtggtattacataaggcaacctctgattttgtaagagttcttcctaaagccaaagtgtatgcctattctatgtttccagattacttcattcttctaaatgagaacaagtgtgcaaaagttctttgaacactagatcaatgttttgtgttcattataaattatggttatcgtcctgcttgttatgaagactaagaaagtagatctagtatttggctcacacaggtgaatgggtgagaatttgttaatccatcagtgaagtcctttcatttgaaagagagggcctttctattatcaaaagccgtcctgtgtggaaaatcaccatgagagtgcctgaaacacaggcactctgcattgtcctgtagaccaaatctacattgtcctgtagtctggtctacattgtcctgtagaccgaatggtagagtgattcagagctaattctgggttagactgcacaggtctgaatctatttgctcactgtgtagtgctttaggaatacaatttaacctctccgtgcttcagtttgtttgtccctaagatagagctaatgatagaaacctacttcacccagttgtgaaaattaactgactgcatgtcaagcactaacagtttctggcatatagtatgcataatgtaaattatgtgctgagaagcgagaaagaataacttgggaaaacgctgaatatcatcaatgtcgaatagctaaccagtagctaaggtccaaggtctcctctcttccttctatgtggcactcttgtttctggttcatctactccccttgggtgtcacctccttgagtgaagtacctgctggagatgagaagagtggaactggatctgcatgacagctttgattaggatggagctaagacttggctatctccctgttttgtgttttggatgggtgacattttaaaactgccaatattcaaatcctgctaatttgctttgtacagtttaaaatgtttgatatcttttgttgtttaaagtttgagattggttttgaatatacagttttcctacatcttgaagaaagttatgtttgtttactctgaagtggtctatgttctgtttgtttgttttactatactttgcaaaaaaacagatggctggcttatgttcactgttgtagtgcactacctagtatcacttggccttcctgttgtcaagatgtaggaagcagcgtaagggatgtcgggccttcagacccccaattgccagctgtggtcctagttccagattgcatggaaatatttgataacattcctgcactgagttatcatggtctgaatatttatgtgacgctctacgagtggtaccaaaatgttagtgatggagtttttactaatggcaccttttcctgtttttaaattctagaatcttaataaatccaaagtgtacattttggtagtgatttcatttagttatttactttaaggactcccttttcaagcattaactctgcactaattttgacttatgaaaagattcagcagtaagaataaaaactgggccaaagcccaaagtaataatccttcacaaataggatggagttttaaaaatatgggcatcctgtgtgtagctttgaaaataaccaaactacttggaattaaaaagttaggtgaacatgaagattgtcataaccaaatccttgacagcttgatggatgaagagcagatgggtttatggtgtatgggaggaagcatggattttaggagggacagtatcagagagggatggttagaaagtgagtaagacaggttgctctttggaaaacaaggaaaatccctttattagaacaaggcatgaaattctgccactaggtggcgatgccctataactttacaacttagtgtacatcacacgagcactatggaagatttctccattctgcgccccaccaactccctcccctccttcatttttcaggatgacaacaccttagaggtttatggccatcaggagaatttactactaagctatatactgatgtaatgaaatctaatatatgttgtgcaatgaattatgagatgttatttagtttcaggattttattacttcaatcagttatgaccatatttccttttatatgattgctcactctttaaacataccagatgactgtataaggaacacctaataaagtctatagatgttaaaatattttaaatgttttaatttatatgccataatttgtttacattctggttatactggcgttcatattaaaagccataacatgttagaatctgagatctcaggtcggatagtgcctctaagttatattttgctaagaaattttattgtattagcaattgagcaagaaagaagaactgaatcattatacggtggttaatttttagcatagatgtcagaaagcctgttaatattccagaggcttatgataaactatttaaattgtcattctggattctgattatatctcctacaaagaaagagtgtattatttattgaactttttgtttgaatacatgtgcctatttttgcataaatgtaaaaatgtaattttaaaataaacccctgaaaacttctggtaacattatccagttgaataattgttctgttagtattctaaatattttaagaaaattgtatacatatctgtgacaattgtattcacaagccaaaccaaaaaaagataattatttgttttacaaaggagtcagcttacaatttttctcttatgcatgcatttaaaatgtggtttgccattaaactggaaacactgatctgaggccaatgatttaggcaagtcattagtctaaagattggcttcctcagctagaaaatgaagggctttgactaaaaagtctttttcatttcagtaccaaaacattctgggtctgtgatttaacttacgctctttattgttgggatgaactaatactgatggaatactagctttgtactaggcactgttcgtatgttgtctcttttaatcctccctgcaaccttctggcatggctattataatgcccattgtatggaagaagaaattaggcttcgaaagtccattttatgcttgttcattacataattttctggattttttaaattgatgtatgtgtttatgttccaggctaggcagaagctaggaagaatatagcagcctcgtcactgttgaaatctggggctagataattctttgttgtgggggcctcctctgtgtgttacaggatatttagcagcatcctggcttctacacgataggtaccagtagcgcctcctgcctccaactgtaacaaccaaaaatgttttgagacattgtctggaaatgttcccctgggggagcagaatt

SEQ ID NO: 196894 - DNA, 982 bp, Homo sapiens
  Payload ID: 18836
  Gene Name: ubiquinol-cytochrome c reductase binding protein
  ENST ID: ENST00000521036
  CDS Start-End: 17-502
tctctttctggtcaaaatggctggtaagcaggccgtttcagcatcaggcaagtggctggatggtattcgaaaatggtattacaatgctgcaggattcaataaactggggttaatgcgagatgatacaatatacgaggatgaagatgtaaaagaagccataagaagacttcctgagaacctttataatgacaggatgtttcgcattaagagggcactggacctgaacttgaagcatcagatcttgcctaaagagcagtggaccaaatatgaagaggtctttgctgttccagctctgcactctgcttcctacttagatgaaaagatcagcccattgagtgtccctccagatcccaagaagagcttctgtgaagcaaactctcaccccttgaactgcattgaaactaggcaaaggcctgtggacattcatttctttttcttcccgaaaagacttccccctcataacctatcaaagcaacttatcacaccatcaccacagatttgacattttaaaaagcagatagttcttaggttgagaatatgttttctaaaattggaaattcaaaagaaaatttctaccttgaaccgtatctgaaagaggttattcgggaaagaaaagaaagagaagaatgggcaaagaagtaatcatgtagttgaagtctgtggatgcagctgttatgaagatggttaaacttgaaacaaacaattttaagaattatttggtctgaagatgttttactttaaataaatgtctattgtaatggctggagtttttgaattccaaaccttatactgaataactactgaatccctttactgttaaatttttttccaaactttcaagatatatttagttgtgtttaactgctacttggagctcagaagccactttatcagttttcctcactggttggatagcctatcagtttatggaaggatataacttccgtaagttacatccttatggaagctactgaataaaaga

SEQ ID NO: 196895 - DNA, 515 bp, Homo sapiens
  Payload ID: 18836
  Gene Name: ubiquinol-cytochrome c reductase binding protein
  ENST ID: ENST00000517523
  CDS Start-End: 70-300
tcaggcaagtggctggatggtattcgaaaatggtattacaatgctgcaggattcaataaactggggttaatgcgagatgatacaatatacgaggatgaagatgtaaaagaagccataagaagacttcctgagaacctttataatgacaggatgtttcgcattaagagggcactggacctgaacttgaagcatcagatcttgcctaaagagcagtggaccaaatatgaagagaagaaaaccacattgagtcttacgtgtgaaatgattcttctgaaattactaagcaagtctctaatatagagagccaggactaaaatccaggaaaatttctaccttgaaccgtatctgaaagaggttattcgggaaagaaaagaaagagaagaatgggcaaagaagtaatcatgtagttgaagtctgtggatgcagctgttatgaagatggttaaacttgaaacaaacaattttaagaattatttggtctgaagatgttttactttaaataaatgtctattgtaa

SEQ ID NO: 196896 - DNA, 595 bp, Homo sapiens
  Payload ID: 18836
  Gene Name: ubiquinol-cytochrome c reductase binding protein
  Uniprot ID: P14927
  ENST ID: ENST00000518406
  CDS Start-End: 10-432
ctggtcaaaatggctggtaagcaggccgtttcagcatcaggcaagtggctggatggtattcgaaaatggtattacaatgctgcaggattcaataaactggggttaatgcgagatgatacaatatacgaggatgaagatgtaaaagaagccataagaagacttcctgagaacctttataatgacaggatgtttcgcattaagagggcactggacctgaacttgaagcatcagatcttgcctaaagagcagtggaccaaatatgaagaggtctttgctgttccagctctgcactctgcttcctacttagatgaaaagatcagcccattgagtgtccctccagatcccaagaagagcttctgtgaagcaaactctcaccccttgaactgcattgaaactaggcaaaggaaaatttctaccttgaaccgtatctgaaagaggttattcgggaaagaaaagaaagagaagaatgggcaaagaagtaatcatgtagttgaagtctgtggatgcagctgttatgaagatggttaaacttgaaacaaacaattttaagaattatttggtctgaagatgttttactttaaataaatgtctattg

SEQ ID NO: 196897 - DNA, 695 bp, Homo sapiens
  Payload ID: 18836
  Gene Name: ubiquinol-cytochrome c reductase binding protein
  ENST ID: ENST00000523920
  CDS Start-End: 17-502
tctctttctggtcaaaatggctggtaagcaggccgtttcagcatcaggcaagtggctggatggtattcgaaaatggtattacaatgctgcaggattcaataaactggggttaatgcgagatgatacaatatacgaggatgaagatgtaaaagaagccataagaagacttcctgagaacctttataatgacaggatgtttcgcattaagagggcactggacctgaacttgaagcatcagatcttgcctaaagagcagtggaccaaatatgaagaggtctttgctgttccagctctgcactctgcttcctacttagatgaaaagatcagcccattgagtgtccctccagatcccaagaagagcttctgtgaagcaaactctcaccccttgaactgcattgaaactaggcaaaggcctgtggacattcatttctttttcttcccgaaaagacttccccctcataacctatcaaagcaacttatcacaccatcaccacagatttgacattttaaaaagcagatagttcttaggttgagaatatgttttctaaaattggaaattcaaaagtaattgcttttttcttgttattgaagacctgttgagtgtttgggatatatcagtacgtgatggtaacatataatatttcattcattctttaggaaaatttctaccttgaaccgtatctgaaagaggttat

SEQ ID NO: 196898 - DNA, 1041 bp, Homo sapiens
  Payload ID: 18836
  Gene Name: ubiquinol-cytochrome c reductase binding protein
  ENST ID: ENST00000517603
  CDS Start-End: 14-94
ctttctggtcaaaatggctggtaagcaggccgatattgaaggagtcttactaaattcaagacactgcttctgtgcgtgtttgggaactacatagaccagatctcaactcccattagctaactctgaccttgggtgggatcacttcttttcagcatcaggcaagtggctggatggtattcgaaaatggtattacaatgctgcaggattcaataaactggggttaatgcgagatgatacaatatacgaggatgaagatgtaaaagaagccataagaagacttcctgagaacctttataatgacaggatgtttcgcattaagagggcactggacctgaacttgaagcatcagatcttgcctaaagagcagtggaccaaatatgaagaggaaaatttctaccttgaaccgtatctgaaagaggttattcgggaaagaaaagaaagagaagaatgggcaaagaagtaatcatgtagttgaagtctgtggatgcagctgttatgaagatggttaaacttgaaacaaacaattttaagaattatttggtctgaagatgttttactttaaataaatgtctattgtaatggctggagtttttgaattccaaaccttatactgaataactactgaatccctttactgttaaatttttttccaaactttcaagatatatttagttgtgtttaactgctacttggagctcagaagccactttatcagttttcctcactggttggatagcctatcagtttatggaaggatataacttccgtaagttacatccttatggaagctactgaataaaagaagggggtatgcaccccctagtttgccaagattgagaaatagcctcttcactggtatgcaaacagatttgattttgcatcctatcatttaaaaagaaattatgtctgcaccccaacataggcatacttaagtaatatacatactcctgtgctaacatgtatactagaaaacaaaaagatgttagaaaaataaaagtataaagacaaatcatactgtccccatatcccagtgacttttcc

SEQ ID NO: 196899 - DNA, 2188 bp, Homo sapiens
  Payload ID: 18837
  Gene Name: ubiquinol-cytochrome c reductase complex assembly factor 1
  Uniprot ID: Q9NVA1
  ENST ID: ENST00000349714
  CDS Start-End: 1-819
atggcgttgctggtgcgagtccttaggaaccagactagcatttctcagtgggttccagtatgcagccgattgatacctgtgtctcctacccaaggacagggggacagggctctgtctcgcacttcccagtggccccagatgagccagtcccgagcatgtggtggatcagaacagattcctggaatagacatacagctgaataggaagtatcacaccacacgtaagctttctactaccaaagattccccacagcctgttgaggagaaggttggtgctttcacaaagataatagaagccatgggattcacgggacctttgaaatacaggtgtcagatgcctgatacattcaattcatggtttcttataaccctactccacgtctggatgtgtctagtccgaatgaagcaggaaggccggagtgggaagtacatgtgtcgtatcatagttcattttatgtgggaggatgttcagcagcgcggcagagtcatgggggttaatccctatatcctgaagaagaacatgatcctcatgacaaatcatttctatgcagcgatcttgggatatgatgaggggatcctttcagatgatcatgggctggccgctgccctctggagaaccttcttcaaccggaaatgtgaagaccctcgacatcttgaattgctggtagagtatgtgaggaaacagatacagtacctggactccatgaacggggaggatctgcttctgacaggggaggtgagctggcgccctctagtggagaagaatcctcagagcatcctgaagccccattctccgacttacaacgacgagggactttgatgggctgggccctccgcacggcccgccagctggcttcgaggaacctccaggagagaagtgcctgttggtccaggaccctgcagaaagtggcctgaactgacctctgaacagcatctgtcaaatacctggccccatttgtgttgagtttcctcttagtgtgcccaggagtctgatctgctggggtacagggctgggagaacccctagctctcccggggtgtcctctcccttaggggaagccccgagtgagagtcccccagcacacactccccaaccccctccagcaactacatgtgactgatagcttttcccaaaggccaaggaagggatggtgtaggttcaaaagggaaaccccccagggcctgctgtggcctaggagcagattgtaatgctgccgagtccggtcggtgaccacgcgttgtccctcggctttcagccatggggttgagttggccattaaaagaaacagagacttctctctgccatggcccttctttattccagggacttagaaacttgcctgagatggtggacgcagtaatgagggcaccgcgcagctcagttagagacggagaaagggaagaggctgggatggtctctgctgctcttgcctctagttcatggagatgtgtctctgttcaggccaagatacagccagccaggcctgtcgtctgggacccaggaggcctctgatgaccaagggctttcacatcctaagtcatttggaaggaggccttgagaacaaagtcacctttgtcactcccagtgaactgaatgaggaacatgctgtctcctgtcttggcctcccctttcatgagatactggggagaagagaacattcctcctggcttagttgtagcagacccagacctgtgcccagctttggtcccccttcccaacttctgaagcacgtgctgcagagccaccttggtctgagcacctgaggaccagcccctcctccctcagtgcgggtcatctcttgggggattttcttaaagtgaagaaagggggtggggaaccatattgcccctccctcccccatcaaacttccttcatttaacttgctataaaatgagtcatataaagaaactctatatgggtgaggtatatcccacttctgtgaaaacattacaaatcaaaccgcttctctcagtttatttaagatgcttttgttgcgagcggagctctagagtgaagcctcctgtgtgtgtgtgagataataacaccttgtaactcattacagctgggcactatttacataaaccagagctgagccaggcaggaatttgctgattaatttatttttaatggagtgaagtataccatgcaccaaaataaactttactgtgtgtacctaactgctcctggaa

SEQ ID NO: 196900 - DNA, 2036 bp, Homo sapiens
  Payload ID: 18837
  Gene Name: ubiquinol-cytochrome c reductase complex assembly factor 1
  ENST ID: ENST00000359226
  CDS Start-End: 8-667
gaggaacatggcgttgctggtgcgagtccttaggaaccagactagcatttctcagtgggttccagtatgcagccgattgatacctgtgtctcctacccaaggacagggggacagggctctgtctcgcacttcccagtggccccagatgagccagtcccgagcatgtggtggatcagaacagattcctggaatagacatacagctgaataggaagtatcacaccacacgtaagctttctactaccaaagattccccacagcctgttgaggagaaggttggtgctttcacaaagataatagaagccatgggattcacgggacctttgaaatacagtaaatgggttaatccctatatcctgaagaagaacatgatcctcatgacaaatcatttctatgcagcgatcttgggatatgatgaggggatcctttcagatgatcatgggctggccgctgccctctggagaaccttcttcaaccggaaatgtgaagaccctcgacatcttgaattgctggtagagtatgtgaggaaacagatacagtacctggactccatgaacggggaggatctgcttctgacaggggaggtgagctggcgccctctagtggagaagaatcctcagagcatcctgaagccccattctccgacttacaacgacgagggactttgatgggctgggccctccgcacggcccgccagctggcttcgaggaacctccaggagagaagtgcctgttggtccaggaccctgcagaaagtggcctgaactgacctctgaacagcatctgtcaaatacctggccccatttgtgttgagtttcctcttagtgtgcccaggagtctgatctgctggggtacagggctgggagaacccctagctctcccggggtgtcctctcccttaggggaagccccgagtgagagtcccccagcacacactccccaaccccctccagcaactacatgtgactgatagcttttcccaaaggccaaggaagggatggtgtaggttcaaaagggaaaccccccagggcctgctgtggcctaggagcagattgtaatgctgccgagtccggtcggtgaccacgcgttgtccctcggctttcagccatggggttgagttggccattaaaagaaacagagacttctctctgccatggcccttctttattccagggacttagaaacttgcctgagatggtggacgcagtaatgagggcaccgcgcagctcagttagagacggagaaagggaagaggctgggatggtctctgctgctcttgcctctagttcatggagatgtgtctctgttcaggccaagatacagccagccaggcctgtcgtctgggacccaggaggcctctgatgaccaagggctttcacatcctaagtcatttggaaggaggccttgagaacaaagtcacctttgtcactcccagtgaactgaatgaggaacatgctgtctcctgtcttggcctcccctttcatgagatactggggagaagagaacattcctcctggcttagttgtagcagacccagacctgtgcccagctttggtcccccttcccaacttctgaagcacgtgctgcagagccaccttggtctgagcacctgaggaccagcccctcctccctcagtgcgggtcatctcttgggggattttcttaaagtgaagaaagggggtggggaaccatattgcccctccctcccccatcaaacttccttcatttaacttgctataaaatgagtcatataaagaaactctatatgggtgaggtatatcccacttctgtgaaaacattacaaatcaaaccgcttctctcagtttatttaagatgcttttgttgcgagcggagctctagagtgaagcctcctgtgtgtgtgtgagataataacaccttgtaactcattacagctgggcactatttacataaaccagagctgagccaggcaggaatttgctgattaatttatttttaatggagtgaagtataccatgcaccaaaataaactttactgtgtgtacctaactgctcctggaa

SEQ ID NO: 196901 - DNA, 2133 bp, Homo sapiens
  Payload ID: 18837
  Gene Name: ubiquinol-cytochrome c reductase complex assembly factor 1
  Uniprot ID: Q9NVA1
  ENST ID: ENST00000374380
  CDS Start-End: 69-764
caaaaggaggacgtagaaaaggggacaccggaaactcactcttcacccggaaatggttattgaggaacatggcgttgctggtgcgagtccttaggaaccagactagcatttctcagtgggttccagtatgcagccgattgatacctgtgtctcctacccaaggacagggggacagggctctgtctcgcacttcccagaagattaagattgcggccctgcgcatgtatactagctgtgtggagaaaactgacttcgaggaattctttctaaggtgtcagatgcctgatacattcaattcatggtttcttataaccctactccacgtctggatgtgtctagtccgaatgaagcaggaaggccggagtgggaagtacatgtgtcgtatcatagttcattttatgtgggaggatgttcagcagcgcggcagagtcatgggggttaatccctatatcctgaagaagaacatgatcctcatgacaaatcatttctatgcagcgatcttgggatatgatgaggggatcctttcagatgatcatgggctggccgctgccctctggagaaccttcttcaaccggaaatgtgaagaccctcgacatcttgaattgctggtagagtatgtgaggaaacagatacagtacctggactccatgaacggggaggatctgcttctgacaggggaggtgagctggcgccctctagtggagaagaatcctcagagcatcctgaagccccattctccgacttacaacgacgagggactttgatgggctgggccctccgcacggcccgccagctggcttcgaggaacctccaggagagaagtgcctgttggtccaggaccctgcagaaagtggcctgaactgacctctgaacagcatctgtcaaatacctggccccatttgtgttgagtttcctcttagtgtgcccaggagtctgatctgctggggtacagggctgggagaacccctagctctcccggggtgtcctctcccttaggggaagccccgagtgagagtcccccagcacacactccccaaccccctccagcaactacatgtgactgatagcttttcccaaaggccaaggaagggatggtgtaggttcaaaagggaaaccccccagggcctgctgtggcctaggagcagattgtaatgctgccgagtccggtcggtgaccacgcgttgtccctcggctttcagccatggggttgagttggccattaaaagaaacagagacttctctctgccatggcccttctttattccagggacttagaaacttgcctgagatggtggacgcagtaatgagggcaccgcgcagctcagttagagacggagaaagggaagaggctgggatggtctctgctgctcttgcctctagttcatggagatgtgtctctgttcaggccaagatacagccagccaggcctgtcgtctgggacccaggaggcctctgatgaccaagggctttcacatcctaagtcatttggaaggaggccttgagaacaaagtcacctttgtcactcccagtgaactgaatgaggaacatgctgtctcctgtcttggcctcccctttcatgagatactggggagaagagaacattcctcctggcttagttgtagcagacccagacctgtgcccagctttggtcccccttcccaacttctgaagcacgtgctgcagagccaccttggtctgagcacctgaggaccagcccctcctccctcagtgcgggtcatctcttgggggattttcttaaagtgaagaaagggggtggggaaccatattgcccctccctcccccatcaaacttccttcatttaacttgctataaaatgagtcatataaagaaactctatatgggtgaggtatatcccacttctgtgaaaacattacaaatcaaaccgcttctctcagtttatttaagatgcttttgttgcgagcggagctctagagtgaagcctcctgtgtgtgtgtgagataataacaccttgtaactcattacagctgggcactatttacataaaccagagctgagccaggcaggaatttgctgattaatttatttttaatggagtgaagtataccatgcaccaaaataaactttactgtgtgtacctaactgctcctggaa

SEQ ID NO: 196902 - DNA, 2201 bp, Homo sapiens
  Payload ID: 18837
  Gene Name: ubiquinol-cytochrome c reductase complex assembly factor 1
  Uniprot ID: Q9NVA1
  ENST ID: ENST00000374384
  CDS Start-End: 11-832
attgaggaacatggcgttgctggtgcgagtccttaggaaccagactagcatttctcagtgggttccagtatgcagccgattgatacctgtgtctcctacccaaggacagggggacagggctctgtctcgcacttcccagtggccccagatgagccagtcccgagcatgtggtggatcagaacagattcctggaatagacatacagctgaataggaagtatcacaccacacgtaagctttctactaccaaagattccccacagcctgttgaggagaaggttggtgctttcacaaagataatagaagccatgggattcacgggacctttgaaatacagtaaatggaagattaagattgcggccctgcgcatgtatactagctgtgtggagaaaactgacttcgaggaattctttctaaggtgtcagatgcctgatacattcaattcatggtttcttataaccctactccacgtctggatgtgtctagtccgaatgaagcaggaaggccggagtgggaagtacatgtgtcgtatcatagttcattttatgtgggaggatgttcagcagcgcggcagagtcatgggggggatcctttcagatgatcatgggctggccgctgccctctggagaaccttcttcaaccggaaatgtgaagaccctcgacatcttgaattgctggtagagtatgtgaggaaacagatacagtacctggactccatgaacggggaggatctgcttctgacaggggaggtgagctggcgccctctagtggagaagaatcctcagagcatcctgaagccccattctccgacttacaacgacgagggactttgatgggctgggccctccgcacggcccgccagctggcttcgaggaacctccaggagagaagtgcctgttggtccaggaccctgcagaaagtggcctgaactgacctctgaacagcatctgtcaaatacctggccccatttgtgttgagtttcctcttagtgtgcccaggagtctgatctgctggggtacagggctgggagaacccctagctctcccggggtgtcctctcccttaggggaagccccgagtgagagtcccccagcacacactccccaaccccctccagcaactacatgtgactgatagcttttcccaaaggccaaggaagggatggtgtaggttcaaaagggaaaccccccagggcctgctgtggcctaggagcagattgtaatgctgccgagtccggtcggtgaccacgcgttgtccctcggctttcagccatggggttgagttggccattaaaagaaacagagacttctctctgccatggcccttctttattccagggacttagaaacttgcctgagatggtggacgcagtaatgagggcaccgcgcagctcagttagagacggagaaagggaagaggctgggatggtctctgctgctcttgcctctagttcatggagatgtgtctctgttcaggccaagatacagccagccaggcctgtcgtctgggacccaggaggcctctgatgaccaagggctttcacatcctaagtcatttggaaggaggccttgagaacaaagtcacctttgtcactcccagtgaactgaatgaggaacatgctgtctcctgtcttggcctcccctttcatgagatactggggagaagagaacattcctcctggcttagttgtagcagacccagacctgtgcccagctttggtcccccttcccaacttctgaagcacgtgctgcagagccaccttggtctgagcacctgaggaccagcccctcctccctcagtgcgggtcatctcttgggggattttcttaaagtgaagaaagggggtggggaaccatattgcccctccctcccccatcaaacttccttcatttaacttgctataaaatgagtcatataaagaaactctatatgggtgaggtatatcccacttctgtgaaaacattacaaatcaaaccgcttctctcagtttatttaagatgcttttgttgcgagcggagctctagagtgaagcctcctgtgtgtgtgtgagataataacaccttgtaactcattacagctgggcactatttacataaaccagagctgagccaggcaggaatttgctgattaatttatttttaatggagtgaagtataccatgcaccaaaataaactttactgtgtgtacctaactgctcctggaa

SEQ ID NO: 196903 - DNA, 2447 bp, Homo sapiens
  Payload ID: 18837
  Gene Name: ubiquinol-cytochrome c reductase complex assembly factor 1
  Uniprot ID: Q9NVA1
  ENST ID: ENST00000374385
  CDS Start-End: 179-1078
cagggagagcgtgcccgggcacgacagcctggtgcacagccgagaaaacaacagcgcgtgcgcgtagcgacctctttgcgcctgcgccccccttgccagtctttcgccggcaaaaggaggacgtagaaaaggggacaccggaaactcactcttcacccggaaatggttattgaggaacatggcgttgctggtgcgagtccttaggaaccagactagcatttctcagtgggttccagtatgcagccgattgatacctgtgtctcctacccaaggacagggggacagggctctgtctcgcacttcccagtggccccagatgagccagtcccgagcatgtggtggatcagaacagattcctggaatagacatacagctgaataggaagtatcacaccacacgtaagctttctactaccaaagattccccacagcctgttgaggagaaggttggtgctttcacaaagataatagaagccatgggattcacgggacctttgaaatacagtaaatggaagattaagattgcggccctgcgcatgtatactagctgtgtggagaaaactgacttcgaggaattctttctaaggtgtcagatgcctgatacattcaattcatggtttcttataaccctactccacgtctggatgtgtctagtccgaatgaagcaggaaggccggagtgggaagtacatgtgtcgtatcatagttcattttatgtgggaggatgttcagcagcgcggcagagtcatgggggttaatccctatatcctgaagaagaacatgatcctcatgacaaatcatttctatgcagcgatcttgggatatgatgaggggatcctttcagatgatcatgggctggccgctgccctctggagaaccttcttcaaccggaaatgtgaagaccctcgacatcttgaattgctggtagagtatgtgaggaaacagatacagtacctggactccatgaacggggaggatctgcttctgacaggggaggtgagctggcgccctctagtggagaagaatcctcagagcatcctgaagccccattctccgacttacaacgacgagggactttgatgggctgggccctccgcacggcccgccagctggcttcgaggaacctccaggagagaagtgcctgttggtccaggaccctgcagaaagtggcctgaactgacctctgaacagcatctgtcaaatacctggccccatttgtgttgagtttcctcttagtgtgcccaggagtctgatctgctggggtacagggctgggagaacccctagctctcccggggtgtcctctcccttaggggaagccccgagtgagagtcccccagcacacactccccaaccccctccagcaactacatgtgactgatagcttttcccaaaggccaaggaagggatggtgtaggttcaaaagggaaaccccccagggcctgctgtggcctaggagcagattgtaatgctgccgagtccggtcggtgaccacgcgttgtccctcggctttcagccatggggttgagttggccattaaaagaaacagagacttctctctgccatggcccttctttattccagggacttagaaacttgcctgagatggtggacgcagtaatgagggcaccgcgcagctcagttagagacggagaaagggaagaggctgggatggtctctgctgctcttgcctctagttcatggagatgtgtctctgttcaggccaagatacagccagccaggcctgtcgtctgggacccaggaggcctctgatgaccaagggctttcacatcctaagtcatttggaaggaggccttgagaacaaagtcacctttgtcactcccagtgaactgaatgaggaacatgctgtctcctgtcttggcctcccctttcatgagatactggggagaagagaacattcctcctggcttagttgtagcagacccagacctgtgcccagctttggtcccccttcccaacttctgaagcacgtgctgcagagccaccttggtctgagcacctgaggaccagcccctcctccctcagtgcgggtcatctcttgggggattttcttaaagtgaagaaagggggtggggaaccatattgcccctccctcccccatcaaacttccttcatttaacttgctataaaatgagtcatataaagaaactctatatgggtgaggtatatcccacttctgtgaaaacattacaaatcaaaccgcttctctcagtttatttaagatgcttttgttgcgagcggagctctagagtgaagcctcctgtgtgtgtgtgagataataacaccttgtaactcattacagctgggcactatttacataaaccagagctgagccaggcaggaatttgctgattaatttatttttaatggagtgaagtataccatgcaccaaaataaactttactgtgtgtacctaactgctcctggaa

SEQ ID NO: 196904 - DNA, 2329 bp, Homo sapiens
  Payload ID: 18837
  Gene Name: ubiquinol-cytochrome c reductase complex assembly factor 1
  ENST ID: ENST00000374394
  CDS Start-End: 11-79
attgaggaacatggcgttgctggtgcgagtccttacggagttttgctcttgttgcgcaagctggagtgcaatggcgtgatcttggctcactgcaacctctgcctcccgggttcaagcgattctcctgcctcagcctcctgagtagctgggattacagaggaaccagactagcatttctcagtgggttccagtatgcagccgattgatacctgtgtctcctacccaaggacagggggacagggctctgtctcgcacttcccagtggccccagatgagccagtcccgagcatgtggtggatcagaacagattcctggaatagacatacagctgaataggaagtatcacaccacacgtaagctttctactaccaaagattccccacagcctgttgaggagaaggttggtgctttcacaaagataatagaagccatgggattcacgggacctttgaaatacagtaaatggggtgtcagatgcctgatacattcaattcatggtttcttataaccctactccacgtctggatgtgtctagtccgaatgaagcaggaaggccggagtgggaagtacatgtgtcgtatcatagttcattttatgtgggaggatgttcagcagcgcggcagagtcatgggggttaatccctatatcctgaagaagaacatgatcctcatgacaaatcatttctatgcagcgatcttgggatatgatgaggggatcctttcagatgatcatgggctggccgctgccctctggagaaccttcttcaaccggaaatgtgaagaccctcgacatcttgaattgctggtagagtatgtgaggaaacagatacagtacctggactccatgaacggggaggatctgcttctgacaggggaggtgagctggcgccctctagtggagaagaatcctcagagcatcctgaagccccattctccgacttacaacgacgagggactttgatgggctgggccctccgcacggcccgccagctggcttcgaggaacctccaggagagaagtgcctgttggtccaggaccctgcagaaagtggcctgaactgacctctgaacagcatctgtcaaatacctggccccatttgtgttgagtttcctcttagtgtgcccaggagtctgatctgctggggtacagggctgggagaacccctagctctcccggggtgtcctctcccttaggggaagccccgagtgagagtcccccagcacacactccccaaccccctccagcaactacatgtgactgatagcttttcccaaaggccaaggaagggatggtgtaggttcaaaagggaaaccccccagggcctgctgtggcctaggagcagattgtaatgctgccgagtccggtcggtgaccacgcgttgtccctcggctttcagccatggggttgagttggccattaaaagaaacagagacttctctctgccatggcccttctttattccagggacttagaaacttgcctgagatggtggacgcagtaatgagggcaccgcgcagctcagttagagacggagaaagggaagaggctgggatggtctctgctgctcttgcctctagttcatggagatgtgtctctgttcaggccaagatacagccagccaggcctgtcgtctgggacccaggaggcctctgatgaccaagggctttcacatcctaagtcatttggaaggaggccttgagaacaaagtcacctttgtcactcccagtgaactgaatgaggaacatgctgtctcctgtcttggcctcccctttcatgagatactggggagaagagaacattcctcctggcttagttgtagcagacccagacctgtgcccagctttggtcccccttcccaacttctgaagcacgtgctgcagagccaccttggtctgagcacctgaggaccagcccctcctccctcagtgcgggtcatctcttgggggattttcttaaagtgaagaaagggggtggggaaccatattgcccctccctcccccatcaaacttccttcatttaacttgctataaaatgagtcatataaagaaactctatatgggtgaggtatatcccacttctgtgaaaacattacaaatcaaaccgcttctctcagtttatttaagatgcttttgttgcgagcggagctctagagtgaagcctcctgtgtgtgtgtgagataataacaccttgtaactcattacagctgggcactatttacataaaccagagctgagccaggcaggaatttgctgattaatttatttttaatggagtgaagtataccatgcaccaaaataaactttactgtgtgtacctaactgctcctggaa

SEQ ID NO: 196905 - DNA, 566 bp, Homo sapiens
  Payload ID: 18837
  Gene Name: ubiquinol-cytochrome c reductase complex assembly factor 1
  ENST ID: ENST00000397553
  CDS Start-End: 11-160
attgaggaacatggcgttgctggtgcgagtccttaggaaccagactagcatttctcagtgggttccagtatgcagccgattgatacctgtgtctcctacccaaggacagggggacagggctctgtctcgcacttcccagacagggtcttgctcttgctgagtcgcccaggttgaagtgcagtggtgtgatgatagctccctgcagcctcgatcttctgggctcaatggccccagatgagccagtcccgagcatgtggtggatcagaacagattcctggaatagacatacagctgaataggaagtatcacaccacacgtaagctttctactaccaaagattccccacagcctgttgaggagaaggttggtgctttcacaaagataatagaagccatgggattcacgggacctttgaaatacagtaaatggaagattaagattgcggccctgcgcatgtatactagctgtgtggagaaaactgacttcgaggaattctttctaaggtgtcagatgcctgatacattcaattcatggtttcttataaccctactccacgtctggatgtg

SEQ ID NO: 196906 - DNA, 3638 bp, Homo sapiens
  Payload ID: 18837
  Gene Name: ubiquinol-cytochrome c reductase complex assembly factor 1
  ENST ID: ENST00000397554
  CDS Start-End: 12-677
tattgaggaacatggcgttgctggtgcgagtccttaggaaccagactagcatttctcagtgggttccagtatgcagccgattgatacctgtgtctcctacccaaggacagggggacagggctctgtctcgcacttcccagtggccccagatgagccagtcccgagcatgtggtggatcagaacagattcctggaatagacatacagctgaataggaagtatcacaccacacgtaagctttctactaccaaagattccccacagcctgttgaggagaaggttggtgctttcacaaagataatagaagccatgggattcacgggacctttgaaatacagtaaatggaagattaagattgcggccctgcgcatgtatactagctgtgtggagaaaactgacttcgaggaattctttctaaggtgtcagatgcctgatacattcaattcatggtttcttataaccctactccacgtctggatgtgtctagtccgaatgaagcaggaaggccggagtgggaagtacatgtgtcgtatcatagttcattttatgtgggaggatgttcagcagcgcggcagagtcatgggggtaagtgagtgctgtcagatgcttgtcctggacaattccagagaagggtttgagtttggagttttatctgttgtaaaatggccctgcttttagatttctgtgaaatgctgcctaatatcaagtggcagttccgctaaagtcactttttctgcctctgtggaaactaatactccacagatactttatgtgtttgtacacattatagtgatttgtcagtgtgaagtcatcctgtatggagatgggattgtaaagcccaaatcgtggtgataggagggatggatttggtgaatggagggaatcaaatgataatccagttaaggatactatacctttgacaccagttcaatatttgaaccagtccttctataaattagttctgatgggaggccctggtatggggcctgcactgtcttcaggaactgaaactcaagctccttgatcactggcaacctagaagagtctggtaagatacctcctgaaaatgtacattagtacatttaataattaacctgagaaaggggaatatattatatatatatatatgtcacatgggatgtaatgacaatagaaaaatgaaaccaaaacactagaatatagctggttatacagatcatagtgtgtccggagttggttccttgtggtgggttcttggtctcgcgacttcaagaatgaagccgcagaccttcgctgtgagtgttacagctcttaaagatggtgtgtccggagtttcttccttccagtgggttcgtggtctcgctgacttcaagaatgaagccgcagaccttcacagcaagtgttaccagctcttaaaggtggtgcggacccaaagagtgagcagcagcaagatttatggtgaagaccgaaagaacaaagcttccacagtgtggaagggggacctgagcgggttgccactgctggctagggtggccagcttttattcccttatttgtccctgcccatgtctgctgattggtccattttacagagtgctgattggtgcgtttttacagagtgctgattggtgcatttacaatcctgtagctagacacagagcgctgattggtgcgtttttacagaatgctgattggtgcatttacaatcctctagctagacacagagcactgattggtgcaagtatccacccgacccagaagcccagctggcttcacctcccactagtatcttcttttgtttatgttgtgtattttgtgtatctagatcacgttttagtagcttgtagttccctgttactgggaagcatttcattgcctcccagcttgggagcatccaaagtagaaccatgactgggtcatgaaatgggttaatttggtttctttcattacagggcaaagttctccctgtggactgagaaataaacatattataaaagttacatatgctcatagaatagaaatcaaagagtaaaaagtattgagtgtaaaaaacaagtgtcttttttccccccagtctaactccccagaagtaaccttttttattttttatgttattttttcttaccttcaaggaaggagaaaagtaaccatttttgagttgatgcgtatccttcgcctgagagctatctttgtaatcatcctttttggttcctttttcattttttgctttctttctgtcgtagctgctgtgtaatatagagaaaaaaagtattttttcagctctctcactcaattacaattacacagaaggtttctgtgacacatttgtgggagtttctccccacacagcaaacaggcagtcaattctggagagaggtcaccaggtgggtgtcctctaacccaattcaattccaacattgtgtactcggagatagtgtcagatcccacaggttgagggctctgcccacaagactgcccccaacttgccacaccaattgcaagctccaggctgttttacctgtgcttctggccaaccgattataaattggggttccccacccctttctttggttcaattaatttgctggagcggctcacagaactcagggaaacacttattacattaccggtttattataaaggatattgcaagggatacagatgaagagatgcataggacaagatgggggaaggggtgaggagattccatacctttcctggtgtgcagctgtccagaaacctccacctgttcagctatctggaagtgccccaaacccagtccttttaagggttttatggaagctgcattatgtaggcacaactgattaaaccactggccattggaaatcagtcagcctctctgccctccttggaggttgggagatgggacagaaagtcctaaccttctaatcctcccttggtttttcagtgaccagcccctaccctgaagctacctaagtgcgccagccaccaatcattagcatacaaaatgacaccactttggaaaggccaaagattttaggagttgtatgccaggaagggagttgaagaccaactatatatttcacaatatcacagctgcccagagtgagatcggcagcctttaaggtattcatccagctgaatgttcccacatgccctcaagtacttaccacccaactctgtagcagtgcacagtggacataaggtggtgttggcagtctcagtcctatttaatgatggccagagatacctcctggtcagccaaagccctggctgactgccaggcagttgcgcagtagctcttcctgtagtgaaactgttcttcttatcattgttgactaaactctgttggaagttgtctcactagccatatgagccacagctgtctctatcctgaatagcttaatgagccataggttgctgactcctggactgcaggaaccttttagttgcctctcgccacagttgaatttccttctggacctccatctctcttcatcacagttgtcaacacttgagccttctcccatgttacttcttatgcagtgtcccttctacttaactgtaagttttataaaagcagaaaaccgtcttattcagttttttgcttatgcagtaaacattgaataattgtcaaatgaataaataattgtcaaataaatgaatatattgaatacca

SEQ ID NO: 196907 - DNA, 1284 bp, Homo sapiens
  Payload ID: 18837
  Gene Name: ubiquinol-cytochrome c reductase complex assembly factor 1
  ENST ID: ENST00000397556
  CDS Start-End: 122-802
tctttagaggaaccagactagcatttctcagtgggttccagtatgcagccgattgatacctgtgtctcctacccaaggacagggggacagggctctgtctcgcacttcccagtggccccagatgagccagtcccgagcatgtggtggatcagaacagattcctggaatagacatacagctgaataggaagtatcacaccacacgtaagctttctactaccaaagattccccacagcctgttgaggagaaggttggtgctttcacaaagataatagaagccatgggattcacgggacctttgaaatacaggtgtcagatgcctgatacattcaattcatggtttcttataaccctactccacgtctggatgtgtctagtccgaatgaagcaggaaggccggagtgggaagtacatgtgtcgtatcatagttcattttatgtgggaggatgttcagcagcgcggcagagtcatgggggttaatccctatatcctgaagaagaacatgatcctcatgacaaatcatttctatgcagcgatcttgggatatgatgaggggatcctttcagatgatcatgggctggccgctgccctctggagaaccttcttcaaccggaaatgtgaagaccctcgacatcttgaattgctggtagagtatgtgaggaaacagatacagtacctggactccatgaacggggaggatctgcttctgacaggggaggtgagctggcgccctctagtggagaagaatcctcagagcatcctgaagccccattctccgacttacaacgacgagggactttgatgggctgggccctccgcacggcccgccagctggcttcgaggaacctccaggagagaagtgcctgttggtccaggaccctgcagaaagtggcctgaactgacctctgaacagcatctgtcaaatacctggccccatttgtgttgagtttcctcttagtgtgcccaggagtctgatctgctggggtacagggctgggagaacccctagctctcccggggtgtcctctcccttaggggaagccccgagtgagagtcccccagcacacactccccaaccccctccagcaactacatgtgactgatagcttttcccaaaggccaaggaagggatggtgtaggttcaaaagggaaaccccccagggcctgctgtggcctaggagcagattgtaatgctgccgagtccggtcggtgaccacgcgttgtccctcggctttcagccatggggttgagttggccattaaaagaaacagagacttctctctgc

SEQ ID NO: 196908 - DNA, 1035 bp, Homo sapiens
  Payload ID: 18837
  Gene Name: ubiquinol-cytochrome c reductase complex assembly factor 1
  ENST ID: ENST00000453855
  CDS Start-End: 1-381
gcgttgctggtgcgagtccttaggaaccagactagcatttctcagtgggttccagtatgcagccgattgatacctgtgtctcctacccaaggacagggggacagggctctgtctcgcacttcccagtggccccagatgagccagtcccgagcatgtggtggatcagaacagattcctggaatagacatacagctgaataggaagtatcacaccacacgtaagctttctactaccaaagattccccacagcctgttgaggagaagcgatcttgggatatgatgaggggatcctttcagatgatcatgggctggccgctgccctctggagaaccttcttcaaccggaaatgtgaagaccctcgacatcttgaattgctggtagagtatgtgaggaaacagatacagtacctggactccatgaacggggaggatctgcttctgacaggggaggtgagctggcgccctctagtggagaagaatcctcagagcatcctgaagccccattctccgacttacaacgacgagggactttgatgggctgggccctccgcacggcccgccagctggcttcgaggaacctccaggagagaagtgcctgttggtccaggaccctgcagaaagtggcctgaactgacctctgaacagcatctgtcaaatacctggccccatttgtgttgagtttcctcttagtgtgcccaggagtctgatctgctggggtacagggctgggagaacccctagctctcccggggtgtcctctcccttaggggaagccccgagtgagagtcccccagcacacactccccaaccccctccagcaactacatgtgactgatagcttttcccaaaggccaaggaagggatggtgtaggttcaaaagggaaaccccccagggcctgctgtggcctaggagcagattgtaatgctgccgagtccggtcggtgaccacgcgttgtccctcggctttcagccatggggttgagttggccattaaaagaaacagagacttctctctgccatggcccttctttattcca

SEQ ID NO: 196909 - DNA, 736 bp, Homo sapiens
  Payload ID: 18837
  Gene Name: ubiquinol-cytochrome c reductase complex assembly factor 1
  ENST ID: ENST00000438533
  CDS Start-End: 7-736
aggaacatggcgttgctggtgcgagtccttaggaaccagactagcatttctcagtgggttccagtatgcagccgattgatacctgtgtctcctacccaaggacagggggacagggctctgtctcgcacttcccaggtcccctggttggaaacttctgcttcagaatggcatcctcagtggccccagatgagccagtcccgagcatgtggtggatcagaacagattcctggaatagacatacagctgaataggaagtatcacaccacacgtaagctttctactaccaaagattccccacagcctgttgaggagaaggttggtgctttcacaaagataatagaagccatgggattcacgggacctttgaaatacagtaaatggaagattaagattgcggccctgcgcatgtatactagctgtgtggagaaaactgacttcgaggaattctttctaaggtgtcagatgcctgatacattcaattcatggtttcttataaccctactccacgtctggatgtgtctagtccgaatgaagcaggaaggccggagtgggaagtacatgtgtcgtatcatagttcattttatgtgggaggatgttcagcagcgcggcagagtcatgggggttaatccctatatcctgaagaagaacatgatcctcatgacaaatcatttctatgcagcgatcttgggatatgatgaggggatcctttcagatgatcatgggctggccgctgccc

SEQ ID NO: 196910 - DNA, 758 bp, Homo sapiens
  Payload ID: 18837
  Gene Name: ubiquinol-cytochrome c reductase complex assembly factor 1
  ENST ID: ENST00000424405
  CDS Start-End: 11-758
attgaggaacatggcgttgctggtgcgagtccttaggaaccagactagcatttctcagtgggttccagtatgcagccgattgatacctgtgtctcctacccaaggacagggggacagggctctgtctcgcacttcccagctttctactaccaaagattccccacagcctgttgaggagaaggttggtgctttcacaaagataatagaagccatgggattcacgggacctttgaaatacagtaaatggaagattaagattgcggccctgcgcatgtatactagctgtgtggagaaaactgacttcgaggaattctttctaaggtgtcagatgcctgatacattcaattcatggtttcttataaccctactccacgtctggatgtgtctagtccgaatgaagcaggaaggccggagtgggaagtacatgtgtcgtatcatagttcattttatgtgggaggatgttcagcagcgcggcagagtcatgggggttaatccctatatcctgaagaagaacatgatcctcatgacaaatcatttctatgcagcgatcttgggatatgatgaggggatcctttcagatgatcatgggctggccgctgccctctggagaaccttcttcaaccggaaatgtgaagaccctcgacatcttgaattgctggtagagtatgtgaggaaacagatacagtacctggactccatgaacggggaggatctgcttctgacaggggaggtgagctggcgccctctagtggagaaga

SEQ ID NO: 196911 - DNA, 1987 bp, Homo sapiens
  Payload ID: 18837
  Gene Name: ubiquinol-cytochrome c reductase complex assembly factor 1
  ENST ID: ENST00000457259
  CDS Start-End: 1-166
gttgctggtgcgagtccttaggaaccagactagcatttctcagtgggttccagtatgcagccgattgatacctgtgtctcctacccaaggacagggggacagggctctgtctcgcacttcccagggtgtcagatgcctgatacattcaattcatggtttcttataaccctactccacgtctggatgtgtctagtccgaatgaagcaggaaggccggagtgggaagtacatgtgtcgtatcatagttcattttatgtgggaggatgttcagcagcgcggcagagtcatgggggttaatccctatatcctgaagaagaacatgatcctcatgacaaatcatttctatgcagcgatcttgggatatgatgaggggatcctttcagatgatcatgggctggccgctgccctctggagaaccttcttcaaccggaaatgtgaagaccctcgacatcttgaattgctggtagagtatgtgaggaaacagatacagtacctggactccatgaacggggaggatctgcttctgacaggggaggtgagctggcgccctctagtggagaagaatcctcagagcatcctgaagccccattctccgacttacaacgacgagggactttgatgggctgggccctccgcacggcccgccagctggcttcgaggaacctccaggagagaagtgcctgttggtccaggaccctgcagaaagtggcctgaactgacctctgaacagcatctgtcaaatacctggccccatttgtgttgagtttcctcttagtgtgcccaggagtctgatctgctggggtacagggctgggagaacccctagctctcccggggtgtcctctcccttaggggaagccccgagtgagagtcccccagcacacactccccaaccccctccagcaactacatgtgactgatagcttttcccaaaggccaaggaagggatggtgtaggttcaaaagggaaaccccccagggcctgctgtggcctaggagcagattgtaatgctgccgagtccggtcggtgaccacgcgttgtccctcggctttcagccatggggttgagttggccattaaaagaaacagagacttctctctgccatggcccttctttattccagggacttagaaacttgcctgagatggtggacgcagtaatgagggcaccgcgcagctcagttagagacggagaaagggaagaggctgggatggtctctgctgctcttgcctctagttcatggagatgtgtctctgttcaggccaagatacagccagccaggcctgtcgtctgggacccaggaggcctctgatgaccaagggctttcacatcctaagtcatttggaaggaggccttgagaacaaagtcacctttgtcactcccagtgaactgaatgaggaacatgctgtctcctgtcttggcctcccctttcatgagatactggggagaagagaacattcctcctggcttagttgtagcagacccagacctgtgcccagctttggtcccccttcccaacttctgaagcacgtgctgcagagccaccttggtctgagcacctgaggaccagcccctcctccctcagtgcgggtcatctcttgggggattttcttaaagtgaagaaagggggtggggaaccatattgcccctccctcccccatcaaacttccttcatttaacttgctataaaatgagtcatataaagaaactctatatgggtgaggtatatcccacttctgtgaaaacattacaaatcaaaccgcttctctcagtttatttaagatgcttttgttgcgagcggagctctagagtgaagcctcctgtgtgtgtgtgagataataacaccttgtaactcattacagctgggcactatttacataaaccagagctgagccaggcaggaatttgctgattaatttatttttaatggagtgaagtataccatgcaccaaaataaactttactgtgtgtacctaactgctcctggaa

SEQ ID NO: 196912 - DNA, 692 bp, Homo sapiens
  Payload ID: 18837
  Gene Name: ubiquinol-cytochrome c reductase complex assembly factor 1
  ENST ID: ENST00000443429
  CDS Start-End: 8-382
gaggaacatggcgttgctggtgcgagtccttaggaaccagactagcatttctcagtgggttccagtatgcagccgattgatacctgtgtctcctacccaaggacagggggacagggctctgtctcgcacttcccagtggccccagatgagccagtcccgagcatgtggtggatcagaacagattcctggaatagacatacagctgaataggaagtatcacaccacacgtaagctttctactaccaaagattccccacagcctgttgaggagaaggttggtgctttcacaaagataatagaagccatgggattcacgggacctttgaaatacagtaaatggggtgtcagatgcctgatacattcaattcatggtttcttataaccctactccacgtctggatgtgtctagtccgaatgaagcaggaaggccggagtgggaagtacatgtgtcgtatcatagttcattttatgtgggaggatgttcagcagcgcggcagagtcatgggggttaatccctatatcctgaagaagaacatgatcctcatgacaaatcatttctatgcagcgatcttgggatatgatgaggggatcctttcagatgatcatgggctggccgctgccctctggagaaccttcttcaaccggaaatgtgaagaccctcgacatcttgaattgctggtagagtatgtgag

SEQ ID NO: 196913 - DNA, 1017 bp, Homo sapiens
  Payload ID: 18837
  Gene Name: ubiquinol-cytochrome c reductase complex assembly factor 1
  ENST ID: ENST00000491040
  CDS Start-End: 11-145
attgaggaacatggcgttgctggtgcgagtccttaggaaccagactagcatttctcagtgggttccagtatgcagccgattgatacctgtgtctcctacccaaggacagggggacagggctctgtctcgcacttcccagggttaaagaaaaaaaatcattttcattccatgtgttccatttcttcttggaataaaccagaattgaagagtcagccctcttcctgctccctctcacccttttttattgtaaagctttctactaccaaagattccccacagcctgttgaggagaaggttggtgctttcacaaagataatagaagccatgggattcacgggacctttgaaatacagtaaatggaagattaagattgcggccctgcgcatgtatactagctgtgtggagaaaactgacttcgaggaattctttctaaggtgtcagatgcctgatacattcaattcatggtttcttataaccctactccacgtctggatgtgtctagtccgaatgaagcaggaaggccggagtgggaagtacatgtgtcgtatcatagttcattttatgtgggaggatgttcagcagcgcggcagagtcatgggggtaagtgagtgctgtcagatgcttgtcctggacaattccagagaagggtttgagtttggagttttatctgttgtaaaatggccctgcttttagatttctgtgaaatgctgcctaatatcaagtggcagttccgctaaagtcactttttctgcctctgtggaaactaatactccacagatactttatgtgtttgtacacattatagtgatttgtcagtgtgaagtcatcctgtatggagatgggattgtaaagcccaaatcgtggtgataggagggatggatttggtgaatggagggaatcaaatgataatccagttaaggatactatacctttgacaccagttcaatatttgaaccagtccttctataaattagttctgatgggaggccctggtatggggcctgcactgtcttcagg

SEQ ID NO: 196914 - DNA, 432 bp, Homo sapiens
  Payload ID: 18838
  Gene Name: ubiquinol-cytochrome c reductase complex assembly factor 2
  ENST ID: ENST00000374214
  CDS Start-End: 42-347
gccgactcctcccgctaaggcgggaacacgcggggcccaagatggcggccagccggtaccggcgttttcttaagctctgtgaggaatggccagtggacgagaccaaacggggccgggacttgggcgcttacctgcgacagcgggtagcacaggcctttcgggagggagagaatacccagtaccctcgccccagagacaccagcttcagtggcctgtcgttggaagagtacaagctgatcctgtccacagacaccttggaagagcttaaggaaatagataaaggcatgtggaagaaactgcaggagaagtttgcccccaagggtcctgaggaggatcataaggcctgagctcaggccttacctcgtgcacatacctaggtgtggagtcttgtacattgccatcgtcaataaaactgccccagtttccccttga

SEQ ID NO: 196915 - DNA, 509 bp, Homo sapiens
  Payload ID: 18838
  Gene Name: ubiquinol-cytochrome c reductase complex assembly factor 2
  ENST ID: ENST00000374231
  CDS Start-End: 1-379
ggcggccagccggtaccggcgttttcttaagctctgtgaggaatggccagtggacgagaccaaacggggccgggacttgggcgcttacctgcgacagcgggtagcacaggcctttcgggagggagagaatacccaggttgcagagcctgaggcctgtgatcagatgtacgagagcttagcgcgactccattcaaactactacaaacacaagtaccctcgccccagagacaccagcttcagtggcctgtcgttggaagagtacaagctgatcctgtccacagacaccttggaagagcttaaggaaatagataaaggcatgtggaagaaactgcaggagaagtttgcccccaagggtcctgaggaggatcataaggcctgagctcaggccttacctcgtgcacatacctaggcactgccagatgcagaagaggatgtctaggcaagagggccttaaactcccccatctccagtgatggggatcccctcaaaggacctacctggcagctgtc

SEQ ID NO: 196916 - DNA, 1314 bp, Homo sapiens
  Payload ID: 18838
  Gene Name: ubiquinol-cytochrome c reductase complex assembly factor 2
  Uniprot ID: Q9BRT2
  ENST ID: ENST00000607484
  CDS Start-End: 42-422
gccgactcctcccgctaaggcgggaacacgcggggcccaagatggcggccagccggtaccggcgttttcttaagctctgtgaggaatggccagtggacgagaccaaacggggccgggacttgggcgcttacctgcgacagcgggtagcacaggcctttcgggagggagagaatacccaggttgcagagcctgaggcctgtgatcagatgtacgagagcttagcgcgactccattcaaactactacaaacacaagtaccctcgccccagagacaccagcttcagtggcctgtcgttggaagagtacaagctgatcctgtccacagacaccttggaagagcttaaggaaatagataaaggcatgtggaagaaactgcaggagaagtttgcccccaagggtcctgaggaggatcataaggcctgagctcaggccttacctcgtgcacatacctaggtgtggagtcttgtacattgccatcgtcaataaaactgccccagtttccccttgaccttacggtttgggaatctcctctagctttcccagaaaggaagcccttgctgctctaaagaaagtttcagcctgagaagggatggtgattgagctatctgctgtgactgctgctcagggtagggaaatctcctggggagaggaaatgcaggtttccctctgggcctgatgagggtaatggggcctcggcacaaggtgcttcctgcattgccacgggagcccccgcccctctggcacgggtctggtgtctcctggcaagatactcaggctcccttttgttgtaggagctcctgggaggaagccaaaaatagcagtaaatactgaaaagggcatcctgttgcaaacagaaagcagtagggaggtgtgaggccgagagaggcaaaaagcctgcttggccctcatccccactgactcagagaaggatggaccttaggcctctatccctgaccttgcaaaaacccacattgcccagttggcttaagggacagggaagctatagacaggccttggccaagcggggcctcagctgcagttggcttcagcactgtgggcaggttctgtaggtggccacaagtcagaggccctgctggctgaggacacacacagggtcacctcattattccatggaaccttggctcttactgatattgagcatccttctctctggaaccgtgagggacagggctgggcccacagcggccctggtgggtacaaagtggaagtgggttcttaacctcgtctgtgtctagactcctcaggatgttctgaaatgcataaaataaaatcgacaggactgccgtagaaacca

SEQ ID NO: 196917 - DNA, 1947 bp, Homo sapiens
  Payload ID: 18839
  Gene Name: ubiquinol-cytochrome c reductase complex assembly factor 3
  Uniprot ID: Q6UW78
  ENST ID: ENST00000377953
  CDS Start-End: 93-374
ctagcctgcgccaaggggtagtgagaccgcgcggcaacagcttgcggctgcggggagctcccgtgggcgctccgctggctgtgcaggcggccatggattccttgcggaaaatgctgatctcagtcgcaatgctgggcgcaggggctggcgtgggctacgcgctcctcgttatcgtgaccccgggagagcggcggaagcaggaaatgctaaaggagatgccactgcaggacccaaggagcagggaggaggcggccaggacccagcagctattgctggccactctgcaggaggcagcgaccacgcaggagaacgtggcctggaggaagaactggatggttggcggcgaaggcggcgccggcgggaggtcaccgtgagaccggacttgcctccgtgggcgccggaccttggcttgggcgcaggaatccgaggcagcctttctccttcgtgggcccagcggagagtccggaccgagataccatgccaggactctccggggtcctgtgagctgccgtcgggtgagcacgtttcccccaaaccctggactgactgctttaaggtccgcaaggcgggccagggccgagacgcgagtcggatgtggtgaactgaaagaaccaataaaatcatgttcctccacccagaatgagccctgcagtcgacacctaccaatgcttagagacgcgtggtcggtgctgggggcgcggcctggagctgctgcctgtcccaccccaccagaagaggctgatcccgataggtatctgaccacattttttttttttttttttttttgagacggagtcaatgtcacccaggctggagtgcagtggcacgatctcggctcactgcaacctccgcccctgggttccagcaattctcctgcctcagcttcccgagtagccgggatcacaagtgcgcgccaccaagcccagctaacttttgtgtttttagttgagacagggttcaccatgttggctagactggtctcgaactccagacccaggtgatccgcccgcctcggcctcccaaagggctgggattacaggcgtgaaccacctcgccctgccgcggccacattttttcttttttttgagatggagtcttgctcttgtcacccaggcaggagtgcagtggcgcaatcttggctcactgcaacctctgcctcctgggttcaagctgttctccttactcagcctcccatgtagctgggattacaggcgtccgcaaccacgcccggctgatattagtagttttagtagaggcgggtttcaccatgtggccaggctgatctcgaactcctgacctcaggcagttcacccgtctcagcctcccaaagtgctgggattagaggcgtgagccactgcgcccggccaaccacattttcaaaacaggtcatgtggtgtcaggttggagtgtacttccagggataaccgtgggacattcttgaaatctgaactatcctgggaagtcttgaagtaatggatgcctatagtggacactcaggactcctgtccttggagcgagattggaggggcatctagcacttaacatatgccacaatgctttctgtggccattatttaacctctggttaaacaagcttaggaggctgacttactagtagtaaaaggagtgtgctttgagtcacagatcctggttgaactccagcatgttacaaacctcagccctgttctatgaaaggtcataactacgaggattattgtaaaacattaatttagaaatgtaaagtggtccccaatctctggatctggtcaggatttattggagctgccactgaggggattaaataagtggggtcaaagccccacagcctagtcaaccaagttgctcctcttttgtctatcctgtggttcccaagcaagactgcaattgaaaaaaaggctgctgttattaaagtcagaacaccaaataaagctttttttttttttttgag

SEQ ID NO: 196918 - DNA, 2288 bp, Homo sapiens
  Payload ID: 18839
  Gene Name: ubiquinol-cytochrome c reductase complex assembly factor 3
  Uniprot ID: Q6UW78
  ENST ID: ENST00000531323
  CDS Start-End: 544-825
attaaagccctgtgggccaagagttgtgataaccaacttggaatttcctgactcctatgcttactgatttttcccaacctgagttgaggggatggagagggatgtgtatgtgtgtagatgccctccatgcgctgtgttgaaaacgcgcgggtgactgcaggaaaccacagagcacagctcgggcctctactgatcgggaaacgtcggaagacagaaaaatgggcaatcataaaacccacggcaaccatgaagacacgcactctccccctagcaatcccaccccggaattgaggacacagggtccccgcgctcagcccttggtgccagcacttcttggacacctcaaccccctcagctaaacctgagatccaagcgctccggattccaaacgtttcctcgagcaggtcctctctagccggccgcttatctatggtttctgctatagggcgctctagcctgcgccaaggggtagtgagaccgcgcggcaacagcttgcggctgcggggagctcccgtgggcgctccgctggctgtgcaggcggccatggattccttgcggaaaatgctgatctcagtcgcaatgctgggcgcaggggctggcgtgggctacgcgctcctcgttatcgtgaccccgggagagcggcggaagcaggaaatgctaaaggagatgccactgcaggacccaaggagcagggaggaggcggccaggacccagcagctattgctggccactctgcaggaggcagcgaccacgcaggagaacgtggcctggaggaagaactggatggttggcggcgaaggcggcgccggcgggaggtcaccgtgagaccggacttgcctccgtgggcgccggaccttggcttgggcgcaggaatccgaggcagcctttctccttcgtgggcccagcggagagtccggaccgagataccatgccaggactctccggggtcctgtgagctgccgtcgggtgagcacgtttcccccaaaccctggactgactgctttaaggtccgcaaggcgggccagggccgagacgcgagtcggatgtggtgaactgaaagaaccaataaaatcatgttcctccacccagaatgagccctgcagtcgacacctaccaatgcttagagacgcgtggtcggtgctgggggcgcggcctggagctgctgcctgtcccaccccaccagaagaggctgatcccgataggtatctgaccacattttttttttttttttttttttgagacggagtcaatgtcacccaggctggagtgcagtggcacgatctcggctcactgcaacctccgcccctgggttccagcaattctcctgcctcagcttcccgagtagccgggatcacaagtgcgcgccaccaagcccagctaacttttgtgtttttagttgagacagggttcaccatgttggctagactggtctcgaactccagacccaggtgatccgcccgcctcggcctcccaaagggctgggattacaggcgtgaaccacctcgccctgccgcggccacattttttcttttttttgagatggagtcttgctcttgtcacccaggcaggagtgcagtggcgcaatcttggctcactgcaacctctgcctcctgggttcaagctgttctccttactcagcctcccatgtagctgggattacaggcgtccgcaaccacgcccggctgatattagtagttttagtagaggcgggtttcaccatgtggccaggctgatctcgaactcctgacctcaggcagttcacccgtctcagcctcccaaagtgctgggattagaggcgtgagccactgcgcccggccaaccacattttcaaaacaggtcatgtggtgtcaggttggagtgtacttccagggataaccgtgggacattcttgaaatctgaactatcctgggaagtcttgaagtaatggatgcctatagtggacactcaggactcctgtccttggagcgagattggaggggcatctagcacttaacatatgccacaatgctttctgtggccattatttaacctctggttaaacaagcttaggaggctgacttactagtagtaaaaggagtgtgctttgagtcacagatcctggttgaactccagcatgttacaaacctcagccctgttctatgaaaggtcataactacgaggattattgtaaaacattaatttagaaatgtaaagtggtccccaatctctggatctggtcaggatttattggagctgccactgaggggattaaataagtggggtcaaagccccacagcctagtcaaccaa

SEQ ID NO: 196919 - DNA, 1985 bp, Homo sapiens
  Payload ID: 18840
  Gene Name: ubiquinol-cytochrome c reductase core protein I
  Uniprot ID: P31930
  ENST ID: ENST00000203407
  CDS Start-End: 418-1860
tactgactttcagcaccaacttgtggtcccaggtaagtttccacgctggtactttagccctgggctcgaacctgcggacacgctgtggctgcaactccccgcccgccagacctcagtacgcagcgcggctggtgagaaacataatgcactctgacttccacgcgtggaatggggagatggactgcacggcgggcggacctgctcgggctgatggacggcaggtggactgatgtgcgcagggactggcggcagcgcggtcagagccagtcagccaaagccaggccagcacaatagactgtcccggttcccgccaggaggcggccgagcaccaactgtacggtactgcgcctgcgccgcgaccgccaacgcgcccagtctacgcttgcgcggcgcaacagggccgactgcagctggaagatggcggcgtccgtggtctgtcgggccgctaccgccggggcacaagtgctattgcgcgcccgccgctcgccggccctgctgcggacgccagccttgcggagtacggcaaccttcgctcaggcgctccagttcgtgccggagacgcaggttagcctgctggacaacggcctgcgtgtggcctccgagcagtcctctcagcccacttgcacggtgggagtgtggattgatgttggcagccgttttgagactgagaagaataatggggcaggctactttttggagcatctggctttcaagggaacaaagaatcggcctggcagtgccctggagaaggaggtggagagcatgggggcccatcttaatgcctacagcacccgggagcacacagcttactacatcaaggcgctgtccaaggatctgccgaaagctgtggagctcctgggtgacattgtgcagaactgtagtctggaagactcacagattgagaaggaacgtgatgtgatcctgcgggagatgcaggagaatgatgcatctatgcgagatgtggtctttaactacctgcatgccacagcattccagggcacacctctagcccaggctgtggaggggcccagtgagaatgtcaggaagctgtctcgtgcagacttgaccgagtacctcagcacacattacaaggcccctcgaatggtgctggcagcagctggaggagtggagcaccagcaactgttagacctcgcccagaagcacctcggtggcatcccatggacatatgcagaggacgctgtgcccactcttactccatgccgcttcactggcagtgagatccgccaccgtgatgatgctctaccttttgcccacgtggccattgcagtagagggtcctggctgggccagcccggacaatgtggccttgcaagtggccaatgccatcatcggccactatgactgcacttatggtggtggcgtgcacctgtccagcccactggcttcaggtgctgtggccaacaagctatgccagagtttccagaccttcagcatctgctatgcagagacgggcttgctgggtgcacactttgtctgtgaccgaatgaaaatcgatgacatgatgttcgtcctgcaagggcagtggatgcgcctgtgtaccagtgccacggagagtgaggtggcccggggcaaaaacatcctcagaaatgccctggtatctcatctagatggcactactcctgtgtgtgaggacatcggacgcagcctcctgacctatggccgccgcatccccctggctgaatgggaaagccggattgcggaggtggatgccagtgtggtacgtgagatctgctccaagtacatctatgaccagtgcccagcagtggctggatatggccccattgagcagctcccagactacaaccggatccgtagcggcatgttctggctgcgcttctaggcgggaagcctatgtaagcaagagggcagggccggggtttgtggtcccccccccaccacaaacacagcacttcggctcctctaacctgtgccacaggtgaccaccaataaaatcctctgctgaga

SEQ ID NO: 196920 - DNA, 778 bp, Homo sapiens
  Payload ID: 18840
  Gene Name: ubiquinol-cytochrome c reductase core protein I
  ENST ID: ENST00000412343
  CDS Start-End: 17-223
cgactgcagctggaagatggcggcgtccgtggtctgtcgggccgctaccgccggggcacaagtgctattgcgcgcccgccgctcggtgaggtggtggcgagagcgcggggcttcgggacagggcttcgggaagcggacagccggccctgctgcggacgccagccttgcggagtacggcaaccttcgctcaggcgctccagttcgtgccggagacgcaggttagcctgctggacaacggcctgcgtgtggcctccgagcagtcctctcagcccacttgcacggtgggagtgtggattgatgttggcagccgttttgagactgagaagaataatggggcaggctactttttggagcatctggctttcaagggaacaaagaatcggcctggcagtgccctggagaaggaggtggagagcatgggggcccatcttaatgcctacagcacccgggagcacacagcttactacatcaaggcgctgtccaaggatctgccgaaagctgtggagctcctgggtgacattgtgcagaactgtagtctggaagactcacagattgagaaggaacgtgatgtgatcctgcgggagatgcaggagaatgatgcatctatgcgagatgtggtctttaactacctgcatgccacagcattccagggcacacctctagcccaggctgtggaggggcccagtgagaatgtcaggaagctgtctcgtgcagacttgaccgagtacctcagcacacattacaaggcccctcgaatggtgctggcagcagctggagg

SEQ ID NO: 196921 - DNA, 1387 bp, Homo sapiens
  Payload ID: 18840
  Gene Name: ubiquinol-cytochrome c reductase core protein I
  ENST ID: ENST00000415995
  CDS Start-End: 7-372
tggaagatggcggcgtccgtggtctgtcgggccgctaccgccggggcacaagtgctattgcgcgcccgccgctcggtgaggtgggagtgtggattgatgttggcagccgttttgagactgagaagaataatggggcaggctactttttggagcatctggctttcaagggaacaaagaatcggcctggcagtgccctggagaaggaggtggagagcatgggggcccatcttaatgcctacagcacccgggagcacacagcttactacatcaaggcgctgtccaaggatctgccgaaagctgtggagctcctgggtgacattgtgcagaactgtagtctggaagactcacagattgagaaggaacgtgatgtgatcctgcgggagatgcaggagaatgatgcatctatgcgagatgtggtctttaactacctgcatgccacagcattccagggcacacctctagcccaggctgtggaggggcccagtgagaatgtcaggaagctgtctcgtgcagacttgaccgagtacctcagcacacattacaaggcccctcgaatggtgctggcagcagctggaggagtggagcaccagcaactgttagacctcgcccagaagcacctcggtggcatcccatggacatatgcagaggacgctgtgcccactcttactccatgccgcttcactggcagtgagatccgccaccgtgatgatgctctaccttttgcccacgtggccattgcagtagagggtcctggctgggccagcccggacaatgtggccttgcaagtggccaatgccatcatcggccactatgactgcacttatggtggtggcgtgcacctgtccagcccactggcttcaggtgctgtggccaacaagctatgccagagtttccagaccttcagcatctgctatgcagagacgggcttgctgggtgcacactttgtctgtgaccgaatgaaaatcgatgacatgatgttcgtcctgcaagggcagtggatgcgcctgtgtaccagtgccacggagagtgaggtggcccggggcaaaaacatcctcagaaatgccctggtatctcatctagatggcactactcctgtgtgtgaggacatcggacgcagcctcctgacctatggccgccgcatccccctggctgaatgggaaagccggattgcggaggtggatgccagtgtggtacgtgagatctgctccaagtacatctatgaccagtgcccagcagtggctggatatggccccattgagcagctcccagactacaaccggatccgtagcggcatgttctggctgcgcttctaggcgggaagcctatgtaagcaagagggcagggccggggtttgtggtcccccccccaccacaaacacagcacttcg

SEQ ID NO: 196922 - DNA, 2615 bp, Homo sapiens
  Payload ID: 18841
  Gene Name: ubiquinol-cytochrome c reductase core protein II
  Uniprot ID: P22695
  ENST ID: ENST00000268379
  CDS Start-End: 765-2126
actatccaaaacatttctattttcctaacacaaaaactatagctaagtttttatattctatgtagccccagcctaggacgtaaattccacgagaccaaaagccttgtgatgattccccgaggttgctgaccctcccggtgtgtcccgggcctgctctgggggacacagcggcgaatacgttgaacgaggcccctgtttcacggagctaaagatccagtaaggacttcacccagcgagaggcaactacgccgggcttcgatacccaatacctctgcagaaaggtggagtggcaggaatctcctgaagcctccaacgtccaggaacgcggaaacccagggcctccagtgcaggtgtcatcccggagggcgcatgcggagtcccaagagaggcgcgtcccattggacaatgctgagcggaagagcccaagatagcggggggagttgtgacaggctgctgcagacgtacttagaaaaggggtgcatactggatattcaggctaggagaagaacgcaaaaagcagtgacgtacattattctctgcatatatttacttgggaaattgtgcgtctccctattctgagtcttggaggaattggactggtccaaccttataaagagagcagtagagcgcggcagtatagagagtacctcacgaaggggacgtgggaaagtgttagcggggaacgctgggaaactcccggcctccgccaccatcttgctttcctttaatccggcagtgaccgtgtgtcagaacaatcttgaatcatgaagctactaaccagagccggctctttctcgagattttattccctcaaagttgcccccaaagttaaagccacagctgcgcctgcaggagcaccgccacaacctcaggaccttgagtttaccaagttaccaaatggcttggtgattgcttctttggaaaactattctcctgtatcaagaattggtttgttcattaaagcaggcagtagatatgaggacttcagcaatttaggaaccacccatttgctgcgtcttacatccagtctgacgacaaaaggagcttcatctttcaagataacccgtggaattgaagcagttggtggcaaattaagtgtgaccgcaacaagggaaaacatggcttatactgtggaatgcctgcggggtgatgttgatattctaatggagttcctgctcaatgtcaccacagcaccagaatttcgtcgttgggaagtagctgaccttcagcctcagctaaagattgacaaagctgtggcctttcagaatccgcagactcatgtcattgaaaatttgcatgcagcagcttaccggaatgccttggctaatcccttgtattgtcctgactataggattggaaaagtgacatcagaggagttacattacttcgttcagaaccatttcacaagtgcaagaatggctttgattggacttggtgtgagtcatcctgttctaaagcaagttgctgaacagtttctcaacatgaggggtgggcttggtttatctggtgcaaaggccaactaccgtggaggtgaaatccgagaacagaatggagacagtcttgtccatgctgcttttgtagcagaaagtgctgtcgcgggaagtgcagaggcaaatgcatttagtgttcttcagcatgtcctcggtgctgggccacatgtcaagaggggcagcaacaccaccagccatctgcaccaggctgttgccaaggcaactcagcagccatttgatgtttctgcatttaatgccagttactcagattctggactctttgggatttatactatctcccaggccacagctgctggagatgttatcaaggctgcctataatcaagtaaaaacaatagctcaaggaaacctttccaacacagatgtccaagctgccaagaacaagctgaaagctggatacctaatgtcagtggagtcttctgagtgtttcctggaagaagtcgggtcccaggctctagttgctggttcttacatgccaccatccacagtccttcagcagattgattcagtggctaatgctgatatcataaatgcggcaaagaagtttgtttctggccagaagtcaatggcagcaagtggaaatttgggacatacaccttttgttgatgagttgtaatactgatgcacacattacaggagagagctgaacgttctctcagcccagagcagcaaacacatgaaagtcagaagtctctaatatatcatttgtcttttttccagtgaggtaaaataaggcataaatgcaggtaattattcccagctgacctaaagtcaataaaacattctgtttaagtgtttttcttacgtttttctcaatgagttaatcaacaagtatttattatgtgctgatatctttgttttagatgctttaaaggagacaggaatataattattgagtatagaagcatcagaaactattaaaattaaggctaagtggctatcggggtaaatagtgccagattactattggtggcgtttaagatgaaagcaagttcaaaatttgtcattttgggtgtcaacagctaaatggtctggtttttacccctgttttgccttttttgcaataaaattatttccaaaaaacatacatttcctatcaatcata

SEQ ID NO: 196923 - DNA, 565 bp, Homo sapiens
  Payload ID: 18841
  Gene Name: ubiquinol-cytochrome c reductase core protein II
  ENST ID: ENST00000565331
  CDS Start-End: 38-565
atccggcagtgaccgtgtgtcagaacaatcttgaatcatgaagctactaaccagagccggctctttctcgtttaccaagttaccaaatggcttggtgattgcttctttggaaaactattctcctgtatcaagaattggtttgttcattaaagcaggcagtagatatgaggacttcagcaatttaggaaccacccatttgctgcgtcttacatccagtctgacgacaaaaggagcttcatctttcaagataacccgtggaattgaagcagttggtggcaaattaagtgtgaccgcaacaagggaaaacatggcttatactgtggaatgcctgcggggtgatgttgatattctaatggagttcctgctcaatgtcaccacagcaccagaatttcgtcgttgggaagtagctgaccttcagcctcagctaaagattgacaaagctgtggcctttcagaatccgcagactcatgtcattgaaaatttgcatgcagcagcttaccggaatgccttggctaatcccttgtattgtcctgactataggattggaaaagtgacatcagaggag

SEQ ID NO: 196924 - DNA, 1415 bp, Homo sapiens
  Payload ID: 18841
  Gene Name: ubiquinol-cytochrome c reductase core protein II
  ENST ID: ENST00000561553
  CDS Start-End: 54-1292
atcttgctttcctttaatccggcagtgaccgtgtgtcagaacaatcttgaatcatgaagctactaaccagagccggctctttctcgagattttattccctcaaagttgcccccaaagttaaagccacagctgcgcctgcaggagcaccgccacaacctcaggaccttgagtttaccaagttaccaaatggcttggtgattgcttctttggaaaactattctcctgtatcaagaattggtttgttcattaaagcaggcagtagatatgaggacttcagcaatttaggaaccacccatttgctgcgtcttacatccagtctgacgacaaaaggagcttcatctttcaagataacccgtggaattgaagcagttggtggcaaattaagtgtgaccgcaacaagggaaaacatggcttatactgtggaatgcctgcggggtgatgttgatattctaatggagttcctgctcaatgtcaccacagcaccagaatttcgtcgttgggaagtagctgaccttcagcctcagctaaagattgacaaagctgtggcctttcagaatccgcagactcatgtcattgaaaatttgcatgcagcagcttaccggaatgccttggctaatcccttgtattgtcctgactataggattggaaaagtgacatcagaggagttacattacttcgttcagaaccatttcacaagtgcaagaatggctttgattggacttggtgtgagtcatcctgttctaaagcaagttgctgaacagtttctcaacatgaggggtgggcttggtttatctggtgcaaaggccaactaccgtggaggtgaaatccgagaacagaatggagacagtcttgtccatgctgcttttgtagcagaaagtgctgtcgcgggaagtgcagaggcaaatgcatttagtgttcttcagcatgtcctcggtgctgggccacatgtcaagaggggcagcaacaccaccagccatctgcaccaggctgttgccaaggcaactcagcagccatttgatgtttctgcatttaatgccagttactcagattctggactctttgggatttatactatctcccaggccacagctgctggagatgttatcaaggctgcctataatcaagtaaaaacaatagctcaaggaaacctttccaacacagatgtccaagctgccaagcggcaaagaagtttgtttctggccagaagtcaatggcagcaagtggaaatttgggacatacaccttttgttgatgagttgtaatactgatgcacacattacaggagagagctgaacgttctctcagcccagagcagcaaacacatgaaagtcagaagtctctaatatatcatttgtcttttttccagtgaggtaaaataaggcataaatgcaggtaattattcccagctgacctaaa

SEQ ID NO: 196925 - DNA, 1406 bp, Homo sapiens
  Payload ID: 18841
  Gene Name: ubiquinol-cytochrome c reductase core protein II
  ENST ID: ENST00000563898
  CDS Start-End: 38-1048
atccggcagtgaccgtgtgtcagaacaatcttgaatcatgaagctactaaccagagccggctctttctcgagattttattccctcaaagttgcccccaaagttaaagccacagctgcgcctgcaggagcaccgccacaacctcaggaccttgagtttaccaagttaccaaatggcttggtgattgcttctttggaaaactattctcctgtatcaagaattggtttgttcattaaagcaggcagtagatatgaggacttcagcaatttaggaaccacccatttgctgcgtcttacatccagtctgacgacaaaaggagcttcatctttcaagataacccgtggaattgaagcagttggtggcaaattaagtgtgaccgcaacaagggaaaacatggcttatactgtggaatgcctgcggggtgatgttgatattctaatggagttcctgctcaatgtcaccacagcaccagaatttcgtcgttgggaagtagctgaccttcagcctcagctaaagattgacaaagctgtggcctttcagaatccgcagactcatgtcattgaaaatttgcatgcagcagcttaccggaatgccttggctaatcccttgtattgtcctgactataggattggaaaagtgacatcagaggagttacattacttcgttcagaaccatttcacaagtgcaagaatggctttgattggacttggtgtgagtcatcctgttctaaagcaagttgctgaacagtttctcaacatgaggggtgggcttggtttatctggtgcaaaggccaactaccgtggaggtgaaatccgagaacagaatggagacagtcttgtccatgctgcttttgtagcagaaagtgctgtcgcgggaagtgcagaggcaaatgcatttagtgttcttcagcatgtcctcggtgctgggccacatgtcaagaggggcagcaacaccaccagccatctgcaccaggctgttgccaaggcaactcagcagccatttgatgaacaagctgaaagctggatacctaatgtcagtggagtcttctgagtgtttcctggaagaagtcgggtcccaggctctagttgctggttcttacatgccaccatccacagtccttcagcagattgattcagtggctaatgctgatatcataaatgcggcaaagaagtttgtttctggccagaagtcaatggcagcaagtggaaatttgggacatacaccttttgttgatgagttgtaatactgatgcacacattacaggagagagctgaacgttctctcagcccagagcagcaaacacatgaaagtcagaagtctctaatatatcatttgtcttttttccagtgaggtaaaataaggcataaatgcaggtaattattcccagctgacctaaagtcaataaaac

SEQ ID NO: 196926 - DNA, 542 bp, Homo sapiens
  Payload ID: 18841
  Gene Name: ubiquinol-cytochrome c reductase core protein II
  ENST ID: ENST00000564095
  CDS Start-End: 22-372
gtgtcagaacaatcttgaatcatgaagctactaaccagagccggctctttctcgagattttattccctcaaagttgcccccaaagttaaagccacagctgcgcctgcaggagcaccgccacaacctcaggaccttgagtttaccaagttaccaaatggcttggtgattgcttctttggaaaactattctcctgtatcaagaattggtttgttcattaaagcaggcagtagatatgaggacttcagcaatttaggaaccacccatttgctgcgtcttacatccagtctgacgacaaaaggagcttcatctttcaagataacccgtggaattgaagcagttggtggcaaattaagggaaatgggtaaagtatgacagagtcatgatgagaccactatacagccattacggaatgaactagatccatacgtcaacatagcacaactgaagggcaaaatagagtgtgaacaagcaagtttcaagatttctttaagtgtgaccgcaacaagggaaaacatggcttatactgtggaatgcctgcgggg

SEQ ID NO: 196927 - DNA, 929 bp, Homo sapiens
  Payload ID: 18841
  Gene Name: ubiquinol-cytochrome c reductase core protein II
  ENST ID: ENST00000565464
  CDS Start-End: 127-525
agagagtacctcacgaaggggacgtgggaaagtgttagcggggaacgctgggaaactcccggcctccgccaccatcttgctttcctttaatccggcagtgaccgtgtgtcagaacaatcttgaatcatgaagctactaaccagagccggctctttctcgagattttattccctcaaagttgcccccaaagttaaagccacagctgcgcctgcaggagcaccgccacaacctcaggaccttgagtttaccaagttaccaaatggcttggtgattgcttctttggaaaactattctcctgtatcaagaattggtttgttcattaaagcaggcagtagatatgaggacttcagcaatttaggaaccacccatttgctgcgtcttacatccagtctgacgacaaaaggagcttcatctttcaagataacccgtggaattgaagcagttggtggcaaattaagtgttcacagcatcttcaaccaggagcagattctatctcaagaaaccactttgtttgctcatccataagaagcatctcctcatctgttcaagctttatcataagattgcagccattcagtcacatcttcaggccccacttctagttctcttgctactcccaccatagttgcagtttcttccccctctgaagtcttgcctctcagagtcatccataaggggaaatgggtaaagtatgacagagtcatgatgagaccactatacagccattacggaatgaactagatccatacgtcaacatagcacaactgaagggcaaaatagagtgtgaacaagcaagtttcaagatttctttaagtgtgaccgcaacaagggaaaacatggcttatactgtggaatgcctgcggggtgatgttgatattctaatggagttcctgctcaatgtcaccacagcaccagaatttcgtcgttggg

SEQ ID NO: 196928 - DNA, 586 bp, Homo sapiens
  Payload ID: 18841
  Gene Name: ubiquinol-cytochrome c reductase core protein II
  ENST ID: ENST00000618892
  CDS Start-End: 1-211
gttcattaaagcaggcagtagatatgaggacttcagcaatttaggaaccacccatttgctgcgtcttacatccagtctgacgacaaaaggagcttcatctttcaagataacccgtggaattgaagcagttggtggcaaattaagtgttcacagcatcttcaaccaggagcagattctatctcaagaaaccactttgtttgctcatccataagaagcatctcctcatctgttcaagctttatcataagattgcagccattcagtcacatcttcaggccccacttctagttctcttgctactcccaccatagttgcagtttcttccccctctgaagtcttgcctctcagagtcatccataagggttggaattggcttcttccaaactcacgttaatgttgatactttgacatcctcccatgagtcacaaatgttcttaatggtgtctagaatggtgaattctttccagaaagttttttaatttactttgcccagatccatcagcgtcttcactatctgtggtagctgtagccttacaaaatgtatttcttaaataataagacttgaaaataaaaattactccttgatc

SEQ ID NO: 196929 - DNA, 535 bp, Homo sapiens
  Payload ID: 18841
  Gene Name: ubiquinol-cytochrome c reductase core protein II
  ENST ID: ENST00000630839
  CDS Start-End: 137-535
gcggcagtatagagagtacctcacgaaggggacgtgggaaagtgttagcggggaacgctgggaaactcccggcctccgccaccatcttgctttcctttaatccggcagtgaccgtgtgtcagaacaatcttgaatcatgaagctactaaccagagccggctctttctcgagattttattccctcaaagttgcccccaaagttaaagccacagctgcgcctgcaggagcaccgccacaacctcaggaccttgagtttaccaagttaccaaatggcttggtgattgcttctttggaaaactattctcctgtatcaagaattggtttgttcattaaagcaggcagtagatatgaggacttcagcaatttaggaaccacccatttgctgcgtcttacatccagtctgacgacaaaaggagcttcatctttcaagataacccgtggaattgaagcagttggtggcaaattaagtgttcacagcatcttcaaccaggagcagattctatctcaagaaaccactttgtttgctcatccataa

SEQ ID NO: 196930 - DNA, 604 bp, Homo sapiens
  Payload ID: 18842
  Gene Name: ubiquinol-cytochrome c reductase hinge protein
  Uniprot ID: P07919
  ENST ID: ENST00000311672
  CDS Start-End: 137-412
gaccacgatgagtgtgccgcacttccggccagatcgccggatttccgctgagtgacccttacaagtccttcttgatcctgaactgggttaggtgccgctgttgctgctcgtgttgaatctagaaccgtagccagacatgggactggaggacgagcaaaagatgcttaccgaatccggagatcctgaggaggaggaagaggaagaggaggaattagtggatcccctaacaacagtgagagagcaatgcgagcagttggagaaatgtgtaaaggcccgggagcggctagagctctgtgatgagcgtgtatcctctcgatcacatacagaagaggattgcacggaggagctctttgacttcttgcatgcgagggaccattgcgtggcccacaaactctttaacaacttgaaataaatgtgtggacttaattcaccccagtcttcatcatctgggcatcagaatatttccttatggttttggatgtaccatttgtttcttatttgtgtaactgtaagttcacatgaacctcatgggtttggcttaggctggtagcttctatgtaattcgcaatgattccatctaaataaaagttctatgatctgcaaa

SEQ ID NO: 196931 - DNA, 674 bp, Homo sapiens
  Payload ID: 18842
  Gene Name: ubiquinol-cytochrome c reductase hinge protein
  ENST ID: ENST00000496387
  CDS Start-End: 59-367
tgaactgggttaggtgccgctgttgctgctcgtgttgaatctagaaccgtagccagacatgggactggaggacgagcaaaagatgcttaccgaatccggagatcctgaggaggaggaagaggaagaggaggaattagtgataggactgaggctttcagtgcatactggcaaccttggaaggcaggaatgtgaaacttttccctactacttagcatcagaattgaatgggagaccgcattctgccatttctggcggcagtgtggctctgccagctggccttctgcacggatcccctaacaacagtgagagagcaatgcgagcagttggagaaatgtgtaaaggcccgggagcggctagagctctgtgatgagcgtgtatcctctcgatcacatacagaagaggattgcacggaggagctctttgacttcttgcatgcgagggaccattgcgtggcccacaaactctttaacaacttgaaataaatgtgtggacttaattcaccccagtcttcatcatctgggcatcagaatatttccttatggttttggatgtaccatttgtttcttatttgtgtaactgtaagttcacatgaacctcatgggtttggcttaggctggtagcttctatgtaattcgcaatgattccatctaaataaaagttctatgatctgcaaa

SEQ ID NO: 196932 - DNA, 553 bp, Homo sapiens
  Payload ID: 18842
  Gene Name: ubiquinol-cytochrome c reductase hinge protein
  ENST ID: ENST00000489056
  CDS Start-End: 70-246
cttcttgatcctgaactgggttaggtgccgctgttgctgctcgtgttgaatctagaaccgtagccagacatgggactggaggacgagcaaaagatgcttaccgaatccggagatcctgaggaggaggaagaggaagaggaggaattagtggtaagaactgtctcaggatcccctaacaacagtgagagagcaatgcgagcagttggagaaatgtgtaaaggcccgggagcggctagagctctgtgatgagcgtgtatcctctcgatcacatacagaagaggattgcacggaggagctctttgacttcttgcatgcgagggaccattgcgtggcccacaaactctttaacaacttgaaataaatgtgtggacttaattcaccccagtcttcatcatctgggcatcagaatatttccttatggttttggatgtaccatttgtttcttatttgtgtaactgtaagttcacatgaacctcatgggtttggcttaggctggtagcttctatgtaattcgcaatgattccatctaaataaaagttctatgatctgcaaa

SEQ ID NO: 196933 - DNA, 2180 bp, Homo sapiens
  Payload ID: 18843
  Gene Name: ubiquinol-cytochrome c reductase hinge protein like
  ENST ID: ENST00000483273
  CDS Start-End: 1700-1975
gtgagactctgtctcaaaaacaaaacaaaacaaaaacagaaagaatcagagtcaacaaatcagtatggatgcagattcctcagatgccaggaatcccaggataaatggcaggggtgaaccaaatacttcccattcttccctcaccaccctcctccatccaataaagaagtaaataaattcctcaagtcccctctgccccagtgcatggaatgtttacctgtggactaggactggtctacatgccaaacaggccttgcctcctgggcggcatgtttgcaggggatccttgctgatgatgttggcctcctcctgcaccctcccactccatggctgtctcacctgagagagctttcttccttttgcattaagtgtgagtcctgataaattcaaaaaagcctccaggtgacatcattttaacaccagttaacaatcacaaatctgggtgaatgagcctcagagtttttcttgacagtagtgtgcgtgcgtgtgtgtgtgcgtgttttccatggaaaaataaaatgtattacacaaactatcagtattaattacagaaaggtggccaggtgcagtgcctcacgcctgtaatcctggcactttgggaggccaaggcgggcagattgcctgagctcaggagtttgagaccagcctggtcaaacatggtgaaaccctgtatctactaaaaatacaaaacattagctgggcgtggtggcgcatgcctgtagtctcaggtactcggaagggtgaggcacaagaatcgcttgagtctggaaggtggaggttgcagtgagccgagaacacgccactaaactccagccggggtgacagagcaagactctgtctcaaaaaacaaacaaacaattaattacagaaaggtaagcctggccaataggtcaggaaaagcagccccactgcagatccacaccactacggaaacttgaggcaccacacacatgactttgctgactgggggcaaaggatgaactagtgagcaaacttgggaggctgagacaggaggatcgcttgaacctgggaggtagaggttgcagtgagccaagatcgcaccactgctctccagccaggtgacagagcgagactccagctcaaaaaaaaaaaaaaagtcaagatattaaatatgaaagcaacactttattttttattttattttattttaagacagggtctctctctgtcacccagactggagtacagtgacatgatctctgctcactgtgatctctgcctcccaggctcaaactatcctcccacatcagcctcccaaatagctgggactacaggggcccaccaccacacctgactaatttttgtatttttggtagagatgcggtttcaccatgttgcccagcctgatcttgaacttctggattcaagtgatccgccctcctcggcctcccaaagtgctgggactacaggcttgagccacctcgcccagctgaaagtgacactttaatactttcaggaaattataggagatgattgttaagagctcaggataaagagaagtttctggccgggaacggtggctcacacctgtaatcccagcactttcagtggcggagcacctgtggccaagagtttgagaccagcctggccaacatggtgaaaccccatctctactaaaaatacaaaaattgaggtgccgctgttgctgctcgtgttaaatctagaaccgtagccagacatgggactggaggacgagcaaaagatgcttaccgaatccggagatcctgaggaggaggaagaggaagaggaggaattagtggatcccctaacaacagtgagagagcaatgcgagcagttggagaaatgtgtaaaggcccgggagcggctagagctctatgatgagcatgtatcctctcgatcacatacagaagaggattgcacggaggagctctttgacttcttgcatgcaaaggaccattgcgtggcccacaaactctttaacaacttgaaataaatgtgtggacttaattcaccccagccttcatcatctgggcatcagaatatttccttatggtttcggatgtaccatttgtttcttatttgtgtaactgtaagttcacatgaacctcgtgggttttggcttaggctggtagcttctatgtaattcgcagtgattccatctaaataaaagttctgtgatctgcaaaaaaaaaaaaaaa

SEQ ID NO: 196934 - DNA, 586 bp, Homo sapiens
  Payload ID: 18844
  Gene Name: ubiquinol-cytochrome c reductase, complex III subunit VII, 9.5kDa
  Uniprot ID: O14949
  ENST ID: ENST00000378665
  CDS Start-End: 237-485
gagtcaaccggatcggtgactgtggagggcgagctgagccctgtgcgtgagtggggtctggttgtgcagtgttcgtggaccctgggaggctaggggcgccccgctgggctgggaaaggataaggagtgcaggggcaggagtctggggttggggatggacccccgcggggactgcggcgcttcgcgaaagcgagccaagcgcctgtccaccctcggtcctgcagggccgccgccacaatgggccgcgagtttgggaatctgacgcggatgcggcatgtgatcagctacagcttgtcaccgttcgagcagcgcgcctatccgcacgtcttcactaaaggaatccccaatgttctgcgccgcattcgggagtctttctttcgcgtggtgccgcagtttgtagtgttttatcttatctacacatgggggactgaagagttcgagagatccaagaggaagaatccagctgcctatgaaaatgacaaatgagcaacgcatccggatgacggttccctgtctctgaaagacctttctctggaagaggagtctgcattgtagtgtctcaaagacacaataaacttcctatggtc

SEQ ID NO: 196935 - DNA, 429 bp, Homo sapiens
  Payload ID: 18844
  Gene Name: ubiquinol-cytochrome c reductase, complex III subunit VII, 9.5kDa
  Uniprot ID: O14949
  ENST ID: ENST00000378667
  CDS Start-End: 76-324
gccggaaatgacgaacgagtcaaccggatcggtgactgtggagggcgagctgagccctgtgcggccgccgccacaatgggccgcgagtttgggaatctgacgcggatgcggcatgtgatcagctacagcttgtcaccgttcgagcagcgcgcctatccgcacgtcttcactaaaggaatccccaatgttctgcgccgcattcgggagtctttctttcgcgtggtgccgcagtttgtagtgttttatcttatctacacatgggggactgaagagttcgagagatccaagaggaagaatccagctgcctatgaaaatgacaaatgagcaacgcatccggatgacggttccctgtctctgaaagacctttctctggaagaggagtctgcattgtagtgtctcaaagacacaataaacttcctatggtctgca

SEQ ID NO: 196936 - DNA, 839 bp, Homo sapiens
  Payload ID: 18844
  Gene Name: ubiquinol-cytochrome c reductase, complex III subunit VII, 9.5kDa
  Uniprot ID: O14949
  ENST ID: ENST00000378670
  CDS Start-End: 142-390
cttagagacagtaggaaaatggtatctcccggaagttacctcacgacctccaagagcggcttccaaccttgccggaaatgacgaacgagtcaaccggatcggtgactgtggagggcgagctgagccctggccgccgccacaatgggccgcgagtttgggaatctgacgcggatgcggcatgtgatcagctacagcttgtcaccgttcgagcagcgcgcctatccgcacgtcttcactaaaggaatccccaatgttctgcgccgcattcgggagtctttctttcgcgtggtgccgcagtttgtagtgttttatcttatctacacatgggggactgaagagttcgagagatccaagaggaagaatccagctgcctatgaaaatgacaaatgagcaacgcatccggatgacggttccctgtctctgaaagacctttctctggaagaggagtctgcattgtagtgtctcaaagacacaataaacttcctatggtctgcactgttgtgatattacatttttgtgagtagaatcctgtgtgaccactaatattcaagttcatgaagcgcccctcctcagcatgagtcttgaagttttgcctggtctcgggttttggtgaaagagcagggctccccctttgttccattatctacaagaaagtagctgcaggtactcctgcatctaaccatttgtgggtgacatgggctatggcgagtgctggttcttggccctctgctcccatagcaacaataaagtctactaactatattgtaattagtatgtgtcagggacgcttttattttttattttttgagatggagtcttgctctctcacccaggctgga

SEQ ID NO: 196937 - DNA, 916 bp, Homo sapiens
  Payload ID: 18845
  Gene Name: ubiquinol-cytochrome c reductase, complex III subunit X
  Uniprot ID: Q9UDW1
  ENST ID: ENST00000330029
  CDS Start-End: 31-222
gcggtggcgcgagttggactgtgaagaaacatggcggccgcgacgttgacttcgaaattgtactccctgctgttccgcaggacctccaccttcgccctcaccatcatcgtgggcgtcatgttcttcgagcgcgccttcgatcaaggcgcggacgctatctacgaccacatcaacgaggggaagctgtggaaacacatcaagcacaagtatgagaacaagtagttccttggaggcccccatccaggccagaaggaccaggtccacccagcagctgtttgcccagagctggagcctcagcttgaagatgatgctcaaggtactcttcatggaccaccattcgctgttggcaagaaacggctttacttacaaaacagactctttaccttctgctgtgtttgaagtatgtttagtcagcatgctcaggaaataaatgtgaattgcccttgagacctgcttctacattggttgctttgttaactctacctgatcttcacttgtcagtaatttgagaccacttcaaagccctctgcaaacaccccaaaggcagaatctgctattttgagttttccattaacttccaaagaattctggttttcaaaacaggagccagagttggagatattacagtcaactttggcttctaagccagtaattccattcttaaatacctcactgtcttggccatggggaagcactatggcctcagctgggggaaagaccctggcctaggggtcttagccactccccaccctagggtatagttcaggggtatccaatcctttggcttccctgggccatgttggaagaattgtcttgggccacacataaaatacagtaaccatagctgatgagctaaaacaaaaaacaatggtttgtgcaaaaatctcataatgttttaataaagttgaagaatttg

SEQ ID NO: 196938 - DNA, 584 bp, Homo sapiens
  Payload ID: 18845
  Gene Name: ubiquinol-cytochrome c reductase, complex III subunit X
  Uniprot ID: Q9UDW1
  ENST ID: ENST00000401406
  CDS Start-End: 26-214
ggcgcgagttggactgtgaagaaacatggcggccgcgacgttgacttcgaaattgtactccctgctgttccgcaggacctccaccttcgccctcaccatcatcgtgggcgtcatgttcttcgagcgcgccttcgatcaaggcgcggacgctatctacgaccacatcaacgagggggtgagggcctgtgccatccctgaccttggacccgcctgaggggtgacagtggagtagagaagctgtggaaacacatcaagcacaagtatgagaacaagtagttccttggaggcccccatccaggccagaaggaccaggtccacccagcagctgtttgcccagagctggagcctcagcttgaagatgatgctcaaggtactcttcatggaccaccattcgctgttggcaagaaacggctttacttacaaaacagactctttaccttctgctgtgtttgaagtatgtttagtcagcatgctcaggaaataaatgtgaattgcccttgagacctgcttctacattggttgctttgttaactctacctgatcttcacttgtcagtaatttgagaccacttcaaagccctctgc

SEQ ID NO: 196939 - DNA, 885 bp, Homo sapiens
  Payload ID: 18845
  Gene Name: ubiquinol-cytochrome c reductase, complex III subunit X
  ENST ID: ENST00000616603
  CDS Start-End: 1-399
atggcggccgcgacgttgacttcgaaattgtactccctgctgttccgcaggcctccaccttcgccctcaccatcatcgtgggcgtcatgttcttcgagcgcgccttcgatcaaggcgcggacgctatctacgaccacatcaacgaggggaagctgtggaaacacatcaagcacaagtatgagaacaagtagttccttggaggcccccatccaggccagaaggaccaggtccacccagcagctgtttgcccagagctggagcctcagcttgaagatgatgctcaaggtactcttcatggaccaccattcgctgttggcaagaaacggctttacttacaaaacagactctttaccttctgctgtgtttgaagtatgtttagtcagcatgctcaggaaataaatgtgaattgcccttgagacctgcttctacattggttgctttgttaactctacctgatcttcacttgtcagtaatttgagaccacttcaaagccctctgcaaacaccccaaaggcagaatctgctattttgagttttccattaacttccaaagaattctggttttcaaaacaggagccagagttggagatattacagtcaactttggcttctaagccagtaattccattcttaaatacctcactgtcttggccatggggaagcactatggcctcagctgggggaaagaccctggcctaggggtcttagccactccccaccctagggtatagttcaggggtatccaatcctttggcttccctgggccatgttggaagaattgtcttgggccacacataaaatacagtaaccatagctgatgagctaaaacaaaaaacaatggtttgtgcaaaaatctcataatgttttaataaagttgaagaatttg

SEQ ID NO: 196940 - DNA, 753 bp, Homo sapiens
  Payload ID: 18846
  Gene Name: ubiquinol-cytochrome c reductase, complex III subunit XI
  Uniprot ID: O14957
  ENST ID: ENST00000585671
  CDS Start-End: 65-235
cgcgcctgcgcagtgtagccgggtcagctggacagggtcatcctgagggtgcgactccgccgcgatggtgacccggttcctgggcccacgctaccgggagctggtcaagaactgggtcccgacggcctacacatggggcgctgtgggcgccgtggggctggtgtgggccaccgattggcggctgatcctggactgggtaccttacatcaatggcaagtttaagaaggataattaattacacaaacccttcacagactgctctggtaagtttcagtgggctgcggtgggtggactgcatgatggccggatggtggccgaagagtgggttctccaggctcccagagccggggcggcagccctcactgctccccctggagagacctgcattcgagagtggggccctgggtgccccttctggcatctccggcccacgggcacagaactgtccgccccgcagccttgggttgtgtgattggggtgtgggcctcgccctccctctggacaatcccagtgagtctttgaggcaaaccttgcttccgtctcagtgggcactgcagcctgaactgggtggggcccatgttacagacagagggggaaggtggaggctggcccacagtggctggacaccccatgagctcttggaagcgcctgtgaggccctggacgcatccacgtgtttctccagcatgccagctgcccccttaaccacagtgcctgtggcatcttcccagtgcccacatgacagtcccacgtg

SEQ ID NO: 196941 - DNA, 1324 bp, Homo sapiens
  Payload ID: 18846
  Gene Name: ubiquinol-cytochrome c reductase, complex III subunit XI
  Uniprot ID: O14957
  ENST ID: ENST00000591899
  CDS Start-End: 82-252
cgcgtgcgcgccgcggccgcgcctgcgcagtgtagccgggtcagctggacagggtcatcctgagggtgcgactccgccgcgatggtgacccggttcctgggcccacgctaccgggagctggtcaagaactgggtcccgacggcctacacatggggcgctgtgggcgccgtggggctggtgtgggccaccgattggcggctgatcctggactgggtaccttacatcaatggcaagtttaagaaggataattaattacacaaacccttcacagactgctctggtgcctggtggtgctagctcctcccacctcagcacctgctgcatctggagcagcccaagcctcaggatggacaagaggaaacccacagctcagcttcaggcttcttatgtttctgaaaacagcttggatattttaatgcacgttgcattaaacctcactgaaacctgctccgtgcccggatgttgatcatgctggtggcttggttactgtgactgtagctggagtggcacaggtgacccaggcgtcctttcagctccagaatgttgcaagtctaggagagtgttccaatggctgacagaaactgcctatttgaaatggctcataagtagtatctgcagtgtgttcatccgttgctgccttaacaagtcacccacacgtagtggcttaaagcaacgaacattcactctctcacagtctgtgtcagtcggggatttgggagtgatgtatctgggtggttgtggcccagagtctctcatgaggttgcagttaagacatcagccaaggccacttcgtctgaggaaggctcaactggggctggagccacttccaagccagtgccctcacgtggctgtcggtgacagccacagttccttcccatgggggcccctacacgaagctgcttgagcatcctcacggcatggcctctgccttccccagagcaggtgaaccaagggagaggaaggagcaagccacagtgcttctatgagccaccctgagaagtctcacgtgatcacttccgccacagcctgtttatcaaaagcaagccccccaggcccagcccacgtgcagagggaggagaatgaggttctgtgttttgaagggaagaatatcagaattggtagacatttcaaactgtcacattagggatacaaaaatgaacaggctgggagtggtggctcagcctacaatcccaacactttgggaggctgaggaaggggcatcacttgaaccaggagttcagtactaacctgggcaacaaagaggcccctgtctctgataaaaagaaaaaaaatgaaaaaataaaaatgaacaggtataaaaaga

SEQ ID NO: 196942 - DNA, 504 bp, Homo sapiens
  Payload ID: 18846
  Gene Name: ubiquinol-cytochrome c reductase, complex III subunit XI
  Uniprot ID: O14957
  ENST ID: ENST00000589880
  CDS Start-End: 28-198
tcatcctgagggtgcgactccgccgcgatggtgacccggttcctgggcccacgctaccgggagctggtcaagaactgggtcccgacggcctacacatggggcgctgtgggcgccgtggggctggtgtgggccaccgattggcggctgatcctggactgggtaccttacatcaatggcaagtttaagaaggataattaattacacaaacccttcacagactgctctggtgatgcgcccgcctcggcctcccaaagtgctgggattagaggcgtgagccactgcacccagcctggaagggacacttctactcaccctgcctcgtctgctctccctccaggtgcctggtggtgctagctcctcccacctcagcacctgctgcatctggagcagcccaagcctcaggatggacaagaggaaacccacagctcagcttcaggcttcttatgtttctgaaaacagcttggatattttaatgcacgttgcattaaacctcactgaaacctg

SEQ ID NO: 196943 - DNA, 3475 bp, Homo sapiens
  Payload ID: 18847
  Gene Name: ubiquinol-cytochrome c reductase, Rieske iron-sulfur polypeptide 1
  Uniprot ID: P47985
  ENST ID: ENST00000304863
  CDS Start-End: 424-1248
gcgattactatgtgctggacttcgtcgtagttgagatatattaccatcctaagttaaactataatcgtttattgttatctctaggtcttcctagatgaaatttttaccctaaaggatcgtaaagtcggcccaccggacgtcagtggggtcccctgttcagccctctcgttcttctggggatctctcgggacactgacgaggtggcaccgggacctacaggtgggccgcaagccccgcccccagcgacggcttgtagccccgtcccccgacgcagcgcctctccaagtttgccccgccctgcaggactgcagaatttcctttccggcggcgcgctgtcgtcacgcgtcccgcgcctcctcgcgcctgcgccgtggttggaaggtcgtccctgtgaccggcttggcggttggagcggctgtcgccatgttgtcggtagcatcccgctcaggcccgttcgcgcccgtcctgtcggccacgtcccgcggggtggcgggcgcgctgcggcccttggtgcaggccacggtgcccgccaccccggagcagcctgtgttggacctgaagcggcccttcctcagccgggagtcgctgagcggccaggccgtgcgccggcctttggtcgcctccgtgggcctcaatgtccctgcttctgtttgttattcccacacagacatcaaggtgcctgacttctctgaataccgccgccttgaagttttagatagtacgaagtcttcaagagaaagcagcgaggctaggaaaggtttctcctatttggtaactggagtaactactgtgggtgtcgcatatgctgccaagaatgccgtcacccagttcgtttccagcatgagtgcttctgctgatgtgttggccctggcgaaaatcgaaatcaagttatccgatattccagaaggcaagaacatggctttcaaatggagaggcaaacccctgtttgtgcgtcatagaacccagaaggaaattgagcaggaagctgcagttgaattatcacagttgagggacccacagcatgatctagatcgagtaaagaaacctgaatgggttatcctgataggtgtttgcactcatcttggctgtgtacccattgcaaatgcaggagattttggtggttattactgcccttgccatgggtcacactatgatgcatctggcaggatcagattgggtcctgctcctctcaaccttgaagtccccacgtatgagttcaccagtgacgatatggtgattgttggttaagagacttggactcaagtcataggcttctttcagtctttatgtcacctcaggagacttatttgagaggaagccttctgtacttgaagttgatttgaaatatgtaagaattgatgatgtatttgcaaacattaatgtgaaataaattgaatttaatgttgaatactttcaggcattcacttaataaagacactgttaagcactgttatgctcagtcatacacgcgaaaggtacaatgtcttttagctaattctaattaaaaattacagactggtgtacaagatacttgtgaaatctgtaactgactttattttcttgcccaaatatttgcttcctgctttgcgtcagggacgcagattctgcacggtcattgttgggatgaagtaaaattaacgggtcatctaagtgtctatggcattgacagaaacagtagtatctaggtattccttatttaccggacttggtaagagtcctggctatgcatttcctccctactgtgtaagccgtgtgataatctcaacactaatctgtgggaaagagtcctgaatgaggcattagtagctctgagggtttatcttcacgtctggtctgctggtttttctccttaagtgacaggccaggaaattttattagtcccttatgagtgtaaattagtacttaatcctttagtcttaataggcagtgatgggatattacctgagagaaactttccaaaatgagagtgctctgccatttcgttcattttgtgtgtggttcatcatgtccccaaagttcctgcatccactctatcaggaggcagaaagggagcatctgagacctaatactgcctgcatgcagaagtggtcctgctgggtttgtttctgtagtgatgacactttgaatgttttttcctgttgggtttacagtcactcagcacttttcactgtaagatggtgtggaaccagacgcagagcacatcggaattcacatcctattctgcctccaattacacaggtgaaacaagactaaggtccattttcccctgggagttgggagtgggctttgtcctttgagaatcacagtcactttttgatgtgtttgtctttgctgtttagaggtggaccagtcgtgctttactgagtctacctgataatctcatgtacacttttttaaaatggcaaaaatggttaggttgggtctgcccaaagggaactgaccatccaggattccagcctttgatgttaatagctaggtgttgacagaaaaaagaaaatgtcaaactttctatgcttatgagtagatactagtctttgcttcatttttaccattctagaaatgaaattagcatgtgtgataattggtgggacacagaagtattttatattctgtgtctctagatagtggaggcactcttcggattgggggttggaggaagggttggtggcagagttggaatgtgaaacattgagttgtgaggggaacacaggtccacacactaaaaaacctgtgctgccaaaaatgtcaacagcaccccctccctatagagaaatactgataacctatatcacctcccaccctgaagtgataccttgaaattctacatggcagtggaggacagaagtaggaagtttgcaggtctctaggtactcacttagtgccggaattgctatatttggtggctgcttacttcatctttcatatttagagtttgatggtgggatgctgttaaattgtagtagaccatttagtttttaaagaaggctttgttccacaagtgacaggacaagtcaagtcacttcatgctgttttgctgaatggatacggcagacctgtgttaacatttttaccattctgtgaaaacaaaatcctagatagtaggagaaaattacttacagaataaacctgaccagctagcaccctgacatcagatcattaacctactgcattttattggggataattcttgggacaatcttgagagccaagtgttttcattatgctttaaaaagtgttataaaaatggcctttttgaaaatgttgcattatttgttaaagataacatcaaattttctttggtctttctgagcatacctttgtaaaaactttgactcaatctgagtgtatagagggcatttgtcctgactggatcaaaatgtgctttagtaccctcatttttctaaactgtaggaacatactatttaaatatcagaagtaattcttcattctcacagtactaaatttcattttctgt

SEQ ID NO: 196944 - DNA, 2845 bp, Homo sapiens
  Payload ID: 18848
  Gene Name: ubiquitin A-52 residue ribosomal protein fusion product 1
  Uniprot ID: P62987
  ENST ID: ENST00000442744
  CDS Start-End: 59-445
ctttttcttcagcgaggcggccgagctggttggtggcggcggtcgtgcggacgcaaacatgcagatctttgtgaagaccctcactggcaaaaccatcacccttgaggtcgagcccagtgacaccattgagaatgtcaaagccaaaattcaagacaaggagggtatcccacctgaccagcagcgtctgatatttgccggcaaacagctggaggatggccgcactctctcagactacaacatccagaaagagtccaccctgcacctggtgttgcgcctgcgaggtggcattattgagccttctctccgccagcttgcccagaaatacaactgcgacaagatgatctgccgcaagtgctatgctcgccttcaccctcgtgctgtcaactgccgcaagaagaagtgtggtcacaccaacaacctgcgtcccaagaagaaggtcaaataaggtggttctttccttgaagggcagcctcctgcccaggccccgtggccctggagcctcaataaagtgtccctttcattgactggagcagcaattggtgtcctcatggctgatctgtccagggaggtggctgaagagtgggcatctcccttagggactctactcagcactccattctgtgccacctgtggggtcttctgtcctagattctgtcacatcggcattggtccctgccctatgcccctgactctggatttgtcatctgtaaaactggagtaaaaacctcagtcgtgtaattggtgggactgaggatcagttttgtcattgctgggatcctgtcaggcactttgaggtgtccctcaggccttggccctgaagtgtctaggtgtgtggagatgggtagaaaattaggtacacccaatggtgtagaacgttgattctcaaatttttttattttatacaaatggggtctcactatgttgtccaggctggtcttgaactcctgggctcaagccatccgcccatctcagcccctcaaagtgttgggattacaagcaagaactgccatgcctgacccagttctcagttttttgtttgtttgtttgtttgtttgttttgagacggagtcttgctctgtcgcccaggctggagtgcagtggcgcagtctcggcttactacaacctctgcctccggggttcacatccttctcctgcctcagcctcccgagtagctgggactacaggtgcccgccacaactcctggctaattttttgtatttttagtagagacggggtttcactgggttagccaggttggtctcgatctcctgaccttgtgatccattcgccttggcctcccagaatgctggtattacaggcgtgagccagcacgcctggcccagttactcagttttgaatctgaggccgtgacatcactcatggtctgcagtcagtgctctgcccctgagctgtaccctctcctatgataatcactcttaagaagggcaacccttggtgttttccccttaaggtcacccaggctggaatgcagtggtgtggtcatggctccctgtaccctggaactcaggcttgggtgatcctctctcctttgcctccgaagtagccaggactacaggtgtgcacccaccaccacactcagataattgctttggtgtttttaaagcttgtaatgatcagtaggctgaggtgggcaaatcataaggtcaagagttttttagatggggtgagcacagaccaattcctgttttatttactgatttaaaattttgagacagtctcactgtcacccaggttggggtgcagtggtaggatcatagcttgctgcagccttgatctcccaggatcttgcctcagcctcccgagtagctgggactgcatgcttgtgccaccacactcggttaatattttgtagagatggggtcttgctatgttgcccaggctggcttcaaactcctgaacttaaaagcctcctgtttagttttggttttttatcactttttttttttttttttgagatggagccttgctcccatcgtgcaggctggagtgcggtggcgcagtctcggctcactgcagcttctgcctctcgggttcaagcgattctcctttctcagcctcttgagtagctggaattaccagtgtgcgccaccaccaccacgcctggctagtttttctgtttttagtagagacagggttttgctatgttggccaggctggtcttgaactactgacctcttgtgatctacctgtcttggccttccaaagtgctaggattacaagcgtaagccacagcgcctggccttgctacatttttttttttttttttttttttacagacatggtctcgctatgttgcccagaatggttttgcactgggtccaagcagttctgccgcagcctcccaaagtgctgggattacaggggtgaggcaccttgctggcccctgttttgattagggtgcagtgctggtgaagccggtgcacgaggccagtgatgcatcctaatgaggggtggagttggcgggacttcctgggccagtttggggactttcacaaaagacccccatgactcagggttttgagttcttaactgatcgaatgaaggattcaaaattaaccactccaaggggggattgaaggaagaaccactcttaatggacaaaaagaaagaaaggggagggagtaacagggatatgagctctagccgcccaagctagcaatggcaacccttctgggtccccttccagcatgtggaagctttcctttcgcttcattcaataaacagctgctgctcactctcctggtccgtggactctttttgaactgttaacactccccgcaaaggtccgcagcttcattcttcaaagttagcgagaccaggaacc

SEQ ID NO: 196945 - DNA, 572 bp, Homo sapiens
  Payload ID: 18848
  Gene Name: ubiquitin A-52 residue ribosomal protein fusion product 1
  Uniprot ID: P62987
  ENST ID: ENST00000430157
  CDS Start-End: 95-481
gtgctccgtgcgcaagcgctttcggcggcgattaggtggtttccggttccgctatcttctttttcttcagcgaggcggccgagctgacgcaaacatgcagatctttgtgaagaccctcactggcaaaaccatcacccttgaggtcgagcccagtgacaccattgagaatgtcaaagccaaaattcaagacaaggagggtatcccacctgaccagcagcgtctgatatttgccggcaaacagctggaggatggccgcactctctcagactacaacatccagaaagagtccaccctgcacctggtgttgcgcctgcgaggtggcattattgagccttctctccgccagcttgcccagaaatacaactgcgacaagatgatctgccgcaagtgctatgctcgccttcaccctcgtgctgtcaactgccgcaagaagaagtgtggtcacaccaacaacctgcgtcccaagaagaaggtcaaataaggtggttctttccttgaagggcagcctcctgcccaggccccgtggccctggagcctcaataaagtgtccctttcattgactggagcagcaa

SEQ ID NO: 196946 - DNA, 779 bp, Homo sapiens
  Payload ID: 18848
  Gene Name: ubiquitin A-52 residue ribosomal protein fusion product 1
  Uniprot ID: P62987
  ENST ID: ENST00000595683
  CDS Start-End: 301-687
ggcggccgagctggttggtggcggcggtcgtgcggatggagtcttgctctgtcgcctaagctggagttcagtggtgcggtctcggctcactgcaatctccacctcccgggctcgagcgattcttctgcctcagcctcccgagtagctgggattataggcgcctgccaccacgcccagttgatttttgtagttttagtagagacggagtttcaccatgttagccaggctcatcttgaactcttgacctcaaatgatccgtctgcctcggccttccaaagtgctgggattacagacgcaaacatgcagatctttgtgaagaccctcactggcaaaaccatcacccttgaggtcgagcccagtgacaccattgagaatgtcaaagccaaaattcaagacaaggagggtatcccacctgaccagcagcgtctgatatttgccggcaaacagctggaggatggccgcactctctcagactacaacatccagaaagagtccaccctgcacctggtgttgcgcctgcgaggtggcattattgagccttctctccgccagcttgcccagaaatacaactgcgacaagatgatctgccgcaagtgctatgctcgccttcaccctcgtgctgtcaactgccgcaagaagaagtgtggtcacaccaacaacctgcgtcccaagaagaaggtcaaataaggtggttctttccttgaagggcagcctcctgcccaggccccgtggccctggagcctcaataaagtgtccctttcattgactggagcagcaat

SEQ ID NO: 196947 - DNA, 707 bp, Homo sapiens
  Payload ID: 18848
  Gene Name: ubiquitin A-52 residue ribosomal protein fusion product 1
  Uniprot ID: P62987
  ENST ID: ENST00000599551
  CDS Start-End: 230-616
gagagttttggtgtaattgagaaggaagctaagagtgttgggtgctccagcttggagttagagaggagagaggctgcgacaggaaggcatgtgtgttgtaggggatggcttcccatccaggctggcagcaggagcagcctgtgcagatcaggacctggctgccgtggaagagggtgggaccgccttcagggaagatggatctagcaagatgatgccaaaggacgcaaacatgcagatctttgtgaagaccctcactggcaaaaccatcacccttgaggtcgagcccagtgacaccattgagaatgtcaaagccaaaattcaagacaaggagggtatcccacctgaccagcagcgtctgatatttgccggcaaacagctggaggatggccgcactctctcagactacaacatccagaaagagtccaccctgcacctggtgttgcgcctgcgaggtggcattattgagccttctctccgccagcttgcccagaaatacaactgcgacaagatgatctgccgcaagtgctatgctcgccttcaccctcgtgctgtcaactgccgcaagaagaagtgtggtcacaccaacaacctgcgtcccaagaagaaggtcaaataaggtggttctttccttgaagggcagcctcctgcccaggccccgtggccctggagcctcaataaagtgtccctttcattgactggagcagcaa

SEQ ID NO: 196948 - DNA, 764 bp, Homo sapiens
  Payload ID: 18848
  Gene Name: ubiquitin A-52 residue ribosomal protein fusion product 1
  Uniprot ID: P62987
  ENST ID: ENST00000596273
  CDS Start-End: 299-685
atcttctttttcttcagcgaggcggccgagctgatggagtcttgctctgtcgcctaagctggagttcagtggtgcggtctcggctcactgcaatctccacctcccgggctcgagcgattcttctgcctcagcctcccgagtagctgggattataggcgcctgccaccacgcccagttgatttttgtagttttagtagagacggagtttcaccatgttagccaggctcatcttgaactcttgacctcaaatgatccgtctgcctcggccttccaaagtgctgggattacagacgcaaacatgcagatctttgtgaagaccctcactggcaaaaccatcacccttgaggtcgagcccagtgacaccattgagaatgtcaaagccaaaattcaagacaaggagggtatcccacctgaccagcagcgtctgatatttgccggcaaacagctggaggatggccgcactctctcagactacaacatccagaaagagtccaccctgcacctggtgttgcgcctgcgaggtggcattattgagccttctctccgccagcttgcccagaaatacaactgcgacaagatgatctgccgcaagtgctatgctcgccttcaccctcgtgctgtcaactgccgcaagaagaagtgtggtcacaccaacaacctgcgtcccaagaagaaggtcaaataaggtggttctttccttgaagggcagcctcctgcccaggccccgtggccctggagcctcaataaagtgtccctttcattga

SEQ ID NO: 196949 - DNA, 692 bp, Homo sapiens
  Payload ID: 18848
  Gene Name: ubiquitin A-52 residue ribosomal protein fusion product 1
  Uniprot ID: P62987
  ENST ID: ENST00000599595
  CDS Start-End: 17-403
tcctgcagacgcaaacatgcagatctttgtgaagaccctcactggcaaaaccatcacccttgaggtcgagcccagtgacaccattgagaatgtcaaagccaaaattcaagacaaggagggtatcccacctgaccagcagcgtctgatatttgccggcaaacagctggaggatggccgcactctctcagactacaacatccagaaagagtccaccctgcacctggtgttgcgcctgcgaggtggcattattgagccttctctccgccagcttgcccagaaatacaactgcgacaagatgatctgccgcaagtgctatgctcgccttcaccctcgtgctgtcaactgccgcaagaagaagtgtggtcacaccaacaacctgcgtcccaagaagaaggtcaaataagacatggtctcgctatgttgcccagaatggttttgcactgggtccaagcagttctgccgcagcctcccaaagtgctgggattacaggggtgaggcaccttgctggcccctgttttgattagggtgcagtgctggtgaagccggtgcacgaggccagtgatgcatcctaatgaggggtggagttggcgggacttcctgggccagtttggggactttcacaaaagacccccatgactcagggttttgagttcttaactgatcgaatgaaggattcaaaattaaccactcca

SEQ ID NO: 196950 - DNA, 743 bp, Homo sapiens
  Payload ID: 18848
  Gene Name: ubiquitin A-52 residue ribosomal protein fusion product 1
  Uniprot ID: P62987
  ENST ID: ENST00000595158
  CDS Start-End: 273-659
gagctggttggtggcggcggtcgtgcgggttcgcgccgggccgagagcgggttgggggctgcgggaggctgcaggggcctgggcggcagaagaggcggccctgagctggctcatgcgggccagtctcggcagggtggctgggcagggctcgcgaggccacggctcggagcccagaccggggcccaggaggcgagcgccgttttggagaggagcctgcctgctctgcctgccagcgtgaccccacgaggcctcgggcgggaagagacgcaaacatgcagatctttgtgaagaccctcactggcaaaaccatcacccttgaggtcgagcccagtgacaccattgagaatgtcaaagccaaaattcaagacaaggagggtatcccacctgaccagcagcgtctgatatttgccggcaaacagctggaggatggccgcactctctcagactacaacatccagaaagagtccaccctgcacctggtgttgcgcctgcgaggtggcattattgagccttctctccgccagcttgcccagaaatacaactgcgacaagatgatctgccgcaagtgctatgctcgccttcaccctcgtgctgtcaactgccgcaagaagaagtgtggtcacaccaacaacctgcgtcccaagaagaaggtcaaataaggtggttctttccttgaagggcagcctcctgcccaggccccgtggccctggagcctcaataaagtgtccctttcattgactgga

SEQ ID NO: 196951 - DNA, 357 bp, Homo sapiens
  Payload ID: 18848
  Gene Name: ubiquitin A-52 residue ribosomal protein fusion product 1
  ENST ID: ENST00000594527
  CDS Start-End: 1-345
gtcaaagccaaaattcaagacaaggagggtatcccacctgaccagcagcgtctgatatttgccggcaaacagctggaggatggccgcactctctcagactacaacatccagaaagagtccaccctgcacctggtgttgcgcctgcgaggtggcattattgagccttctctccgccagcttgcccagaaatacaactgcgacaagatgatctgccgcaaaagtgtggtcacaccaacaacctgcgtcccaagaagaaggtcaaataaggtggttctttccttgaagggcagcctcctgcccaggccccgtggccctggagcctcaataaagtgtccctttcattgactggagcagcaa

SEQ ID NO: 196952 - DNA, 927 bp, Homo sapiens
  Payload ID: 18848
  Gene Name: ubiquitin A-52 residue ribosomal protein fusion product 1
  ENST ID: ENST00000599256
  CDS Start-End: 738-927
gccgagctggttggtggcggcggtcgtgcgggttcgcgccgggccgagagcgggttgggggctgcgggaggctgcaggggcctgggcggcagaagaggcggccctgagctggctcatgcgggccagtctcggcagggtggctgggcagggctcgcgaggccacggctcggagcccagaccggggcccaggaggcgagcgccgttttggagaggagcctgcctgctctgcctgccagcgtgaccccacgaggcctcgggcgggaagaggtcctcggggcagatccgagttaatgagagaggggtattgagcgtgtagcgttaactctgccagtcactgcgtcagtcgctttggaaatactaaatttctcgagctgagtcttcatacctggctccattactacgtctgtaaggaggagctggtggtagtgtctgctttttagacttttctttagactatttgtatttttttcagatggagtcttgctctgtcgcctaagctggagttcagtggtgcggtctcggctcactgcaatctccacctcccgggctcgagcgattcttctgcctcagcctcccgagtagctgggattataggcgcctgccaccacgcccagttgatttttgtagttttagtagagacggagtttcaccatgttagccaggctcatcttgaactcttgacctcaaatgatccgtctgcctcggccttccaaagtgctgggattacagacgcaaacatgcagatctttgtgaagaccctcactggcaaaaccatcacccttgaggtcgagcccagtgacaccattgagaatgtcaaagccaaaattcaagacaaggagggtatcccacctgaccagcagcgtctgatatttgccggcaaacagctggaggatggccgcactctctcagactacaacatccagaaag

SEQ ID NO: 196953 - DNA, 554 bp, Homo sapiens
  Payload ID: 18848
  Gene Name: ubiquitin A-52 residue ribosomal protein fusion product 1
  Uniprot ID: P62987
  ENST ID: ENST00000596304
  CDS Start-End: 116-502
gttcgccagcatccaagatggcggcagggcggggcccaaggcgcggcgcgaattgtgacgcaggcgtccggcgtgctccgtgcgcaagcgctttcggcggcgattagacgcaaacatgcagatctttgtgaagaccctcactggcaaaaccatcacccttgaggtcgagcccagtgacaccattgagaatgtcaaagccaaaattcaagacaaggagggtatcccacctgaccagcagcgtctgatatttgccggcaaacagctggaggatggccgcactctctcagactacaacatccagaaagagtccaccctgcacctggtgttgcgcctgcgaggtggcattattgagccttctctccgccagcttgcccagaaatacaactgcgacaagatgatctgccgcaagtgctatgctcgccttcaccctcgtgctgtcaactgccgcaagaagaagtgtggtcacaccaacaacctgcgtcccaagaagaaggtcaaataaggtggttctttccttgaagggcagcctcctgcccaggccccgtggccctgga

SEQ ID NO: 196954 - DNA, 668 bp, Homo sapiens
  Payload ID: 18848
  Gene Name: ubiquitin A-52 residue ribosomal protein fusion product 1
  Uniprot ID: P62987
  ENST ID: ENST00000598780
  CDS Start-End: 262-648
agcgggttgggggctgcgggaggctgcaggggcctgggcggcagaagaggcggccctgagctggctcatgcgggccagtctcggcagggtggctgggcagggctcgcgaggccacggctcggagcccagaccggggcccaggaggcgagcgccgttttggagaggagcctgcctgctctgcctgccagcgtgaccccacgaggcctcgggcgggaagaggtcctcggggcagatccgagttaatgagagagggacgcaaacatgcagatctttgtgaagaccctcactggcaaaaccatcacccttgaggtcgagcccagtgacaccattgagaatgtcaaagccaaaattcaagacaaggagggtatcccacctgaccagcagcgtctgatatttgccggcaaacagctggaggatggccgcactctctcagactacaacatccagaaagagtccaccctgcacctggtgttgcgcctgcgaggtggcattattgagccttctctccgccagcttgcccagaaatacaactgcgacaagatgatctgccgcaagtgctatgctcgccttcaccctcgtgctgtcaactgccgcaagaagaagtgtggtcacaccaacaacctgcgtcccaagaagaaggtcaaataaggtggttctttccttgaagg

SEQ ID NO: 196955 - DNA, 508 bp, Homo sapiens
  Payload ID: 18848
  Gene Name: ubiquitin A-52 residue ribosomal protein fusion product 1
  ENST ID: ENST00000596272
  CDS Start-End: 1-417
cccagtgacaccattgagaatgtcaaagccaaaattcaagacaaggagggtatcccacctgaccagcagcgtctgatatttgccggcaaacagctggaggatggccgcactctctcagactacaacatccagaaagagtccaccctgcacctggtgttgcgcctgcgaggtggcattattgagccttctctccgccagcttgcccagaaatacaactgcgacaagatgatctgccgcaagtatgtgtgctccgatgcttggggggctgtgggggctgccggagtcggggtatgccctcacccacccctcctgtctctgtgcaggtgctatgctcgccttcaccctcgtgctgtcaactgccgcaagaagaagtgtggtcacaccaacaacctgcgtcccaagaagaaggtcaaataaggtggttctttccttgaagggcagcctcctgcccaggccccgtggccctggagcctcaataaagtgtccctttcattgactggagcagcaa

SEQ ID NO: 196956 - DNA, 514 bp, Homo sapiens
  Payload ID: 18848
  Gene Name: ubiquitin A-52 residue ribosomal protein fusion product 1
  Uniprot ID: P62987
  ENST ID: ENST00000597451
  CDS Start-End: 37-423
gtctatcctgcctcccttcctcctgcagacgcaaacatgcagatctttgtgaagaccctcactggcaaaaccatcacccttgaggtcgagcccagtgacaccattgagaatgtcaaagccaaaattcaagacaaggagggtatcccacctgaccagcagcgtctgatatttgccggcaaacagctggaggatggccgcactctctcagactacaacatccagaaagagtccaccctgcacctggtgttgcgcctgcgaggtggcattattgagccttctctccgccagcttgcccagaaatacaactgcgacaagatgatctgccgcaagtgctatgctcgccttcaccctcgtgctgtcaactgccgcaagaagaagtgtggtcacaccaacaacctgcgtcccaagaagaaggtcaaataaggtggttctttccttgaagggcagcctcctgcccaggccccgtggccctggagcctcaataaagtgtccctttcattgactggagcagcaa

SEQ ID NO: 196957 - DNA, 2005 bp, Homo sapiens
  Payload ID: 18849
  Gene Name: ubiquitin associated and SH3 domain containing A
  Uniprot ID: P57075
  ENST ID: ENST00000291535
  CDS Start-End: 85-1956
agcctcagccttgcctctccccctcttgctttatctcctcatttctgtgtgcaggcgagcttcttggcctaagggcaggaagagatggcagcgggggagacgcagctctacgccaaggtctccaacaagctcaagagccgcagcagcccctcgctcctggagcccctcctggccatgggcttcccggtgcacaccgcgctgaaagcgttggcagccacggggaggaagacggcggaggaggccttggcctggctgcatgatcattgcaatgacccttccctagacgaccccatcccccaggagtatgcccttttcctctgtccaacggggcccctgctggaaaaacttcaagagttctggagagagagcaagcgccagtgtgcaaagaacagagctcatgaggtcttcccacacgtgacactctgtgacttcttcacgtgtgaagaccagaaggtggaatgcctgtacgaggcgctgaagagagctggagacaggctcctgggctccttccccacggccgtgcctctggctctccactcctccatcagctacctcggcttcttcgtcagtggcagccccgcagacgtcatccgggaattcgccatgaccttcgccacggaagcatctctcttagcagactgctccgtgaagccttgcaccaaacagctgcatctgaccttggcccacaagttctacccccaccaccagaggacgctggagcagctggccagagccatccccctgggccacagctgccagtggaccgcagcactctactcccgagacatgcgctttgtgcactaccagaccctgagagccctattccagtacaaaccccagaacgtggatgagctgacgctaagtcctggtgactacatctttgtggaccccacgcagcaggacgaagccagcgagggctgggtgattgggatctcacagcggacgggctgccggggcttcctgccggaaaactacacggatcgagccagtgagtctgacacgtgggtgaagcacaggatgtacaccttcagtctagccacagacctgaactccagaaaggatggtgaagccagcagcagatgcagcggggaatttcttccacaaacggcaaggagtcttagcagcttacaggccttgcaggctaccgttgcaaggaagagcgtgctggtggttcgccacggggagagagtggatcagatcttcgggaaggcatggctgcagcaatgctccactcctgatgggaaatactacaggccagacctgaatttcccctgcagtctgccaagacggagtcgtgggatcaaagactttgaaaacgatcccccattatcatcgtgtggcattttccagtccagaattgcaggggacgcgctactggacagtggtatcagaatcagctctgtgtttgcctccccagccctccgctgtgtgcagacggccaaactcatcctggaagaactcaaactggagaaaaaaatcaagatacgagtggaacctggaatctttgaatggacaaaatgggaagctggcaaaaccaccccaaccctcatgagcctggaagagctgaaagaggcaaatttcaacattgacactgattacaggcccgcgtttcccctgtccgccctcatgccggccgagagctaccaggagtacatggacaggtgcacggcgagcatggtgcaaatcgtcaacacctgtccacaggacacgggtgtcatcctaattgtgagtcacggctccactctggactcctgcacgcggccactgctcgggctgccgccccgggaatgtggggattttgcccaactcgtgagaaagatcccttccctgggcatgtgcttctgtgaagaaaataaagaggaaggaaaatgggagttggtgaacccaccggtgaagaccctgacccacggggcgaacgcagcatttaactggaggaactggatctcaggcaactgagagccacggtgatgttgtcataacctcagagtggagaggcagaaaccat

SEQ ID NO: 196958 - DNA, 2504 bp, Homo sapiens
  Payload ID: 18849
  Gene Name: ubiquitin associated and SH3 domain containing A
  Uniprot ID: P57075
  ENST ID: ENST00000319294
  CDS Start-End: 32-2017
ggcgagcttcttggcctaagggcaggaagagatggcagcgggggagacgcagctctacgccaaggtctccaacaagctcaagagccgcagcagcccctcgctcctggagcccctcctggccatgggcttcccggtgcacaccgcgctgaaagcgttggcagccacggggaggaagacggcggaggaggccttggcctggctgcatgatcattgcaatgacccttccctagacgaccccatcccccaggagtatgcccttttcctctgtccaacggggcccctgctggaaaaacttcaagagttctggagagagagcaagcgccagtgtgcaaagaacagagctcatgaggtcttcccacacgtgacactctgtgacttcttcacgtgtgaagaccagaaggtggaatgcctgtacgaggcgctgaagagagctggagacaggctcctgggctccttccccacggccgtgcctctggctctccactcctccatcagctacctcggcttcttcgtcagtggcagccccgcagacgtcatccgggaattcgccatgaccttcgccacggaagcatctctcttagcaggcacttccgtttcccgcttctggattttcagccaggtgcctggacatggccctaacctgaggctgagcaatttaactagagcctccttcgtgagccactacatccttcaaaaatactgctccgtgaagccttgcaccaaacagctgcatctgaccttggcccacaagttctacccccaccaccagaggacgctggagcagctggccagagccatccccctgggccacagctgccagtggaccgcagcactctactcccgagacatgcgctttgtgcactaccagaccctgagagccctattccagtacaaaccccagaacgtggatgagctgacgctaagtcctggtgactacatctttgtggaccccacgcagcaggacgaagccagcgagggctgggtgattgggatctcacagcggacgggctgccggggcttcctgccggaaaactacacggatcgagccagtgagtctgacacgtgggtgaagcacaggatgtacaccttcagtctagccacagacctgaactccagaaaggatggtgaagccagcagcagatgcagcggggaatttcttccacaaacggcaaggagtcttagcagcttacaggccttgcaggctaccgttgcaaggaagagcgtgctggtggttcgccacggggagagagtggatcagatcttcgggaaggcatggctgcagcaatgctccactcctgatgggaaatactacaggccagacctgaatttcccctgcagtctgccaagacggagtcgtgggatcaaagactttgaaaacgatcccccattatcatcgtgtggcattttccagtccagaattgcaggggacgcgctactggacagtggtatcagaatcagctctgtgtttgcctccccagccctccgctgtgtgcagacggccaaactcatcctggaagaactcaaactggagaaaaaaatcaagatacgagtggaacctggaatctttgaatggacaaaatgggaagctggcaaaaccaccccaaccctcatgagcctggaagagctgaaagaggcaaatttcaacattgacactgattacaggcccgcgtttcccctgtccgccctcatgccggccgagagctaccaggagtacatggacaggtgcacggcgagcatggtgcaaatcgtcaacacctgtccacaggacacgggtgtcatcctaattgtgagtcacggctccactctggactcctgcacgcggccactgctcgggctgccgccccgggaatgtggggattttgcccaactcgtgagaaagatcccttccctgggcatgtgcttctgtgaagaaaataaagaggaaggaaaatgggagttggtgaacccaccggtgaagaccctgacccacggggcgaacgcagcatttaactggaggaactggatctcaggcaactgagagccacggtgatgttgtcataacctcagagtggagaggcagaaaccatgtgcagaggctgggagatgctgctgtttccagaggcgtcttagtctcacccaatgtgatttgtagaagcacgagacgcacttttatatcccggaatatttccctccggctttcgcctttgtaactcccatctgtggacccatcgtccaccagcccagctgcggggagcacagggcaggtggctgggtgaggatgccgccctgcagcatgtacaccgagtgtctgcagctggggacacaactgcccgggactctaacttccaggaattaaagactcaccacacacgaaggatctaaccacttcattttccatggtctaatcattaaattcccaatcgttttttctttttctgggtccatcactctttagccatatccacatgggctaaaacaggtgtaatagtcaataaaatggtcccagaaaaccatcgaccaggtca

SEQ ID NO: 196959 - DNA, 1733 bp, Homo sapiens
  Payload ID: 18849
  Gene Name: ubiquitin associated and SH3 domain containing A
  Uniprot ID: P57075
  ENST ID: ENST00000398367
  CDS Start-End: 30-1610
cgagcttcttggcctaagggcaggaagagatggcagcgggggagacgcagctctacgccaaggtctccaacaagctcaagagccgcagcagcccctcgctcctggagcccctcctggccatgggcttcccggtgcacaccgcgctgaaagcgttggcagccacggggaggaagacggcggaggaggccttggcctggctgcatgatcattgcaatgacccttccctagacgaccccatcccccaggagtatgcccttttcctctgtccaacggggcccctgctggaaaaacttcaagagttctggagagagagcaagcgccagtgtgcaaagaacagagctcatgaggtcttcccacacgtgacactctgtgacttcttcacgtgtgaagaccagaaggtggaatgcctgtacgaggcgctgaagagagctggagacaggctcctgggctccttccccacggccgtgcctctggctctccactcctccatcagctacctcggcttcttcgtcagtggcagccccgcagacgtcatccgggaattcgccatgaccttcgccacggaagcatctctcttagcagactgctccgtgaagccttgcaccaaacagctgcatctgaccttggcccacaagttctacccccaccaccagaggacgctggagcagctggccagagccatccccctgggccacagctgccagtggaccgcagcactctactcccgagacatgcgctttgtgcactaccagaccctgagagccctattccagtacaaaccccagaacgtggatgagctgacgctaagtcctggtgactacatctttgtggaccccacgcagcaggacgaagccagcgagggctgggtgattgggatctcacagcggacgggctgccggggcttcctgccggaaaactacacggatcgagccagtgagtctgacacgtgggtgaagcacaggatgtacaccttcagtctagccacagacctgaactccagaaaggatggtgaagccagcagcagatgcagcggggaatttcttccacaaacggcaaggagtcttagcagcttacaggccttgcaggctaccgttgcaaggaagagcgtgctggtggttcgccacggggagagagtggatcagatcttcgggaaggcatggctgcagcaatgctccactcctgatgggaaatactacaggccagacctgaatttcccctgcagtctgccaagacggagtcgtgggatcaaagactttgaaaacgatcccccattatcatcgtgtggcattttccagtccagaattgcaggggacgcgctactggacagtggtatcagaatcagctctgtgtttgcctccccagccctccgctgtgtgcagacggccaaactcatcctggaagaactcaaactggagaaaaaaatcaagatacgagtggaacctggaatctttgaatggacaaaatgggaagctggcaaaaccaccccaaccctcatgagcctggaagagctgaaagaggcaaatttcaacattgacactgattacagatcccttccctgggcatgtgcttctgtgaagaaaataaagaggaaggaaaatgggagttggtgaacccaccggtgaagaccctgacccacggggcgaacgcagcatttaactggaggaactggatctcaggcaactgagagccacggtgatgttgtcataacctcagagtggagaggcagaaaccat

SEQ ID NO: 196960 - DNA, 567 bp, Homo sapiens
  Payload ID: 18849
  Gene Name: ubiquitin associated and SH3 domain containing A
  ENST ID: ENST00000635189
  CDS Start-End: 61-567
aaacaagtcaatgaatgactgaaagaaccagcgagcttcttggcctaagggcaggaagagatggcagcgggggagacgcagctctacgccaaggtctccaacaagctcaagagccgcagcagcccctcgctcctggagcccctcctggccatgggcttcccggtgcacaccgcgctgaaagcgttggcagccacggggaggaagacggcggaggaggccttggcctggctgcatgatcattgcaatgacccttccctagacgaccccatcccccaggagtatgcccttttcctctgtccaacggggcccctgctggaaaaacttcaagagttctggagagagagcaagcgccagtgtgcaaagaacagagctcatgaggtcttcccacacgtgacactctgtgacttcttcacgtgtgaagaccagaaggtggaatgcctgtacgaggcgctgaagagagctggagacaggctcctgggctccttccccacggccgtgcctctggctctccactcctccatcagctacctcggcttcttcgtcagtggcagccccgcagacgtcatc

SEQ ID NO: 196961 - DNA, 2754 bp, Homo sapiens
  Payload ID: 18849
  Gene Name: ubiquitin associated and SH3 domain containing A
  ENST ID: ENST00000473381
  CDS Start-End: 30-1385
cgagcttcttggcctaagggcaggaagagatggcagcgggggagacgcagctctacgccaaggtctccaacaagctcaagagccgcagcagcccctcgctcctggagcccctcctggccatgggcttcccggtgcacaccgcgctgaaagcgttggcagccacggggaggaagacggcggaggaggccttggcctggctgcatgatcattgcaatgacccttccctagacgaccccatcccccaggagtatgcccttttcctctgtccaacggggcccctgctggaaaaacttcaagagttctggagagagagcaagcgccagtgtgcaaagaacagagctcatgaggtcttcccacacgtgacactctgtgacttcttcacgtgtgaagaccagaaggtggaatgcctgtacgaggcgctgaagagagctggagacaggctcctgggctccttccccacggccgtgcctctggctctccactcctccatcagctacctcggcttcttcgtcagtggcagccccgcagacgtcatccgggaattcgccatgaccttcgccacggaagcatctctcttagcagactgctccgtgaagccttgcaccaaacagctgcatctgaccttggcccacaagttctacccccaccaccagaggacgctggagcagctggccagagccatccccctgggccacagctgccagtggaccgcagcactctactcccgagacatgcgctttgtgcactaccagaccctgagagccctattccagtacaaaccccagaacgtggatgagctgacgctaagtcctggtgactacatctttgtggaccccacgcagcaggacgaagccagcgagggctgggtgattgggatctcacagcggacgggctgccggggcttcctgccggaaaactacacggatcgagccagtgagtctgacacgtgggtgaagcacaggatgtacaccttcagtctagccacagacctgaactccagaaaggatggtgaagccagcagcagatgcagcggggaatttcttccacaaacggcaaggagtcttagcagcttacaggccttgcaggctaccgttgcaaggaagagcgtgctggtggttcgccacggggagagagtggatcagatcttcgggaaggcatggctgcagcaatgctccactcctgatgggaaatactacaggccagacctgaatttcccctgcagtctgccaagacggagtcgtgggatcaaagactttgaaaacgatcccccattatcatcgtgtggcattttccagtccagaattgcaggtatgtttgaggactgtctagtaggaaaggtaacaataacagcaacactgattatggctagcaggcatccagcctgagccctagctacacaccctttgatacagtgttagctttgtctccagtctgctgaggaggctggggcacagagaggttaagcaacttgcccaaggtcacacagcaagaaagtggcaatgtagaggtttgatctaggaatggatgattcaggaagttggcaggaatgaaagaaaggcatggaaagaacaagagaggggaggaaaaatcaacaaccaaggagctccaaggagctcacttttcaaatggaaaaccacatcctctcattcgttggttttatttcaaaatctgtcactttgggcttttgtttcatgtctggcggttctgcttctacgtgactgagtttatgtaaacagaagagaccattgagttcatcgagtcttcatttcctaaattcagaaaatggaatccagagaagcaagttacaccaatggttaactgcagagacccccacggcccactcgcccagggccccactcagagccctccgctgtgtgcagacggccaaactcatcctggaaggtcagtgagaacctcgaactcaaactggagaaaaaaatcaagatacgagtggaacctggaatctttgaatggacaaaatgggaagctggcaaaaccaccccaaccctcatgagcctggaagagctgaaagaggcaaatttcaacattgacactgattacaggcccgcgtttcccctgtccgccctcatgccggccgagagctaccaggagtacatggacaggtgcacggcgagcatggtgcaaatcgtcaacacctgtccacaggacacgggtgtcatcctaattgtgagtcacggctccactctggactcctgcacgcggccactgctcgggctgccgccccgggaatgtggggattttgcccaactcgtgagaaagatcccttccctgggcatgtgcttctgtgaagaaaataaagaggaaggaaaatgggagttggtgaacccaccggtgaagaccctgacccacggggcgaacgcagcatttaactggaggaactggatctcaggcaactgagagccacggtgatgttgtcataacctcagagtggagaggcagaaaccatgtgcagaggctgggagatgctgctgtttccagaggcgtcttagtctcacccaatgtgatttgtagaagcacgagacgcacttttatatcccggaatatttccctccggctttcgcctttgtaactcccatctgtggacccatcgtccaccagcccagctgcggggagcacagggcaggtggctgggtgaggatgccgccctgcagcatgtacaccgagtgtctgcagctggggacacaactgcccgggactctaacttccaggaattaaagactcaccacacacgaa

SEQ ID NO: 196962 - DNA, 572 bp, Homo sapiens
  Payload ID: 18849
  Gene Name: ubiquitin associated and SH3 domain containing A
  ENST ID: ENST00000635108
  CDS Start-End: 66-233
cccctcttgctttatctcctcatttctgtgtgcaggcgagcttcttggcctaagggcaggaagagatggcagcgggggagacgcagctctacgccaaggtctccaacaagctcaagagccgcagcagcccctcgctcctggagcccctcctggccatgggcttcccggtgcacaccgcgctgaaagcgttggcagccacggggaggaagacggcggaggaggccttggcctgacgaccccatcccccaggagtatgcccttttcctctgtccaacggggcccctgctggaaaaacttcaagagttctggagagagagcaagcgccagtgtgcaaagaacagagctcatgaggtcttcccacacgtgacactctgtgacttcttcacgtgtgaagaccagaaggtggaatgcctgtacgaggcgctgaagagagctggagacaggctcctgggctccttccccacggccgtgcctctggctctccactcctccatcagctacctcggcttcttcgtcagtggcagccccgcagacgtcatccgggaattcgccatgaccttcgccacggaagc

SEQ ID NO: 196963 - DNA, 696 bp, Homo sapiens
  Payload ID: 18849
  Gene Name: ubiquitin associated and SH3 domain containing A
  ENST ID: ENST00000634718
  CDS Start-End: 35-151
gcaggcgagcttcttggcctaagggcaggaagagatggcagcgggggagacgcagctctacgccaaggtctccaacaagctcaagagccgcagcagcccctcgctcctggagcccctcctggccatgggcttcccggtgcacaccgcgtgagtactgcccagagaccccggggcccagccagtaaggctggtgccagaccctgctgcggcccccggcatggagctgcaggggtgtagggtacggcttcctgccaaagcagtgcaccttgcagggctgaaagcgttggcagccacggggaggaagacggcggaggaggccttggcctggctgcatgatcattgcaatgacccttccctagacgaccccatcccccaggagtatgcccttttcctctgtccaacggggcccctgctggaaaaacttcaagagttctggagagagagcaagcgccagtgtgcaaagaacagagctcatgaggtcttcccacacgtgacactctgtgacttcttcacgtgtgaagaccagaaggtggaatgcctgtacgaggcgctgaagagagctggagacaggctcctgggctccttccccacggccgtgcctctggctctccactcctccatcagctacctcggcttcttcgtcagtggcagccccgcagacgtcatccgggaattcgccatgaccttcgccacgga

SEQ ID NO: 196964 - DNA, 2095 bp, Homo sapiens
  Payload ID: 18849
  Gene Name: ubiquitin associated and SH3 domain containing A
  ENST ID: ENST00000635325
  CDS Start-End: 66-1631
cccctcttgctttatctcctcatttctgtgtgcaggcgagcttcttggcctaagggcaggaagagatggcagcgggggagacgcagctctacgccaaggtctccaacaagctcaagagccgcagcagcccctcgctcctggagcccctcctggccatgggcttcccggtgcacaccgcgctgaaagcgttggcagccacggggaggaagacggcggaggaggccttggcctggctgcatgatcattgcaatgacccttccctagacgaccccatcccccaggagtatgcccttttcctctgtccaacggggcccctgctggaaaaacttcaagagttctggagagagagcaagcgccagtgtgcaaagaacagagctcatgaggtcttcccacacgtgacactctgtgacttcttcacgtgtgaagaccagaaggtggaatgcctgtacgaggcgctgaagagagctggagacaggctcctgggctccttccccacggccgtgcctctggctctccactcctccatcagctacctcggcttcttcgtcagtggcagccccgcagacgtcatccgggaattcgccatgaccttcgccacggaagcatctctcttagcagactgctccgtgaagccttgcaccaaacagctgcatctgaccttggcccacaagttctacccccaccaccagaggacgctggagcagctggccagagccatccccctgggccacagctgccagtggaccgcagcactctactcccgagacatgcgctttgtgcactaccagaccctgagagccctattccagtacaaaccccagaacgtggatgagctgacgctaagtcctggtgactacatctttgtggaccccacgcagcaggacgaagccagcgagggctgggtgattgggatctcacagcggacgggctgccggggcttcctgccggaaaactacacggatcgagccagtgagtctgacacgtgggtgaagcacaggatgtacaccttcagtctagccacagacctgaactccagaaaggatggtgaagccagcagcagatgcagcggggaatttcttccacaaacggcaaggagtcttagcagcttacaggccttgcaggctaccgttgcaaggaagagcgtgctggtggttcgccacggggagagagtggatcagatcttcgggaaggcatggctgcagcaatgctccactcctgatgggaaatactacaggccagacctgaatttcccctgcagtctgccaagacggagtcgtgggatcaaagactttgaaaacgatcccccattatcatcgtgtggcattttccagtccagaattgcaggggacgcgctactggacagtggtatcagaatcagctctgtgtttgcctccccagccctccgctgtgtgcagacggccaaactcatcctggaagaactcaaactggagaaaaaaatcaagatacgagtggaacctggaatctttgaatggacaaaatgggaagctggcaaaaccaccccaaccctcatgagcctggaagagctgaaagaggcaaatttcaacattgacactgattacagttttcagcacaaaactggagcctgcctgttgaccatgagcctgccttgaggcagagccatcctggaagaacgttctccttccccagctaactgcagctgagccttcctaatccctacgaaagtgccagggcagcagcctctccttctcatccttccaggcccgcgtttcccctgtccgccctcatgccggccgagagctaccaggagtacatggacaggtgcacggcgagcatggtgcaaatcgtcaacacctgtccacaggacacgggtgtcatcctaattgtgagtcacggctccactctggactcctgcacgcggccactgctcgggctgccgccccgggaatgtggggattttgcccaactcgtgagaaagatcccttccctgggcatgtgcttctgtgaagaaaataaagaggaaggaaaatgggagttggtgaacccaccggtgaagaccctgacccacggggcgaacgcagcatttaactggaggaactggatctcaggcaactga

SEQ ID NO: 196965 - DNA, 6912 bp, Homo sapiens
  Payload ID: 18850
  Gene Name: ubiquitin associated and SH3 domain containing B
  Uniprot ID: Q8TF42
  ENST ID: ENST00000284273
  CDS Start-End: 376-2325
cagcccacaaggctccttttcctttttgatccattcaaaaattactcattgcaaattcccggactgctaggcgaggagagggaagggggcggaggagacagggctactgcaggcgcagagctgggggcagccgggggcccgagtggctgaggctggtcccgcagcggccgcttgccggcgttctggctcctgtggcctcaccaggaagcgtcagagtcccgacactggggaagctcggagcgccgcctccgctgccgccgcctcctgcctggctctgggtccccgagccccctcccctggcccagcccgactccctcctccttcccgaaccatccggctcgggctccttccctggcgatggctggccgctgagccatggctcagtacggccaccccagtccgctcggcatggctgcgagagaggagctgtacagcaaagtcaccccccggaggaaccgccaacagcgccccggcaccatcaagcatggatcggcgctggacgtgctcctctccatggggttccccagagcccgcgcacaaaaagccttggcatccacgggaggaagaagtgttcaggcagcatgtgactggttattctcccatgtcggtgaccccttcctggatgaccccctgccccgggagtacgtcctctacctccgtcccaccggccccttagcacagaagctttccgacttttggcagcagtcgaagcagatctgcgggaagaacaaggcacacaacatcttcccccacatcacactctgccagttctttatgtgcgaggacagcaaggtggatgccctgggggaagccctgcagaccacggtcagtcgctggaaatgtaagttctcggccccgctgcccctggagctctatacgtcgtccaacttcatcggcctctttgtaaaggaagacagtgcggaggtcctcaagaagtttgctgctgactttgctgcagaggctgcatccaaaaccgaagtgcatgtggaacctcataagaagcagctacatgtgaccctggcttaccacttccaagccagccacctacccaccctagagaaactggcccagaacattgacgtcaagctagggtgtgactgggtggctaccatattttctcgggatatccgatttgctaaccatgagacattacaggtcatctacccctataccccacaaaatgacgatgagctggagctggtccccggggacttcatcttcatgtctccaatggagcagaccagcaccagcgagggttggatctatggcacgtccttaaccaccggctgctctggactcctgcctgagaattacattaccaaggctgatgaatgcagcacctggatatttcatggttcttattcaatcttaaatacatcgtcatccaactctctcacgtttggggatggagtattggagaggcggccttatgaggaccaggggctcggggagacgactcctcttactatcatctgccagcccatgcagccgctgagggtcaacagccagcccggcccccagaagcgatgcctttttgtgtgtcggcatggtgagaggatggatgttgtgtttgggaagtactggctgtcccagtgcttcgatgccaaaggccgctacatacgcaccaacctgaacatgcctcatagtttacctcagcggagtggtggtttccgagattacgagaaagatgctcccatcactgtgtttggatgcatgcaagcaagactagtgggtgaagccttattagagagcaataccattatcgatcatgtctattgctccccgtcccttcgctgcgttcagactgcacacaatatcttgaaaggtttacaacaagaaaatcacttgaagatccgtgtagagcccggcttatttgagtggacaaaatgggttgctgggagcacattacctgcatggatacctccatcagagttagctgcagccaacctgagtgttgatacaacctacagacctcacattccaatcagcaaattagttgtttcagaatcctatgatacttatatcagtagaagtttccaagtaacaaaagaaataataagtgaatgtaaaagtaaaggaaataacatcctgattgtggcccacgcatcttcccttgaagcgtgtacctgccaacttcagggcctgtcacctcagaactccaaggacttcgtacaaatggtccgaaagatcccatatctgggattttgttcctgtgaagaattaggagaaactggaatatggcagctgacagatccaccaatccttcctcttacccatggaccaactgggggcttcaactggagagagaccttgcttcaagaataaaccacaccagtgaacaagaaggaaaggccttttggagtgtgtctttctgtgtgtttaaaaacagtgggaaaatccacaccacactctaagtggacagctcagaataatttagcatatttcctttcacacttaaagttcttaagatgagactgtgtaaatgagagaaagacttgattcagaggaaaaaaatgtgttctctctggactcttgcctagctcacaaggctttggagaattgtcttcctaaatcggggcacctgctacagaagagaatgtttcgttccctctgggtatgcacagctaaggggcctcatttctcccagagggagctgctggcccgctctaaggggtgcaagaggaaggagtgtgcccagaccagctgggggagcattgaaaggacagcttggggatggaatttttttttttttatctccattttccagttaggtagagccaagctgaggaatccttttaagattattagaaaacatgccctgaagagagttgttcttaggttacacatgaaatcctaccgtcactagcccccatacaccagtgttgctggctgaagatacccgcttaaggatgctaacatttaccctggtactgccacattttctctagagcagctggcccttcttgctacagccctatcccccctccttgcttctgtgaaatggggagacaaagcacttttgctctccaaagcacttttggatactcaggaggaaagataagatacatgtttgaagtattcaatcataggagcaaagaacttgcaaaatatgaagtgacttggaattaaccatgttgtagcctaacgtgctactgcatttctaaatcatcaatatttgcttgtctttgcccctagactctagactatgttaactagttaaggatgttacattttgaaaggatgtatgttagatatattatttgcagcaagaagttcattctgtgcaatatggacatgtttgcaaaccataccaagggtcaggttgttgtacacttacagtacgtgtcaaccataatggaacatccacaaatgcatcaattataccagggatgtatagtaagtcagggaactaatataaatgatgacagtcatggctgcactgctacttgtgctgtcgttttgtttgtttttctatgataatttaaaatacataggtagggctactgaggaaatttggagagccacattctgtggtttctcattatacttacttcctgcatttagagggagtttatttaaaagaaataaatgacaatcaaaccaaatcatcagttatcaatgtctgtttaattgtgtgactatctgactgttgatggccacagatgatggtctcctatggtatagttcactctgtagaagatgtatgcaaagtgaaatgccagccctttaaagagacattagttagtgtaaaatggatctttacatgttgcagtaacattgactatgtttcaaaactcagatgcataaaacgtaaggtatataaaaatacatctatgcttgcgtttgaaactacaacttgataacccctagaaagaagaggacatgaaaggatgctggctatatatgttaatgagcaaaaggattatagttgttttgttttgtttttagagacagggtctcactataatgcttagactggtcttgaactcctgggctcaagcgatcctcctgcccctgtctcccaaagtgctaggattacaggtgtgagccaccacacctggcccatagttgtattttttttaggtcacttagaaaaatatgtcatgtattttacattttgagaaacaaatcaatcatggtttcttctagcgttgcgcaaacactgacccagcttctgggtatggaaataaccctgtgatgatgtgttaatataaaatgttgggagggaatattcccaataaaggtcttaagagaaaagtcacattacaagtaatgtaatggctctaccattcattcttctggtatttgtaatgaagtgaatccactgtttaatcagatccataatctttaacagattcaccacaaattttcatgggcgttgagtgctcagaataatgcttgaacacctcaccttgaaactgtagcagtgtgttctgggcagtatctgtaatgtatgaaatagagtctggaataggttatccactccatcttctaggttatcttagttgtatgacgaactgataaatctgtctgactgggctacaatccattgttcttagtccaatatggacactgccttaggcaatggtctatataagcaaaaggagatagagatctgaaataattttccgaataattcaggtggaaaacaagaaagattgtatttctctgctttcatttcaatttcattatttcaaattgcttgtcaaaatggcccaaaagatctgaattcacattaagttccccttgcacacttacctatttaaaaaactaaacttgcactgcaactgagaaattatttgtaaatcatgtggcatctatgtataataaaagaaagagacaactatattactcaatttcatatacatccaaaaagtataggctaatatatataacctgaagttgcagctggttctttttgatctgaagctgatgcttattaaaacaaatgatgtatggggagaggagaaggaagggcaaggaaggaattgacagataagaagcaaatggtttcttgtacagaggaattttgttttaatgtagaaagttatttgaaataaactaggtgaaatgaaattaactaaaggttttaatctgggattgaaagcctgaaagcatttcctgcttctacaagtgtgccacatcaatccggtaatgccccagtgttattcacagacagaactttgtttcctgtgattttaaaataccgcgtctgttcctccatggaccagagtaattggcacattttaatgcataagctgggggtttcattttcccaggctctcttcaccatcactgcattggtagctaggagcttattgcttcaccccagtatggagttcagattacagtgttttccattacatttagattcatagaatctgaatggctgattaaatggccatctgatggctgaaagaggggcgtatttttcactctgtagtgaaaggcttggaggagtttctactttttattttaattatactttaaccaaagaattattttaaagtaaccttatatttaaaagatgattttgcaaaaaataaaaaataaaaaatatgccttctggagtgatgtctgtttggtaaatcattgttgataatttccttgttagtggtatttggaatgcatatagattgtcttgtcattgtgcttaacattaccataagtgtgtcttttccactcaactagctgtattcgtattaaaatgaagtctcttatttcaattacctagtgttgttgggaactaattgaacagctacagtaaaagaagttcctatctcattgcctttgtggaaaggcttccctatgtggtaaaagaaaggcattcctccgtaacctaggcactctgcaagtccagtgtttaatttcaaagcagtgatgaattgctcttttgaaattactctaagtaatccatgtgttagaatacagatgaacctccgtttgatttcacagccttcagcacaggcaactgttactgagtctgcacgaacttagataatgaggtgcagggttatttgcatttaaattgcaatccagcacacgtgtgagaaagaagaggcactagtctaaaaggctgcattgcggggagagatgagacaggcagaggagggtggggtaaagagcgatttaacatctatttaggttaatgttcactttacaaaggtgatgggggatattttgttaggtgatagcagaagcttttcatttttaaacatagaattaaaattggatttgcttctctttaatacttcaacatattgaatttccctaggaaagtgactagctataatgaaaattcaagcgaaaagggaaaaagattgtaaatgcagatgaaataacttcatttttaagtacaaataatagtaggattggtgtatgtaggtttaaaattatagtgatgactagtcgaacttaatatacaatcagttcttgcaaatactttacacttagctgccattacacaacaaattggaattttccagctgttcaactatcatggactctgtacaggatagatgtgtataatggaaaatatgtactgcttctttctttgattgccactcaagatggaaacaccatgccaaggcattttggttatacacagatcattctaaacctgttattttggagaggtgtattggtttctttctcatttataaggctattgtatttttttttgtatgtgattcaggtgtatttatttgaagactatttgtagttataggaaaaccacacctacctgtattgccaaattctttgtaaactctccgtggcacttgtgctttcctggctgagagctctcccctgttgatacagctatggcaccattgtaattacagatgcacctttcaggagcatctccattaaatggttcatagatgatttaataaaaagaaacttctcagttga

SEQ ID NO: 196966 - DNA, 2735 bp, Homo sapiens
  Payload ID: 18851
  Gene Name: ubiquitin associated protein 1
  Uniprot ID: Q9NZ09
  ENST ID: ENST00000297661
  CDS Start-End: 236-1744
aaatgagtggggcggtgaggggaaggaggagggaagtaggacttcaacatggcggctgcggcactggcggtggctacggtgacggcctggcccggagcgggcagagttggaggtggtggcgttcgctctccctaggggctgtcgggagctcagcggggaccgagcctgggaggccggccggtgccagcacctttcggcttctgagacggcggcagcagcggcattcaggttctaaatggcttctaagaagttgggtgcagattttcatgggactttcagttaccttgatgatgtcccatttaagacaggagacaaattcaaaacaccagctaaagttggtctacctattggcttctccttgcctgattgtttgcaggttgtcagagaagtacagtatgacttctctttggaaaagaaaaccattgagtgggctgaagagattaagaaaatcgaagaagccgagcgggaagcagagtgcaaaattgcggaagcagaagctaaagtgaattctaagagtggcccagagggcgatagcaaaatgagcttctccaagactcacagtacagccacaatgccacctcctattaaccccatcctcgccagcttgcagcacaacagcatcctcacaccaactcgggtcagcagtagtgccacgaaacagaaagttctcagcccacctcacataaaggcggatttcaatcttgctgactttgagtgtgaagaagacccatttgataatctggagttaaaaactattgatgagaaggaagagctgagaaatattctggtaggaaccactggacccattatggctcagttattggacaataacttgcccaggggaggctctgggtctgtgttacaggatgaggaggtcctggcatccttggaacgggcaaccctagatttcaagcctcttcataaacccaatggctttataaccttaccacagttgggcaactgtgaaaagatgtcactgtcttccaaagtgtccctcccccctatacctgcagtaagcaatatcaaatccctgtctttccccaaacttgactctgatgacagcaatcagaagacagccaagctggcgagcactttccatagcacatcctgcctccgcaatggcacgttccagaattccctaaagccttccacccaaagcagtgccagtgagctcaatgggcatcacactcttgggctttcagctttgaacttggacagtggcacagagatgccagccctgacatcctcccagatgccttccctctctgttttgtctgtgtgcacagaggaatcatcacctccaaatactggtcccacggtcacccctcctaatttctcagtgtcacaagtgcccaacatgcccagctgtccccaggcctattctgaactgcagatgctgtcccccagcgagcggcagtgtgtggagacggtggtcaacatgggctactcgtacgagtgtgtcctcagagccatgaagaagaaaggagagaatattgagcagattctcgactatctctttgcacatggacagctttgtgagaagggcttcgaccctcttttagtggaagaggctctggaaatgcaccagtgttcagaagaaaagatgatggagtttcttcagttaatgagcaaatttaaggagatgggctttgagctgaaagacattaaggaagttttgctattacacaacaatgaccaggacaatgctttggaagacctcatggctcgggcaggagccagctgagaccaggccctgcctaggccctgccgcagaaccaccatccctgggaggccctgcagagcccacctgtggggaaagagaaggggcagcttccggattttcttttgggggttagaaggtcaggtgtggagactgctcgccagtctctgtgagcctaggccctgagctggggaggtggggaagattcgggcatgtgagtgcccccagaactgtcctggctccttccgtattaaacgcatttgcattttgagaagtgtccttcccacttcagccctccggagagactaccctagtctttctggggtgtttatgtcctcagctgaagcctggcctagttgctgagaggggctggggagatggggcgggagggccagactcagtgctgctgtggagctaggtgcttcccccttcccctgagactggtggactgaactccagtcaagttgagttcaagtgaaagattcttccagggttttattttttcccctcctaacaaagtctcatagtgttaacactggttctgcaatatctctgaggtgcaaagaatgcacttttccctatggggcccagagtttgccttttctgccaggcagtcaccatgcttccctaccccagcctgtttcttttggcttggtttggaccacagtcctctgctacccagggttttagagcccctgctctaggaaacagtttaagaaatcattggccccttcccagcacattgaatgggtaagcagacaggccatgatttagttggccagcactaactccacctctgttctccttgaacagcttcccctccagcccactgctttaggatgacacaatgaataacacctagtcatagaaatcagtctctctggtttgttttgtattatgttgtacatcattaaagatctaaatacaaaggatatacagtcttgaatctaaaataatttgctaactaactattttgattcttcagagagaactactaataaaaatctaaaaggta

SEQ ID NO: 196967 - DNA, 2535 bp, Homo sapiens
  Payload ID: 18851
  Gene Name: ubiquitin associated protein 1
  Uniprot ID: Q9NZ09
  ENST ID: ENST00000359544
  CDS Start-End: 37-1545
ctcagcctcccaagtagctgggactacaggttctaaatggcttctaagaagttgggtgcagattttcatgggactttcagttaccttgatgatgtcccatttaagacaggagacaaattcaaaacaccagctaaagttggtctacctattggcttctccttgcctgattgtttgcaggttgtcagagaagtacagtatgacttctctttggaaaagaaaaccattgagtgggctgaagagattaagaaaatcgaagaagccgagcgggaagcagagtgcaaaattgcggaagcagaagctaaagtgaattctaagagtggcccagagggcgatagcaaaatgagcttctccaagactcacagtacagccacaatgccacctcctattaaccccatcctcgccagcttgcagcacaacagcatcctcacaccaactcgggtcagcagtagtgccacgaaacagaaagttctcagcccacctcacataaaggcggatttcaatcttgctgactttgagtgtgaagaagacccatttgataatctggagttaaaaactattgatgagaaggaagagctgagaaatattctggtaggaaccactggacccattatggctcagttattggacaataacttgcccaggggaggctctgggtctgtgttacaggatgaggaggtcctggcatccttggaacgggcaaccctagatttcaagcctcttcataaacccaatggctttataaccttaccacagttgggcaactgtgaaaagatgtcactgtcttccaaagtgtccctcccccctatacctgcagtaagcaatatcaaatccctgtctttccccaaacttgactctgatgacagcaatcagaagacagccaagctggcgagcactttccatagcacatcctgcctccgcaatggcacgttccagaattccctaaagccttccacccaaagcagtgccagtgagctcaatgggcatcacactcttgggctttcagctttgaacttggacagtggcacagagatgccagccctgacatcctcccagatgccttccctctctgttttgtctgtgtgcacagaggaatcatcacctccaaatactggtcccacggtcacccctcctaatttctcagtgtcacaagtgcccaacatgcccagctgtccccaggcctattctgaactgcagatgctgtcccccagcgagcggcagtgtgtggagacggtggtcaacatgggctactcgtacgagtgtgtcctcagagccatgaagaagaaaggagagaatattgagcagattctcgactatctctttgcacatggacagctttgtgagaagggcttcgaccctcttttagtggaagaggctctggaaatgcaccagtgttcagaagaaaagatgatggagtttcttcagttaatgagcaaatttaaggagatgggctttgagctgaaagacattaaggaagttttgctattacacaacaatgaccaggacaatgctttggaagacctcatggctcgggcaggagccagctgagaccaggccctgcctaggccctgccgcagaaccaccatccctgggaggccctgcagagcccacctgtggggaaagagaaggggcagcttccggattttcttttgggggttagaaggtcaggtgtggagactgctcgccagtctctgtgagcctaggccctgagctggggaggtggggaagattcgggcatgtgagtgcccccagaactgtcctggctccttccgtattaaacgcatttgcattttgagaagtgtccttcccacttcagccctccggagagactaccctagtctttctggggtgtttatgtcctcagctgaagcctggcctagttgctgagaggggctggggagatggggcgggagggccagactcagtgctgctgtggagctaggtgcttcccccttcccctgagactggtggactgaactccagtcaagttgagttcaagtgaaagattcttccagggttttattttttcccctcctaacaaagtctcatagtgttaacactggttctgcaatatctctgaggtgcaaagaatgcacttttccctatggggcccagagtttgccttttctgccaggcagtcaccatgcttccctaccccagcctgtttcttttggcttggtttggaccacagtcctctgctacccagggttttagagcccctgctctaggaaacagtttaagaaatcattggccccttcccagcacattgaatgggtaagcagacaggccatgatttagttggccagcactaactccacctctgttctccttgaacagcttcccctccagcccactgctttaggatgacacaatgaataacacctagtcatagaaatcagtctctctggtttgttttgtattatgttgtacatcattaaagatctaaatacaaaggatatacagtcttgaatctaaaataatttgctaactaactattttgattcttcagagagaactactaataaaaatctaaaaggt

SEQ ID NO: 196968 - DNA, 2524 bp, Homo sapiens
  Payload ID: 18851
  Gene Name: ubiquitin associated protein 1
  Uniprot ID: Q9NZ09
  ENST ID: ENST00000379186
  CDS Start-End: 211-1536
gaggagggaagtaggacttcaacatggcggctgcggcactggcggtggctacggtgacggcctggcccggagcgggcagagttggaggtggtggcgttcgctctccctaggggctgtcgggagctcagcggggaccgagcctgggaggccggccggtgccagcacctttcggcttctgagacggcggcagcagcggcattcaggttctaaatggcttctaagaagttgggtgcagattttcatgggactttcagttaccttgatgatgtcccatttaagacaggagacaaattcaaaacaccagctaaagttggtctacctattggcttctccttgcctgattgtttgcaggttgtcagagaagtacagtatgacttctctttggaaaagaaaaccattgagtgggctgaagagattaagaaaatcgaagaagccgagcgggaagcagagtgcaaaattgcggaagcagaagctaaagtgaattctaagagtggcccagagggcgatagcaaaatgagcttctccaagactcacagtacagccacaatgccacctcctattaaccccatcctcgccagcttgcagcacaacagcatcctcacaccaactcgggtcagcagtagtgccacgaaacagaaagttctcagcccacctcacataaaggcggatttcaatcttgctgactttgagtgtgaagaagacccatttgataatctggagttaaaaactattgatgagaaggaagagctgagaaatattctggtaggaaccactggacccattatggctcagttattggacaataacttgcccaggggaggctctgggtctgtgttacaggatgaggaggtcctggcatccttggaacgggcaaccctagatttcaagcctcttcataaacccaatggctttataaccttaccacagttgggcaactgtgaaaagatgtcactgtcttccaaagtgtccctcccccctatacctgcagtaagcaatatcaaatccctgtctttccccaaacttgactctgatgacagcaatcagaagacagccaagctggcgagcactttccatagcacatcctgcctccgcaatggcacgttccagaattccctaaagccttccacccaaagcagtgccagtgagctcaatgggcatcacactcttgggctttcagctttgaacttggacagtggcacagagatgccagccctgacatcctcccagatgccttccctctctgttttgtctgtgtgcacagaggaatcatcacctccaaatactggtcccacgattctcgactatctctttgcacatggacagctttgtgagaagggcttcgaccctcttttagtggaagaggctctggaaatgcaccagtgttcagaagaaaagatgatggagtttcttcagttaatgagcaaatttaaggagatgggctttgagctgaaagacattaaggaagttttgctattacacaacaatgaccaggacaatgctttggaagacctcatggctcgggcaggagccagctgagaccaggccctgcctaggccctgccgcagaaccaccatccctgggaggccctgcagagcccacctgtggggaaagagaaggggcagcttccggattttcttttgggggttagaaggtcaggtgtggagactgctcgccagtctctgtgagcctaggccctgagctggggaggtggggaagattcgggcatgtgagtgcccccagaactgtcctggctccttccgtattaaacgcatttgcattttgagaagtgtccttcccacttcagccctccggagagactaccctagtctttctggggtgtttatgtcctcagctgaagcctggcctagttgctgagaggggctggggagatggggcgggagggccagactcagtgctgctgtggagctaggtgcttcccccttcccctgagactggtggactgaactccagtcaagttgagttcaagtgaaagattcttccagggttttattttttcccctcctaacaaagtctcatagtgttaacactggttctgcaatatctctgaggtgcaaagaatgcacttttccctatggggcccagagtttgccttttctgccaggcagtcaccatgcttccctaccccagcctgtttcttttggcttggtttggaccacagtcctctgctacccagggttttagagcccctgctctaggaaacagtttaagaaatcattggccccttcccagcacattgaatgggtaagcagacaggccatgatttagttggccagcactaactccacctctgttctccttgaacagcttcccctccagcccactgctttaggatgacacaatgaataacacctagtcatagaaatcagtctctctggtttgttttgtattatgttgtacatcattaaagatctaaatacaaaggatatacagtcttgaatctaaaataatttgctaactaactattttgattcttcagagagaactactaataaaaatctaaaag

SEQ ID NO: 196969 - DNA, 2029 bp, Homo sapiens
  Payload ID: 18851
  Gene Name: ubiquitin associated protein 1
  Uniprot ID: Q9NZ09
  ENST ID: ENST00000625521
  CDS Start-End: 11-1711
agacgcccaaatgagtggggcggtgaggggaaggaggagggaagtaggacttcaacatggcggctgcggcactggcggtggctacggtgacggcctggcccggagcgggcagagttggaggtggtggcgttcgctctccctaggggctgtcgggagctcagcggggaccgagcctgggaggccggccggtgccagcacctttcggcttctgagacggcggcagcagcggcattcagggactttcagttaccttgatgatgtcccatttaagacaggagacaaattcaaaacaccagctaaagttggtctacctattggcttctccttgcctgattgtttgcaggttgtcagagaagtacagtatgacttctctttggaaaagaaaaccattgagtgggctgaagagattaagaaaatcgaagaagccgagcgggaagcagagtgcaaaattgcggaagcagaagctaaagtgaattctaagagtggcccagagggcgatagcaaaatgagcttctccaagactcacagtacagccacaatgccacctcctattaaccccatcctcgccagcttgcagcacaacagcatcctcacaccaactcgggtcagcagtagtgccacgaaacagaaagttctcagcccacctcacataaaggcggatttcaatcttgctgactttgagtgtgaagaagacccatttgataatctggagttaaaaactattgatgagaaggaagagctgagaaatattctggtaggaaccactggacccattatggctcagttattggacaataacttgcccaggggaggctctgggtctgtgttacaggatgaggaggtcctggcatccttggaacgggcaaccctagatttcaagcctcttcataaacccaatggctttataaccttaccacagttgggcaactgtgaaaagatgtcactgtcttccaaagtgtccctcccccctatacctgcagtaagcaatatcaaatccctgtctttccccaaacttgactctgatgacagcaatcagaagacagccaagctggcgagcactttccatagcacatcctgcctccgcaatggcacgttccagaattccctaaagccttccacccaaagcagtgccagtgagctcaatgggcatcacactcttgggctttcagctttgaacttggacagtggcacagagatgccagccctgacatcctcccagatgccttccctctctgttttgtctgtgtgcacagaggaatcatcacctccaaatactggtcccacggtcacccctcctaatttctcagtgtcacaagtgcccaacatgcccagctgtccccaggcctattctgaactgcagatgctgtcccccagcgagcggcagtgtgtggagacggtggtcaacatgggctactcgtacgagtgtgtcctcagagccatgaagaagaaaggagagaatattgagcagattctcgactatctctttgcacatggacagctttgtgagaagggcttcgaccctcttttagtggaagaggctctggaaatgcaccagtgttcagaagaaaagatgatggagtttcttcagttaatgagcaaatttaaggagatgggctttgagctgaaagacattaaggaagttttgctattacacaacaatgaccaggacaatgctttggaagacctcatggctcgggcaggagccagctgagaccaggccctgcctaggccctgccgcagaaccaccatccctgggaggccctgcagagcccacctgtggggaaagagaaggggcagcttccggattttcttttgggggttagaaggtcaggtgtggagactgctcgccagtctctgtgagcctaggccctgagctggggaggtggggaagattcgggcatgtgagtgcccccagaactgtcctggctccttccgtattaaacgcatttgcattttgagaagtgtccttcccacttcagccctccggagagactaccctagtctttctggggtgtttatgtcctcagct

SEQ ID NO: 196970 - DNA, 1753 bp, Homo sapiens
  Payload ID: 18851
  Gene Name: ubiquitin associated protein 1
  ENST ID: ENST00000626262
  CDS Start-End: 1-1587
gaagtaggacttcaacatggcggctgcggcactggcggtggctacggtgacggcctggcccggagcgggcagagttggaggtggtggcgttcgctctccctaggggctgtcgggagctcagcggggaccgagcctgggaggccggccggtgccagcacctttcggcttctgagacggcggcagcagcggcattcaggttctaaatggcttctaagaagttgggtgcagattttcatgtatgacttctctttggaaaagaaaaccattgagtgggctgaagagattaagaaaatcgaagaagccgagcgggaagcagagtgcaaaattgcggaagcagaagctaaagtgaattctaagagtggcccagagggcgatagcaaaatgagcttctccaagactcacagtacagccacaatgccacctcctattaaccccatcctcgccagcttgcagcacaacagcatcctcacaccaactcgggtcagcagtagtgccacgaaacagaaagttctcagcccacctcacataaaggcggatttcaatcttgctgactttgagtgtgaagaagacccatttgataatctggagttaaaaactattgatgagaaggaagagctgagaaatattctggtaggaaccactggacccattatggctcagttattggacaataacttgcccaggggaggctctgggtctgtgttacaggatgaggaggtcctggcatccttggaacgggcaaccctagatttcaagcctcttcataaacccaatggctttataaccttaccacagttgggcaactgtgaaaagatgtcactgtcttccaaagtgtccctcccccctatacctgcagtaagcaatatcaaatccctgtctttccccaaacttgactctgatgacagcaatcagaagacagccaagctggcgagcactttccatagcacatcctgcctccgcaatggcacgttccagaattccctaaagccttccacccaaagcagtgccagtgagctcaatgggcatcacactcttgggctttcagctttgaacttggacagtggcacagagatgccagccctgacatcctcccagatgccttccctctctgttttgtctgtgtgcacagaggaatcatcacctccaaatactggtcccacggtcacccctcctaatttctcagtgtcacaagtgcccaacatgcccagctgtccccaggcctattctgaactgcagatgctgtcccccagcgagcggcagtgtgtggagacggtggtcaacatgggctactcgtacgagtgtgtcctcagagccatgaagaagaaaggagagaatattgagcagattctcgactatctctttgcacatggacagctttgtgagaagggcttcgaccctcttttagtggaagaggctctggaaatgcaccagtgttcagaagaaaagatgatggagtttcttcagttaatgagcaaatttaaggagatgggctttgagctgaaagacattaaggaagttttgctattacacaacaatgaccaggacaatgctttggaagacctcatggctcgggcaggagccagctgagaccaggccctgcctaggccctgccgcagaaccaccatccctgggaggccctgcagagcccacctgtggggaaagagaaggggcagcttccggattttcttttgggggttagaaggtcaggtgtggagactgctcgccagtctctgtgagcctaggccctgagctg

SEQ ID NO: 196971 - DNA, 1381 bp, Homo sapiens
  Payload ID: 18852
  Gene Name: ubiquitin associated protein 1-like
  Uniprot ID: F5GYI3
  ENST ID: ENST00000502113
  CDS Start-End: 145-1290
ctgtttggggctcagctaagtgaccacacaggagagcagtgaggccatttgaggcctgagcctggtcctcaggactcgactctctctccctgccatcaagcagcctgccccagccctgccagccatctccacactcctgacagaatgaatgccctcgatggtgttcctttcaagttgcccaagggctttgtgataggcacagagcctctccctgggccagaactcagcgtcccggcctgcggggaagttctgctgggttctatgcacgacttcagcctggagaggacggcactcttctgggtggaggccgccggccagggacccagcccgtaccagtgcggtgacccggggacagcgtcagcccctccagcctggctcttgctagtcagccccgaacatgggctggcgcctgcgcccaccacaatcagagacccggaggccggacaccaggagaggccggaggaggagggtgaggacgaggcagaagcctcctctggcagcgaggaagagccggcccccagcagcctccaaccgggctccccggcgagccccggccccggccgtcgcctgtgctcgctggacgtgctacgcggcgtgcggttggagctggcaggggcgcggcggcggctctccgaggggaagctggtctcccggccccgcgccctcctgcatggcctccgcggccaccgcgcgctgagcctgtgcccgagccctgcgcagtcccccaggtctgcatcacccccggggcccgcgccccagcaccccgccgcccccgcgtcgcccccgcggccctccacggcaggcgccatccccccgctgcggagccacaagcctacggtcgcgtccctcagcccgtacacctgtctgccacctcttgggggggcaccccaacctctcaacccccacaagtcacaccctgatactgcggctgacctgctgtccgccctgagccaggaggagcaagacctcattgggccagtggtcgccctgggatatcccctgcgaagggccatcatagctctgcagaagacagggaggcagagcctgagccagtttctcagctacctcagtgcctgtgaccgcctgttacgtcagggatatgaggaaggcctggtggatgaggccatggagatgttccagttctccgagagccaggcaggggagttcctgcgcctctgggagcagttcagtgacatgggcttccagcaggaccggatcaaggaggtgctgctggtccatggcaaccgccgagagcaagccctggaggagctggtggcctgtgcccagtgaccacggaggcactccacgatgcctgggcatctaggcccaatgccagacctggcaacccatcctaactgtattattaaaaccaagtaagagt

SEQ ID NO: 196972 - DNA, 640 bp, Homo sapiens
  Payload ID: 18852
  Gene Name: ubiquitin associated protein 1-like
  ENST ID: ENST00000558802
  CDS Start-End: 27-380
ccagccatctccacactcctgacagaatgaatgccctcgatggtgttcctttcaagttgcccaagggctttgtgataggcacagagcctctccctgggccagaactcagcgtcccggcctgcggggaagttctgctgggttctatgcacgacttcagcctggagaggacggcactcttctgggtggaggccgccggccagggacccagcccgtaccagtgcggtgacccggggacagcgtcagcccctccagcctggctcttgctactcaggcccttggagtgcctctctgccctgtctgctgccccggctgctcctcttaccctccctccctctctgcccgcttccggcccagtttctcagctacctcagtgcctgtgaccgcctgttacgtcagggatatgaggaaggcctggtggatgaggccatggagatgttccagttctccgagagccaggcaggggagttcctgcgcctctgggagcagttcagtgacatgggcttccagcaggaccggatcaaggaggtgctgctggtccatggcaaccgccgagagcaagccctggaggagctggtggcctgtgcccagtgaccacggaggcactccacgatgcctgggcatctaggcccaatgccagacc

SEQ ID NO: 196973 - DNA, 1694 bp, Homo sapiens
  Payload ID: 18852
  Gene Name: ubiquitin associated protein 1-like
  Uniprot ID: F5GYI3
  ENST ID: ENST00000559089
  CDS Start-End: 222-1367
catttatacacgctttgtctgcagggaagttctcctggtaattacaagcactggccccctcaccttttcctttccagctgtttggggctcagctaagtgaccacacaggagagcagtgaggccatttgaggcctgagcctggtcctcaggactcgactctctctccctgccatcaagcagcctgccccagccctgccagccatctccacactcctgacagaatgaatgccctcgatggtgttcctttcaagttgcccaagggctttgtgataggcacagagcctctccctgggccagaactcagcgtcccggcctgcggggaagttctgctgggttctatgcacgacttcagcctggagaggacggcactcttctgggtggaggccgccggccagggacccagcccgtaccagtgcggtgacccggggacagcgtcagcccctccagcctggctcttgctagtcagccccgaacatgggctggcgcctgcgcccaccacaatcagagacccggaggccggacaccaggagaggccggaggaggagggtgaggacgaggcagaagcctcctctggcagcgaggaagagccggcccccagcagcctccaaccgggctccccggcgagccccggccccggccgtcgcctgtgctcgctggacgtgctacgcggcgtgcggttggagctggcaggggcgcggcggcggctctccgaggggaagctggtctcccggccccgcgccctcctgcatggcctccgcggccaccgcgcgctgagcctgtgcccgagccctgcgcagtcccccaggtctgcatcacccccggggcccgcgccccagcaccccgccgcccccgcgtcgcccccgcggccctccacggcaggcgccatccccccgctgcggagccacaagcctacggtcgcgtccctcagcccgtacacctgtctgccacctcttgggggggcaccccaacctctcaacccccacaagtcacaccctgatactgcggctgacctgctgtccgccctgagccaggaggagcaagacctcattgggccagtggtcgccctgggatatcccctgcgaagggccatcatagctctgcagaagacagggaggcagagcctgagccagtttctcagctacctcagtgcctgtgaccgcctgttacgtcagggatatgaggaaggcctggtggatgaggccatggagatgttccagttctccgagagccaggcaggggagttcctgcgcctctgggagcagttcagtgacatgggcttccagcaggaccggatcaaggaggtgctgctggtccatggcaaccgccgagagcaagccctggaggagctggtggcctgtgcccagtgaccacggaggcactccacgatgcctgggcatctaggcccaatgccagacctggcaacccatcctaactgtattattaaaaccaagtaagagtaacaaagtgatgcatacttattgtaaaaacacaaataataccaagggtgacagttaacagcagcagaatctgctgaaagagttgaaatagttgcctctgcagaggggcagatgggagagccggacggggagctatgttcttcatgcatgcctgtgaaaccacctgatttgactctttacactgtgtgcattagtaaccttgattttaagaaaattaaaacaaataaataatgggca

SEQ ID NO: 196974 - DNA, 4284 bp, Homo sapiens
  Payload ID: 18853
  Gene Name: ubiquitin associated protein 2
  Uniprot ID: Q5T6F2
  ENST ID: ENST00000360802
  CDS Start-End: 114-3473
gtgacgcgaggtcacgtgacgggttgggcagcctgtgccgccgccgccgctttgtaagaggcacattggcagattttctattttgtacatacattattttgtatatactgtatatgatgacttcagtgagcagtgaccattgtcgaggtgctcgggaaaaaccacagatttcagcagcacaatcaacgcaaccacagaaacaagtggtacaggcaacagctgaacagatgcgtctcgctcaagtgatctttgataagaatgattcagattttgaagctaaagttaagcagcttatggaagtgacagggaaaaatcaggatgaatgcatagtggccctacatgattgtaatggagatgtgaacaaagctatcaatatattgctggaagggaattcagacacaacttcatgggagactgtagggtgtaagaaaaagaattttgcaaaagaaaattcagaaaacaaagagaatagagagaagaaaagcgagaaagaatcgagtcgtggacgtggaaacaacaaccggaaaggaagaggcggcaatcgtggcagagaatttagaggtgaagaaaatggaattgattgcaatcaagtggacaaaccttcagatcgtggcaagcgagcccggggtagaggatttggacgtggcagagggagaggggcaggaaggttctcaacccaaggcatggggacatttaatcctgcagactattcagattctacatctacagatgtgtgtgggacaaagctagtagtttgggaagctgctcagaatggtgcagatgagggaactgaactggcatcaaatactcacaacatagctcaggatctgtcaaacaaaagttcttatggactcaaaggggcttggaagaattctgtggaagagtggacaacagaagactggactgaagatctttctgaaacaaaggtcttcactgcctcatctgctccagcagagaatcacatcttacctgggcaaagcattgatctggtagccttgctccagaagcctgttcctcacagtcaagcctcagaagccaactcctttgaaacttcccaacagcagggctttggccaagcccttgtcttcacaaattcgcaacacaacaatcagatggcaccagggactggcagctccactgccgtcaactcctgttctcctcagagcctgtcatccgtccttggctcaggatttggagagcttgcaccaccaaaaatggcaaacatcaccagctcccagattttggaccagttgaaagctccgagtttgggccagtttaccaccaccccaagtacacagcagaatagtacaagtcaccctacaactactacttcttgggacctcaagcccccaacatcccagtcctcagtcctcagtcatcttgacttcaaatctcaacctgagccatccccagttcttagccagttgagccagcgacaacagcaccagagccaggcagtcactgttcctcctcctggtttggagtcctttccttcccaggcaaaacttcgagaatcaacacctggagacagtccctccactgtgaacaagcttttgcagcttcccagcacgaccattgaaaatatctctgtgtctgtccaccagccacagcccaaacacatcaaacttgctaagcggcggatacccccagcttctaagatcccagcttctgcagtggaaatgcctggttcagcagatgtcacaggattaaatgtgcagtttggggctctggaatttgggtcagaaccttctctctctgaatttggatcagctccaagcagtgaaaatagtaatcagattcccatcagcttgtattcgaagtctttaagtgagcctttgaatacatctttatcaatgaccagtgcagtacagaactccacatatacaacttccgtcattacctcctgcagtctgacaagctcatcactgaattctgctagtccagtagcaatgtcttcctcttatgaccagagttctgtgcataacaggatcccataccaaagccctgtgagttcatcagagtcagctccaggaaccatcatgaatggacatggtggtggtcgaagtcagcagacactagacactccaaagacaacaggccctccctctgccctcccgtctgtgagctccctgcccagcaccacctcctgcactgcacttctgccgtccacatcccagcacactggcgacctgactagcagccctctctctcagcttagcagttcgctctccagccaccagagcagcctctctgcacatgcagccctctcctcgagcacgtcacacacacatgccagtgtggagagcgcctcttcccaccagtcctcagccaccttctccacggcagcgacctccgtctcaagttccgcatcctcaggcgccagcctgtccagtagcatgaacaccgcgaacagcctctgtctgggtgggacccccgcgagtgcatccagcagcagtagcagggccgcgcccttggtgacctcaggcaaagcacccccaaacttacctcagggggtgcctcccctgctgcacaaccagtacctcgtaggtcccggaggactgcttcctgcctacccgatctatggctatgacgagctccagatgctgcagtcacggctgccagtggactactatggaattccctttgctgcacccacagcgcttgccagccgagatgggagcctagctaataatccatatccaggtgatgtcacaaagtttggccgtggggactctgcatcccctgcacccgctaccacaccagctcagccacagcagagccaatcacagacccaccacacagcccagcagcccttcgtgaatcctgcactgccacctggctatagctacactggtcttccctactacacaggcatgcccagtgccttccagtatggccccaccatgtttgtccctccagcctcagccaagcaacatggggtgaacctcagcactcccacacctcccttccagcaggccagtggttatggccagcacggctacagtacaggttatgacgacctgacccaggggacagcagcaggagactactccaaaggtggctatgctggatcatcgcaggcaccaaacaagtctgcaggttctgggcctggcaaaggagtatcagtgtcttcaagcaccactggtctacctgatatgactggttctgtctacaataagacacagacttttgacaagcagggatttcatgcagggacgcctccacctttcagcctgccctcggtcttgggctccactgggcccctggcctcgggagcggcccctggctatgcacccccaccattcctacacatcttgccagcccaccagcagccccactcacagctgctgcaccaccaccttccgcaggatgcacagagtggctcgggtcagcgcagccagcccagctccctgcagcccaagtctcaagcctccaaacctgcctacggcaactctccatactggacaaactaaacccagaagagaggggtgggctggggcaaggcttatcctgggcaggagagaacacacgagcacgtatttgggagcccagtgccctttcctagaattcccgacatgtgtcagccatgcctctgtggggagtctgcctcccagactggctactgtatgtaatgtatttatgtatgtatttgtaaatgtgatagaagtctgggggggagttgggggatggcggcagatgttagccaggtctgccctccccattcaagccccttctccactgtagcaaaataagcacccccaccccatctgccttcaggtcttcttcacagcctgcactgcccagtgggccactaggggcagtctctggaagggctggttcaaggctgtttgggtataggggtcaggtaccaatgaagaatcacgacttgtctcactcctttggaaattgttttctttcctgtgtaattacttcatacctctgtttttgagaaactgttccgtttgtcatctgtcatggtctccttccaccaaatcttcatctgggaatagcagcggtatccctccacccaagtatggccacctgtttgtcttcatatagaacaggggcttctggtctggtcatgtccctagagacttactagagactggctgaccatgaaaaaaaaaaaaataatctgagttattcagccagtcagctcccctttaaaaatctaaggtatctccaagcaacacatctccattctagttgtcttgaaccacgtgggcaactgtttcaggggttttctcttgcccaatccccacctaataaagttctgagagcatg

SEQ ID NO: 196975 - DNA, 4289 bp, Homo sapiens
  Payload ID: 18853
  Gene Name: ubiquitin associated protein 2
  Uniprot ID: Q5T6F2
  ENST ID: ENST00000379238
  CDS Start-End: 119-3478
gctttgtaagaggcacattggcaggtaacgagcggcggcggcggcagcgggtcttgggtcctccgagagcagcagcgattttctattttgtacatacattattttgtatatactgtatatgatgacttcagtgagcagtgaccattgtcgaggtgctcgggaaaaaccacagatttcagcagcacaatcaacgcaaccacagaaacaagtggtacaggcaacagctgaacagatgcgtctcgctcaagtgatctttgataagaatgattcagattttgaagctaaagttaagcagcttatggaagtgacagggaaaaatcaggatgaatgcatagtggccctacatgattgtaatggagatgtgaacaaagctatcaatatattgctggaagggaattcagacacaacttcatgggagactgtagggtgtaagaaaaagaattttgcaaaagaaaattcagaaaacaaagagaatagagagaagaaaagcgagaaagaatcgagtcgtggacgtggaaacaacaaccggaaaggaagaggcggcaatcgtggcagagaatttagaggtgaagaaaatggaattgattgcaatcaagtggacaaaccttcagatcgtggcaagcgagcccggggtagaggatttggacgtggcagagggagaggggcaggaaggttctcaacccaaggcatggggacatttaatcctgcagactattcagattctacatctacagatgtgtgtgggacaaagctagtagtttgggaagctgctcagaatggtgcagatgagggaactgaactggcatcaaatactcacaacatagctcaggatctgtcaaacaaaagttcttatggactcaaaggggcttggaagaattctgtggaagagtggacaacagaagactggactgaagatctttctgaaacaaaggtcttcactgcctcatctgctccagcagagaatcacatcttacctgggcaaagcattgatctggtagccttgctccagaagcctgttcctcacagtcaagcctcagaagccaactcctttgaaacttcccaacagcagggctttggccaagcccttgtcttcacaaattcgcaacacaacaatcagatggcaccagggactggcagctccactgccgtcaactcctgttctcctcagagcctgtcatccgtccttggctcaggatttggagagcttgcaccaccaaaaatggcaaacatcaccagctcccagattttggaccagttgaaagctccgagtttgggccagtttaccaccaccccaagtacacagcagaatagtacaagtcaccctacaactactacttcttgggacctcaagcccccaacatcccagtcctcagtcctcagtcatcttgacttcaaatctcaacctgagccatccccagttcttagccagttgagccagcgacaacagcaccagagccaggcagtcactgttcctcctcctggtttggagtcctttccttcccaggcaaaacttcgagaatcaacacctggagacagtccctccactgtgaacaagcttttgcagcttcccagcacgaccattgaaaatatctctgtgtctgtccaccagccacagcccaaacacatcaaacttgctaagcggcggatacccccagcttctaagatcccagcttctgcagtggaaatgcctggttcagcagatgtcacaggattaaatgtgcagtttggggctctggaatttgggtcagaaccttctctctctgaatttggatcagctccaagcagtgaaaatagtaatcagattcccatcagcttgtattcgaagtctttaagtgagcctttgaatacatctttatcaatgaccagtgcagtacagaactccacatatacaacttccgtcattacctcctgcagtctgacaagctcatcactgaattctgctagtccagtagcaatgtcttcctcttatgaccagagttctgtgcataacaggatcccataccaaagccctgtgagttcatcagagtcagctccaggaaccatcatgaatggacatggtggtggtcgaagtcagcagacactagacactccaaagacaacaggccctccctctgccctcccgtctgtgagctccctgcccagcaccacctcctgcactgcacttctgccgtccacatcccagcacactggcgacctgactagcagccctctctctcagcttagcagttcgctctccagccaccagagcagcctctctgcacatgcagccctctcctcgagcacgtcacacacacatgccagtgtggagagcgcctcttcccaccagtcctcagccaccttctccacggcagcgacctccgtctcaagttccgcatcctcaggcgccagcctgtccagtagcatgaacaccgcgaacagcctctgtctgggtgggacccccgcgagtgcatccagcagcagtagcagggccgcgcccttggtgacctcaggcaaagcacccccaaacttacctcagggggtgcctcccctgctgcacaaccagtacctcgtaggtcccggaggactgcttcctgcctacccgatctatggctatgacgagctccagatgctgcagtcacggctgccagtggactactatggaattccctttgctgcacccacagcgcttgccagccgagatgggagcctagctaataatccatatccaggtgatgtcacaaagtttggccgtggggactctgcatcccctgcacccgctaccacaccagctcagccacagcagagccaatcacagacccaccacacagcccagcagcccttcgtgaatcctgcactgccacctggctatagctacactggtcttccctactacacaggcatgcccagtgccttccagtatggccccaccatgtttgtccctccagcctcagccaagcaacatggggtgaacctcagcactcccacacctcccttccagcaggccagtggttatggccagcacggctacagtacaggttatgacgacctgacccaggggacagcagcaggagactactccaaaggtggctatgctggatcatcgcaggcaccaaacaagtctgcaggttctgggcctggcaaaggagtatcagtgtcttcaagcaccactggtctacctgatatgactggttctgtctacaataagacacagacttttgacaagcagggatttcatgcagggacgcctccacctttcagcctgccctcggtcttgggctccactgggcccctggcctcgggagcggcccctggctatgcacccccaccattcctacacatcttgccagcccaccagcagccccactcacagctgctgcaccaccaccttccgcaggatgcacagagtggctcgggtcagcgcagccagcccagctccctgcagcccaagtctcaagcctccaaacctgcctacggcaactctccatactggacaaactaaacccagaagagaggggtgggctggggcaaggcttatcctgggcaggagagaacacacgagcacgtatttgggagcccagtgccctttcctagaattcccgacatgtgtcagccatgcctctgtggggagtctgcctcccagactggctactgtatgtaatgtatttatgtatgtatttgtaaatgtgatagaagtctgggggggagttgggggatggcggcagatgttagccaggtctgccctccccattcaagccccttctccactgtagcaaaataagcacccccaccccatctgccttcaggtcttcttcacagcctgcactgcccagtgggccactaggggcagtctctggaagggctggttcaaggctgtttgggtataggggtcaggtaccaatgaagaatcacgacttgtctcactcctttggaaattgttttctttcctgtgtaattacttcatacctctgtttttgagaaactgttccgtttgtcatctgtcatggtctccttccaccaaatcttcatctgggaatagcagcggtatccctccacccaagtatggccacctgtttgtcttcatatagaacaggggcttctggtctggtcatgtccctagagacttactagagactggctgaccatgaaaaaaaaaaaaataatctgagttattcagccagtcagctcccctttaaaaatctaaggtatctccaagcaacacatctccattctagttgtcttgaaccacgtgggcaactgtttcaggggttttctcttgcccaatccccacctaataaagttctgagagcatg

SEQ ID NO: 196976 - DNA, 2513 bp, Homo sapiens
  Payload ID: 18853
  Gene Name: ubiquitin associated protein 2
  Uniprot ID: Q5T6F2
  ENST ID: ENST00000379239
  CDS Start-End: 626-1702
atgatgttttatttccaagcacatatctgagttgtatgtgtggacagcactgagactgagtctttccacagctaggactgagtgtctccacatcctttctgaagcctacgaagctcatttatgtgctctgagatacatctattcaagcacataccaaggaaatgctcactgtgcatttggaagtaggtgttggacagttggactgcagatgttaggtgtctgtgtctctccacaacataggcatcaaccccaatctgccttacgttggccgtgagcattggtagagtcagcctgacttggcggaagcacgtctccaaagacaacaggccctccctctgccctcccgtctgtgagctccctgcccagcaccacctcctgcactgcacttctgccgtccacatcccagcacactggcgacctgactagcagccctctctctcagcttagcagttcgctctccagccaccagagcagcctctctgcacatgcagccctctcctcgagcacgtcacacacacatgccagtgtggagagcgcctcttcccaccagtcctcagccaccttctccacggcagcgacctccgtctcaagttccgcatcctcaggcgccagcctgtccagtagcatgaacaccgcgaacagcctctgtctgggtgggacccccgcgagtgcatccagcagcagtagcagggccgcgcccttggtgacctcaggcaaagcacccccaaacttacctcagggggtgcctcccctgctgcacaaccagtacctcgtaggtcccggaggactgcttcctgcctacccgatctatggctatgacgagctccagatgctgcagtcacggctgccagtggactactatggaattccctttgctgcacccacagcgcttgccagccgagatgggagcctagctaataatccatatccaggtgatgtcacaaagtttggccgtggggactctgcatcccctgcacccgctaccacaccagctcagccacagcagagccaatcacagacccaccacacagcccagcagcccttcgtgaatcctgcactgccacctggctatagctacactggtcttccctactacacaggcatgcccagtgccttccagtatggccccaccatgtttgtccctccagcctcagccaagcaacatggggtgaacctcagcactcccacacctcccttccagcaggccagtggttatggccagcacggctacagtacaggttatgacgacctgacccaggggacagcagcaggagactactccaaaggtggctatgctggatcatcgcaggcaccaaacaagtctgcaggttctgggcctggcaaaggagtatcagtgtcttcaagcaccactggtctacctgatatgactggttctgtctacaataagacacagacttttgacaagcagggatttcatgcagggacgcctccacctttcagcctgccctcggtcttgggctccactgggcccctggcctcgggagcggcccctggctatgcacccccaccattcctacacatcttgccagcccaccagcagccccactcacagctgctgcaccaccaccttccgcaggatgcacagagtggctcgggtcagcgcagccagcccagctccctgcagcccaagtctcaagcctccaaacctgcctacggcaactctccatactggacaaactaaacccagaagagaggggtgggctggggcaaggcttatcctgggcaggagagaacacacgagcacgtatttgggagcccagtgccctttcctagaattcccgacatgtgtcagccatgcctctgtggggagtctgcctcccagactggctactgtatgtaatgtatttatgtatgtatttgtaaatgtgatagaagtctgggggggagttgggggatggcggcagatgttagccaggtctgccctccccattcaagccccttctccactgtagcaaaataagcacccccaccccatctgccttcaggtcttcttcacagcctgcactgcccagtgggccactaggggcagtctctggaagggctggttcaaggctgtttgggtataggggtcaggtaccaatgaagaatcacgacttgtctcactcctttggaaattgttttctttcctgtgtaattacttcatacctctgtttttgagaaactgttccgtttgtcatctgtcatggtctccttccaccaaatcttcatctgggaatagcagcggtatccctccacccaagtatggccacctgtttgtcttcatatagaacaggggcttctggtctggtcatgtccctagagacttactagagactggctgaccatgaaaaaaaaaaaaataatctgagttattcagccagtcagctcccctttaaaaatctaaggtatctccaagcaacacatctccattctagttgtcttgaaccacgtgggcaactgtttcaggggttttctcttgcccaatccccacctaataaagttctgagagcatg

SEQ ID NO: 196977 - DNA, 833 bp, Homo sapiens
  Payload ID: 18853
  Gene Name: ubiquitin associated protein 2
  ENST ID: ENST00000421278
  CDS Start-End: 1-833
cgagaaagaatcgagtcgtggacgtggaaacaacaaccggaaaggaagaggcggcaatcgtggcagagaatttagaggtgaagaaaatggaattgattgcaatcaagtggacaaaccttcagatcgtggcaagcgagcccggggtagaggatttggacgtggcagagggagaggggcaggaaggttctcaacccaaggcatggggacatttaatcctgcagactattcagattctacatctacagatgtgtgtgggacaaagctagtagtttgggaagctgctcagaatggtgcagatgagggaactggggcttggaagaattctgtggaagagtggacaacagaagactggactgaagatctttctgaaacaaaggtcttcactgcctcatctgctccagcagagaatcacatcttacctgggcaaagcattgatctggtagccttgctccagaagcctgttcctcacagtcaagcctcagaagccaactcctttgaaacttcccaacagcagggctttggccaagcccttgtcttcacaaattcgcaacacaacaatcagatggcaccagggactggcagctccactgccgtcaactcctgttctcctcagagcctgtcatccgtccttggctcaggatttggagagcttgcaccaccaaaaatggcaaacatcaccagctcccagattttggaccagttgaaagctccgagtttgggccagtttaccaccaccccaagtacacagcagaatagtacaagtcaccctacaactactacttcttgggacctcaagcccccaacatcccagtcctcagtcctcagtcatcttg

SEQ ID NO: 196978 - DNA, 1349 bp, Homo sapiens
  Payload ID: 18853
  Gene Name: ubiquitin associated protein 2
  ENST ID: ENST00000412543
  CDS Start-End: 114-1349
gtgacgcgaggtcacgtgacgggttgggcagcctgtgccgccgccgccgctttgtaagaggcacattggcagattttctattttgtacatacattattttgtatatactgtatatgatgacttcagtgagcagtgaccattgtcgaggtgctcgggaaaaaccacagatttcagcagcacaatcaacgcaaccacagaaacaagtggtacaggcaacagctgaacagatgcgtctcgctcaagtgatctttgataagaatgattcagattttgaagctaaagttaagcagcttatggaagtgacagggaaaaatcaggatgaatgcatagtggccctacatgattgtaatggagatgtgaacaaagctatcaatatattgctggaagggaattcagacacaacttcatgggagactgtagggtgtaagaaaaagaattttgcaaaagaaaattcagaaaacaaagagaatagagagaagaaaagcgagaaagaatcgagtcgtggacgtggaaacaacaaccggaaaggaagaggcggcaatcgtggcagagaatttagaggtgaagaaaatggaattgattgcaatcaagtggacaaaccttcagatcgtggcaagcgagcccggggtagagaactggcatcaaatactcacaacatagctcaggatctgtcaaacaaaagttcttatggactcaaaggggcttggaagaattctgtggaagagtggacaacagaagactggactgaagatctttctgaaacaaaggtcttcactgcctcatctgctccagcagagaatcacatcttacctgggcaaagcattgatctggtagccttgctccagaagcctgttcctcacagtcaagcctcagaagccaactcctttgaaacttcccaacagcagggctttggccaagcccttgtcttcacaaattcgcaacacaacaatcagatggcaccagggactggcagctccactgccgtcaactcctgttctcctcagagcctgtcatccgtccttggctcaggatttggagagcttgcaccaccaaaaatggcaaacatcaccagctcccagattttggaccagttgaaagctccgagtttgggccagtttaccaccaccccaagtacacagcagaatagtacaagtcaccctacaactactacttcttgggacctcaagcccccaacatcccagtcctcagtcctcagtcatcttgacttcaaatctcaacctgagccatccccagttcttagccagttgagccagcgacaacagcaccagagccaggcagtcactgttcctcctcctggtttggagtcctttccttcccaggcaaaactt

SEQ ID NO: 196979 - DNA, 492 bp, Homo sapiens
  Payload ID: 18853
  Gene Name: ubiquitin associated protein 2
  ENST ID: ENST00000488443
  CDS Start-End: 1-354
cataacaggatcccataccaaagccctgtgagttcatcagagtcagctccaggaaccatcatgaatggacatggtggtggtcgaagtcagcagacactagacactccaaagacaacaggccctccctctgccctcccgtctgtgagctccctgcccagcaccacctcctgcactgcacttctgccgtccacatcccagcacactggcgacctgactagcagccctctctctcagcttagcagcatgccagtgtggagagcgcctcttcccaccagtcctcagccaccttctccacggcagcgacctccgtctcaagttccgcatcctcaggcgccagcctgtccagtagcatgaacaccgcgaacagcctctgtctgggtgggacccccgcgagtgcatccagcagcagtagcagggccgcgcccttggtgacctcaggcaaagcacccccaaacttacctcagggggtgcctcccctgctgcacaaccagt

SEQ ID NO: 196980 - DNA, 1859 bp, Homo sapiens
  Payload ID: 18853
  Gene Name: ubiquitin associated protein 2
  ENST ID: ENST00000539807
  CDS Start-End: 114-1859
gtgacgcgaggtcacgtgacgggttgggcagcctgtgccgccgccgccgctttgtaagaggcacattggcagattttctattttgtacatacattattttgtatatactgtatatgatgacttcagtgagcagtgaccattgtcgaggtgctcgggaaaaaccacagatttcagcagcacaatcaacgcaaccacagaaacaagtggtacaggcaacagctgaacagatgcgtctcgctcaagtgatctttgataagaatgattcagattttgaagctaaagttaagcagcttatggaagtgacagggaaaaatcaggatgaatgcatagtggccctacatgattgtaatggagatgtgaacaaagctatcaatatattgctggaagggaattcagacacaacttcatgggagactgtagggtgtaagaaaaagaattttgcaaaagaaaattcagaaaacaaagagaatagagagaagaaaaagcacactggcgacctgactagcagccctctctctcagcttagcagttcgctctccagccaccagagcagcctctctgcacatgcagccctctcctcgagcacgtcacacacacatgccagtgtggagagcgcctcttcccaccagtcctcagccaccttctccacggcagcgacctccgtctcaagttccgcatcctcaggcgccagcctgtccagtagcatgaacaccgcgaacagcctctgtctgggtgggacccccgcgagtgcatccagcagcagtagcagggccgcgcccttggtgacctcaggcaaagcacccccaaacttacctcagggggtgcctcccctgctgcacaaccagtacctcgtaggtcccggaggactgcttcctgcctacccgatctatggctatgacgagctccagatgctgcagtcacggctgccagtggactactatggaattccctttgctgcacccacagcgcttgccagccgagatgggagcctagctaataatccatatccaggtgatgtcacaaagtttggccgtggggactctgcatcccctgcacccgctaccaccagctcagccacagcagagccaatcacagacccaccacacagcccagcagcccttcgtgaatcctgcactgccacctggagctacactggtcttccctactacacaggcatgcccagtgccttccagtatggccccaccatgtttgtccctccagcctcagccaagcaacatggggtgaacctcagcactcccacacctcccttccagcaggccagtggttatggccagcacggctacagtacaggttatgacgacctgacccaggggacagcagcaggagactactccaaaggtggctatgctggatcatcgcaggcaccaaacaagtctgcaggttctgggcctggcaaaggagtatcagtgtcttcaagcaccactggtctacctgatatgactggttctgtctacaataagacacagacttttgacaagcagggatttcatgcagggacgcctccacctttcagcctgccctcggtcttgggctccactgggcccctggcctcgggagcggcccctggctatgcacccccaccattcctacacatcttgccagcccaccagcagccccactcacagctgctgcaccaccaccttccgcaggatgcacagagtggctcgggtcagcgcagcccagctccctgcagcccaagtctcaagcctccaaacctgcctacgctctccatactggacaaactaaacccagaagagaggggtgggctggggcaaggcttatcctgggcaggagagaacacacgagcacgtatttgggagcccagtgccctttcctag

SEQ ID NO: 196981 - DNA, 3460 bp, Homo sapiens
  Payload ID: 18853
  Gene Name: ubiquitin associated protein 2
  ENST ID: ENST00000629575
  CDS Start-End: 79-609
acattggcaggtaacgagcggcggcggcggcagcgggtcttgggtcctccgagagcagcagcggcaacagctgaacagatgcgtctcgctcaagtgatctttgataagaatgattcagattttgaagctaaagttaagcagcttatggaagtgacagggaaaaatcaggatgaatgcatagtggccctacatgattgtaatggagatgtgaacaaagctatcaatatattgctggaagggaattcagacacaacttcatgggagactgtagggtgtaagaaaaagaattttgcaaaagaaaattcagaaaacaaagagaatagagagaagaaaagcgagaaagaatcgagtcgtggacgtggaaacaacaaccggaaaggaagaggcggcaatcgtggcagagaatttagaggtgaagaaaatggaattgattgcaatcaagtggacaaaccttcagatcgtggcaagcgagcccggggtagagaactggcatcaaatactcacaacatagctcaggatctgtcaaacaaaagttcttatggactcaaaggggcttggaagaattctgtggaagagtggacaacagaagactggactgaagatcattgatctggtagccttgctccagaagcctgttcctcacagtcaagcctcagaagccaactcctttgaaacttcccaacagcagggctttggccaagcccttgtcttcacaaattcgcaacacaacaatcagatggcaccagggactggcagctccactgccgtcaactcctgttctcctcagagcctgtcatccgtccttggctcaggatttggagagcttgcaccaccaaaaatggcaaacatcaccagctcccagattttggaccagttgaaagctccgagtttgggccagtttaccaccaccccaagtacacagcagaatagtacaagtcaccctacaactactacttcttgggacctcaagcccccaacatcccagtcctcagtcctcagtcatcttgacttcaaatctcaacctgagccatccccagttcttagccagttgagccagcgacaacagcaccagagccaggcagtcactgttcctcctcctggtttggagtcctttccttcccaggcaaaacttcgagaatcaacacctggagacagtccctccactgtgaacaagcttttgcagcttcccagcacgaccattgaaaatatctctgtgtctgtccaccagccacagcccaaacacatcaaacttgctaagcggcggatacccccagcttctaagatcccagcttctgcagtggaaatgcctggttcagcagatgtcacaggattaaatgtgcagtttggggctctggaatttgggtcagaaccttctctctctgaatttggatcagctccaagcagtgaaaatagtaatcagattcccatcagcttgtattcgaagtctttaagtgagcctttgaatacatctttatcaatgaccagtgcagtacagaactccacatatacaacttccgtcattacctcctgcagtctgacaagctcatcactgaattctgctagtccagtagcaatgtcttcctcttatgaccagagttctgtgcataacaggatcccataccaaagccctgtgagttcatcagagtcagctccaggaaccatcatgaatggacatggtggtggtcgaagtcagcagacactagacactccaaagacaacaggccctccctctgccctcccgtctgtgagctccctgcccagcaccacctcctgcactgcacttctgccgtccacatcccagcacactggcgacctgactagcagccctctctctcagcttagcagttcgctctccagccaccagagcagcctctctgcacatgcagccctctcctcgagcacgtcacacacacatgccagtgtggagagcgcctcttcccaccagtcctcagccaccttctccacggcagcgacctccgtctcaagttccgcatcctcaggcgccagcctgtccagtagcatgaacaccgcgaacagcctctgtctgggtgggacccccgcgagtgcatccagcagcagtagcagggccgcgcccttggtgacctcaggcaaagcacccccaaacttacctcagggggtgcctcccctgctgcacaaccagtacctcgtaggtcccggaggactgcttcctgcctacccgatctatggctatgacgagctccagatgctgcagtcacggctgccagtggactactatggaattccctttgctgcacccacagcgcttgccagccgagatgggagcctagctaataatccatatccaggtgatgtcacaaagtttggccgtggggactctgcatcccctgcacccgctaccacaccagctcagccacagcagagccaatcacagacccaccacacagcccagcagcccttcgtgaatcctgcactgccacctggctatagctacactggtcttccctactacacaggcatgcccagtgccttccagtatggccccaccatgtttgtccctccagcctcagccaagcaacatggggtgaacctcagcactcccacacctcccttccagcaggccagtggttatggccagcacggctacagtacaggttatgacgacctgacccaggggacagcagcaggagactactccaaaggtggctatgctggatcatcgcaggcaccaaacaagtctgcaggttctgggcctggcaaaggagtatcagtgtcttcaagcaccactggtctacctgatatgactggttctgtctacaataagacacagacttttgacaagcagggatttcatgcagggacgcctccacctttcagcctgccctcggtcttgggctccactgggcccctggcctcgggagcggcccctggctatgcacccccaccattcctacacatcttgccagcccaccagcagccccactcacagctgctgcaccaccaccttccgcaggatgcacagagtggctcgggtcagcgcagccagcccagctccctgcagcccaagtctcaagcctccaaacctgcctacggcaactctccatactggacaaactaaacccagaagagaggggtgggctggggcaaggcttatcctgggcaggagagaacacacgagcacgtatttgggagcccagtgccctttcctagaattcccgacatgtgtcagccatgcctctgtggggagtctgcctcccagactggctactgtatgtaatgtatttatgtatgtatttgtaaatgtgatagaagtctgggggggagttgggggatggcggcagatgttagccaggtctgccctccccattcaagccccttctccactgtagcaaaataagcacccccaccccatctgccttcaggtcttcttcacagcctgcactgcccagtgggccactaggggcagtctctggaagggctg

SEQ ID NO: 196982 - DNA, 3997 bp, Homo sapiens
  Payload ID: 18854
  Gene Name: ubiquitin associated protein 2-like
  ENST ID: ENST00000271877
  CDS Start-End: 168-3407
aagtgggcgggggaaggcgcgagagcgagcgcgagagggaaaaggagggagggggtggggaagagggaatcttatatcacgtgacaggggcggcgcggcccggggtgtcagtgtggaggagactgagtattctaccttgtaaatactgttatttgtatatactgtaaatgatgacatcggtgggcactaaccgagcccggggaaactgggaacaacctcaaaaccaaaaccagacacagcacaagcagcggccacaggccactgcagaacaaattagacttgcacagatgatttcggaccataatgatgctgactttgaggagaaggtgaaacaattgattgatattacaggcaagaaccaggatgaatgtgtgattgctttgcatgactgcaatggagatgtcaacagagctatcaatgttcttctggaaggaaacccagacacgcattcctgggagatggtcgggaagaagaagggagtctcaggccagaaggatggtggccagacggaatccaatgaggaaggcaaagaaaatcgagaccgggacagagactatagtcggcgacgtggtgggccaccaagacgggggagaggtgccagccgtggacgagagtgtatgcatggggctttatcaaaaccagctgtggttcgaggtcaggaaaatggattggatggcaccaagagtggagggccttctggaagaggaacagaaagaggcagaaggggccgtggccgaggcagaggtggctctggtaggcgaggaggaaggttttctgctcaaggaatgggaacctttaacccagctgattatgcagagccagccaatactgatgataactatggcaatagcagcggcaatacgtggaacaacactggccactttgaaccagatgatgggacgagtgcatggaggactgcaacagaggagtgggggactgaagattggaatgaagatctttctgagaccaagatcttcactgcctctaatgtgtcttcagtgcctctgcctgcggagaatgtgacaatcactgctggtcagagaattgaccttgctgttctgctggggaagacaccatctacaatggagaatgattcatctaatctggatccgtctcaggctccttctctggcccagcctctggtgttcagtaattcgaagcagactgccatatcacagcctgcttcagggaacacattttctcatcacagtatggtgagcatgttagggaaaggatttggtgatgtcggtgaagctaaaggcggcagtactacaggctcccagttcttggagcaattcaagactgcccaagccctggctcagttggcagctcagcattctcagtctggaagcaccaccacctcctcttgggacatgggctcgacgacacaatccccatcactggtgcagtatgatttgaagaacccaagtgattcagcagtgcacagcccctttacaaagcgccaggcttttaccccatcttcaaccatgatggaggtgttccttcaggagaagtcacctgcagtggctacctccacagctgcacctccacctccgtcttctcctctgccaagcaaatccacatcggctccacagatgtcgcctggatcttcagacaaccagtcctctagccctcagccggctcagcagaaactgaaacagcagaagaaaaaagcctccttgacttctaagattcctgctctggctgtggagatgcctggctcagcagatatctcagggctaaacctgcagtttggggcattgcagtttgggtcagagcctgtcctttctgattatgagtccacccccaccacgagcgcctcttcaagccaggctccaagtagcctgtataccagcacggccagtgaatcatcctctacaatttcatctaaccagagtcaggagtctggttatcagagcggcccaattcagtcgacaacctatacctcccaaaataatgctcagggccctctttatgaacagagatccacacagactcggcggtaccccagctccatctcttcatcaccccaaaaggacctgactcaggcaaagaatggcttcagttctgtgcaggccacgcagttacagaccacacaatctgttgaaggtgctacaggctctgcagtgaaatctgattcaccttccacttctagcatcccccctctcaatgaaacggtatctgcagcttccttactgacgacaaccaatcagcattcatcctccttgggtggcttgagccacagtgaggagattccaaatactaccaccacacaacacagcagcacgttatctacgcagcagaataccctttcatcatcaacatcttctgggcgcacttcgacatccactcttttgcacacaagtgtggagagtgaggcgaatctccattcttcctccagcactttttccaccacatccagcacagtctctgcacctcccccagtggtcagtgtctcctccagtctcaatagtggcagtagcctgggcctcagcctaggcagcaactccactgtcacagcctcgactcgaagctcagttgctacgacttcaggaaaagctcctcccaacctccctcctggggtcccgccgttgttgcctaatccgtatattatggctccagggctgttacatgcctacccgccacaagtatatggttatgatgacttgcagatgcttcagacaagatttccattggattactacagcatcccatttcccacacccactactccgctgactgggagggatggtagcctggccagcaacccttattctggtgacctcacaaagttcggccgtggggatgcctcctccccagccccggccacaaccttggcccaaccccaacagaaccagacgcagactcaccataccacgcagcagacattcctgaacccggcgctgcctcctggctacagttacaccagcctgccatactatacaggggtcccgggcctccccagcaccttccagtatgggcctgctgtgttccctgtggctcctacctcttccaagcagcatggtgtgaatgtcagtgtgaatgcatcggccacccctttccaacagccgagtggatatgggtctcatggatacaacactggtgtttcagtcacctccagtaacacgggcgtgccagatatctcgggttctgtgtactccaaaacccagcagtcctttgagaaacaaggttttcattccggtactcctgctgcttccttcaacttgccttcagccctaggaagtgggggccccatcaatccggccacagctgctgcctacccacctgccccctttatgcacattctgaccccccatcagcagccgcattctcagatccttcaccatcacctgcagcaggatggccaggacatcctcaatttcgtcgatgaccagcttggtgaataagtattactgtaccaactgggcctcctctagcaggcccctgaaggcagtggaataaaatgaaatcttcgccctttaagaactcctgaccttaatgtggtagtagtatcttgtccttgaggggatttccttcccctcacccctaagactttcacaacctggtgactggaaagaaccaccacaaatcttcatttcctccagaaactgctacatctacagccgatttcaggcagtaaagggagagggatagaggagattgggtggaaaatggagaggatcaagaaggagctgagaccatttcaaagaaaaaaaatgctttatagagttttaagtatgacttagatgggtccaggcaaataaactaaaaagaagtgaaggcaacatgtatcgtctggcagaactaaatcttggagtggggtgagggatgaaagactacatattgggtacagtgtacactgctcgggtgatgggtgcgctaaagtcgcagaaatcactaaagaactcatccatgtaaccaaacaccacctgtaccccaaaaacgaaataaaaaaacaaaaccttggggcccattccccctaggaatggactactgt

SEQ ID NO: 196983 - DNA, 3411 bp, Homo sapiens
  Payload ID: 18854
  Gene Name: ubiquitin associated protein 2-like
  Uniprot ID: Q14157
  ENST ID: ENST00000343815
  CDS Start-End: 107-3058
cccgactaagtgacttaaactcccacctactcctggaataaggagtcaaagcccggataggcgcagtattctaccttgtaaatactgttatttgtatatactgtaaatgatgacatcggtgggcactaaccgagcccggggaaactgggaacaacctcaaaaccaaaaccagacacagcacaagcagcggccacaggccactgcagaacaaattagacttgcacagatgatttcggaccataatgatgctgactttgaggagaaggtgaaacaattgattgatattacaggcaagaaccaggatgaatgtgtgattgctttgcatgactgcaatggagatgtcaacagagctatcaatgttcttctggaaggaaacccagacacgcattcctgggagatggtcgggaagaagaagggagtctcaggccagaaggatggtggccagacggaatccaatgaggaaggcaaagaaaatcgagaccgggacagagactatagtcggcgacgtggtgggccaccaagacgggggagaggtgccagccgtggacgagagtttcgaggtcaggaaaatggattggatggcaccaagagtggagggccttctggaagaggaacagaaagaggcagaaggggccgtggccgaggcagaggtggctctggtaggcgaggaggaaggttttctgctcaaggaatgggaacctttaacccagctgattatgcagagccagccaatactgatgataactatggcaatagcagcggcaatacgtggaacaacactggccactttgaaccagatgatgggacgagtgcatggaggactgcaacagaggagtgggggactgaagattggaatgaagatctttctgagaccaagatcttcactgcctctaatgtgtcttcagtgcctctgcctgcggagaatgtgacaatcactgctggtcagagaattgaccttgctgttctgctggggaagacaccatctacaatggagaatgattcatctaatctggatccgtctcaggctccttctctggcccagcctctggtgttcagtaattcgaagcagactgccatatcacagcctgcttcagggaacacattttctcatcacagtatggtgagcatgttagggaaaggatttggtgatgtcggtgaagctaaaggcggcagtactacaggctcccagttcttggagcaattcaagactgcccaagccctggctcagttggcagctcagcattctcagtctggaagcaccaccacctcctcttgggacatgggctcgacgacacaatccccatcactggtgcagtatgatttgaagaacccaagtgattcagcagtgcacagcccctttacaaagcgccaggcttttaccccatcttcaaccatgatggaggtgttccttcaggagaagtcacctgcagtggctacctccacagctgcacctccacctccgtcttctcctctgccaagcaaatccacatcggctccacagatgtcgcctggatcttcagacaaccagtcctctagccctcagccggctcagcagaaactgaaacagcagaagaaaaaagcctccttgacttctaagattcctgctctggctgtggagatgcctggctcagcagatatctcagggctaaacctgcagtttggggcattgcagtttgggtcagagcctgtcctttctgattatgagtccacccccaccacgagcgcctcttcaagccaggctccaagtagcctgtataccagcacggccagtgaatcatcctctacaatttcatctaaccagagtcaggagtctggttatcagagcggcccaattcagtcgacaacctatacctcccaaaataatgctcagggccctctttatgaacagagatccacacagactcggcggtaccccagctccatctcttcatcaccccaaaaggacctgactcaggcaaagaatggcttcagttctgtgcaggccacgcagttacagaccacacaatctgttgaaggtgctacaggctctgcagtgaaatctgattcaccttccacttctagcatcccccctctcaatgaaacggtatctgcagcttccttactgacgacaaccaatcagcattcatcctccttgggtggcttgagccacagtgaggagattccaaatactaccaccacacaacacagcagcacgttatctacgcagcagaataccctttcatcatcaacatcttctgggcgcacttcgacatccactcttttgcacacaagtgtggagagtgaggcgaatctccattcttcctccagcactttttccaccacatccagcacagtctctgcacctcccccagtggtcagtgtctcctccagtctcaatagtggcagtagcctgggcctcagcctaggcagcaactccactgtcacagcctcgactcgaagctcagttgctacgacttcaggaaaagctcctcccaacctccctcctggggtcccgccgttgttgcctaatccgtatattatggctccagggctgttacatgcctacccgccacaagtatatggttatgatgacttgcagatgcttcagacaagatttccattggattactacagcatcccatttcccacacccactactccgctgactgggagggatggtagcctggccagcaacccttattctggtgacctcacaaagttcggccgtggggatgcctcctccccagccccggccacaaccttggcccaaccccaacagaaccagacgcagactcaccataccacgcagcagacattcctgaacccggcgctgcctcctggctacagttacaccagcctgccatactatacaggggtcccgggcctccccagcaccttccagtatgggcctgctgtgttccctgtggctcctacctcttccaagcagcatggtgtgaatgtcagtgtgaatgcatcggccacccctttccaacagccgagtggatatgggtctcatggatacaacactggaagaaaatatccacccccttacaagcatttctggacggctgagagctaatttggcccaaggctgggggctgtgttttgtgtgtgtgtataaatttgcactgaagtcttgtttcagaaaccagaccactgaggagagcctgctgagctgaggccatggcctgcgtggcttggggaaatgagttggtggataccttctgggcttttgaacttgcccctcccccatttccctctcccccatgtgtctgaccctgtcttacccatttcaagttcaagcggtgcagcaccttcgaagcatcaatgcacacacctgctgttgcttttgatttctggaaggcatgtagtttcaacttgtaacaaaaatatttgtagtcttcaataaactgtggtatttctttagctaac

SEQ ID NO: 196984 - DNA, 3864 bp, Homo sapiens
  Payload ID: 18854
  Gene Name: ubiquitin associated protein 2-like
  Uniprot ID: Q14157
  ENST ID: ENST00000361546
  CDS Start-End: 43-3306
agtattctaccttgtaaatactgttatttgtatatactgtaaatgatgacatcggtgggcactaaccgagcccggggaaactgggaacaacctcaaaaccaaaaccagacacagcacaagcagcggccacaggccactgcagaacaaattagacttgcacagatgatttcggaccataatgatgctgactttgaggagaaggtgaaacaattgattgatattacaggcaagaaccaggatgaatgtgtgattgctttgcatgactgcaatggagatgtcaacagagctatcaatgttcttctggaaggaaacccagacacgcattcctgggagatggtcgggaagaagaagggagtctcaggccagaaggatggtggccagacggaatccaatgaggaaggcaaagaaaatcgagaccgggacagagactatagtcggcgacgtggtgggccaccaagacgggggagaggtgccagccgtggacgagagtttcgaggtcaggaaaatggattggatggcaccaagagtggagggccttctggaagaggaacagaaagaggcagaaggggccgtggccgaggcagaggtggctctggtaggcgaggaggaaggttttctgctcaaggaatgggaacctttaacccagctgattatgcagagccagccaatactgatgataactatggcaatagcagcggcaatacgtggaacaacactggccactttgaaccagatgatgggacgagtgcatggaggactgcaacagaggagtgggggactgaagattggaatgaagatctttctgagaccaagatcttcactgcctctaatgtgtcttcagtgcctctgcctgcggagaatgtgacaatcactgctggtcagagaattgaccttgctgttctgctggggaagacaccatctacaatggagaatgattcatctaatctggatccgtctcaggctccttctctggcccagcctctggtgttcagtaattcgaagcagactgccatatcacagcctgcttcagggaacacattttctcatcacagtatggtgagcatgttagggaaaggatttggtgatgtcggtgaagctaaaggcggcagtactacaggctcccagttcttggagcaattcaagactgcccaagccctggctcagttggcagctcagcattctcagtctggaagcaccaccacctcctcttgggacatgggctcgacgacacaatccccatcactggtgcagtatgatttgaagaacccaagtgattcagcagtgcacagcccctttacaaagcgccaggcttttaccccatcttcaaccatgatggaggtgttccttcaggagaagtcacctgcagtggctacctccacagctgcacctccacctccgtcttctcctctgccaagcaaatccacatcggctccacagatgtcgcctggatcttcagacaaccagtcctctagccctcagccggctcagcagaaactgaaacagcagaagaaaaaagcctccttgacttctaagattcctgctctggctgtggagatgcctggctcagcagatatctcagggctaaacctgcagtttggggcattgcagtttgggtcagagcctgtcctttctgattatgagtccacccccaccacgagcgcctcttcaagccaggctccaagtagcctgtataccagcacggccagtgaatcatcctctacaatttcatctaaccagagtcaggagtctggttatcagagcggcccaattcagtcgacaacctatacctcccaaaataatgctcagggccctctttatgaacagagatccacacagactcggcggtaccccagctccatctcttcatcaccccaaaaggacctgactcaggcaaagaatggcttcagttctgtgcaggccacgcagttacagaccacacaatctgttgaaggtgctacaggctctgcagtgaaatctgattcaccttccacttctagcatcccccctctcaatgaaacggtatctgcagcttccttactgacgacaaccaatcagcattcatcctccttgggtggcttgagccacagtgaggagattccaaatactaccaccacacaacacagcagcacgttatctacgcagcagaataccctttcatcatcaacatcttctgggcgcacttcgacatccactcttttgcacacaagtgtggagagtgaggcgaatctccattcttcctccagcactttttccaccacatccagcacagtctctgcacctcccccagtggtcagtgtctcctccagtctcaatagtggcagtagcctgggcctcagcctaggcagcaactccactgtcacagcctcgactcgaagctcagttgctacgacttcaggaaaagctcctcccaacctccctcctggggtcccgccgttgttgcctaatccgtatattatggctccagggctgttacatgcctacccgccacaagtatatggttatgatgacttgcagatgcttcagacaagatttccattggattactacagcatcccatttcccacacccactactccgctgactgggagggatggtagcctggccagcaacccttattctggtgacctcacaaagttcggccgtggggatgcctcctccccagccccggccacaaccttggcccaaccccaacagaaccagacgcagactcaccataccacgcagcagacattcctgaacccggcgctgcctcctggctacagttacaccagcctgccatactatacaggggtcccgggcctccccagcaccttccagtatgggcctgctgtgttccctgtggctcctacctcttccaagcagcatggtgtgaatgtcagtgtgaatgcatcggccacccctttccaacagccgagtggatatgggtctcatggatacaacactggtgtttcagtcacctccagtaacacgggcgtgccagatatctcgggttctgtgtactccaaaacccagcagtcctttgagaaacaaggttttcattccggtactcctgctgcttccttcaacttgccttcagccctaggaagtgggggccccatcaatccggccacagctgctgcctacccacctgccccctttatgcacattctgaccccccatcagcagccgcattctcagatccttcaccatcacctgcagcaggatggccagacgggcagcgggcaacgtagccagaccagctccatcccgcagaagccccagaccaacaagtctgcctacaacagctacagctggggggccaactgaggccctgaccctcttctcccggtcccatcttctgagagggcttctcagcctggaaactatggaaacagcatcaaagagaaaggaatgtggggggtttccgctgccccccacccccagcggcccaccccatgcctcagcttcatgtctgtcccattcctataccatccccaccctgttgtatgtattataggatttgtattttctccttttttttcccccttccattccttctcccctcttgcattcaagattatgaaactttgctatgggccctgcacttcctttgcttcctcctgttcaccctggtggtgtacggatgaggcggggaggtgggacccccaaacatatatcagcccaacagccctaagtctccttctttattattaggaaaacaacaacaacaacaaacaaaaaaatggcgtcatgaatatgaacagcattgtcagatgaattagttgaagtggttttttttttgttttttttttttttttgtactgtgtcctcaaatttaatggattaatgtgtcttgtatatataaaaagaaaacctctaccttca

SEQ ID NO: 196985 - DNA, 1120 bp, Homo sapiens
  Payload ID: 18854
  Gene Name: ubiquitin associated protein 2-like
  ENST ID: ENST00000368504
  CDS Start-End: 70-1120
cccggggtgtcagtgtggaggagactgagtattctaccttgtaaatactgttatttgtatatactgtaaatgatgacatcggtgggcactaaccgagcccggggaaactgggaacaacctcaaaaccaaaaccagacacagcacaagcagcggccacaggccactgcagaacaaattagacttgcacagatgatttcggaccataatgatgctgactttgaggagaaggtgaaacaattgattgatattacaggcaagaaccaggatgaatgtgtgattgctttgcatgactgcaatggagatgtcaacagagctatcaatgttcttctggaaggaaacccagacacgcattcctgggagatggtcgggaagaagaagggagtctcaggccagaaggatggtggccagacggaatccaatgaggaaggcaaagaaaatcgagaccgggacagagactatagtcggcgacgtggtgggccaccaagacgggggagaggtgccagccgtggacgagagtgtatgcatggggctttatcaaaaccagctgtggttcgaggtcaggaaaatggattggatggcaccaagagtggagggccttctggaagaggaacagaaagaggcagaaggggccgtggccgaggcagaggtggctctggtaggcgaggaggaaggttttctgctcaaggaatgggaacctttaacccagctgattatgcagagccagccaatactgatgataactatggcaatagcagcggcaatacgtggaacaacactggccactttgaaccagatgatgggacgagtgcatggaggactgcaacagaggagtgggggactgaagattggaatgaagatctttctgagaccaagatcttcactgcctctaatgtgtcttcagtgcctctgcctgcggagaatgtgacaatcactgctggtcagagaattgaccttgctgttctgctggggaagacaccatctacaatggagaatgattcatctaatctggatccgtctcaggctccttctctggcccagcctctggtgttcagtaattcgaagcagactgccatatcacagcctgcttcagggaacacattttctcatcacagtatggtga

SEQ ID NO: 196986 - DNA, 980 bp, Homo sapiens
  Payload ID: 18854
  Gene Name: ubiquitin associated protein 2-like
  ENST ID: ENST00000412596
  CDS Start-End: 139-980
gcggcccggggtgtcagtgtggaggagactgaggtaaagttgggagcgcagcggcgttggcggcggcggcggcggcagcggcagcgcggcggggccggtattctaccttgtaaatactgttatttgtatatactgtaaatgatgacatcggtgggcactaaccgagcccggggaaactgggaacaacctcaaaaccaaaaccagacacagcacaagcagcggccacaggccactgcagaacaaattagacttgcacagatgatttcggaccataatgatgctgactttgaggagaaggtgaaacaattgattgatattacaggcaagaaccaggatgaatgtgtgattgctttgcatgactgcaatggagatgtcaacagagctatcaatgttcttctggaaggaaacccagacacgcattcctgggagatggtcgggaagaagaagggagtctcaggccagaaggatggtggccagacggaatccaatgaggaaggcaaagaaaatcgagaccgggacagagactatagtcggcgacgtggtgggccaccaagacgggggagaggtgccagccgtggacgagagtttcgaggtcaggaaaatggattggatggcaccaagagtggagggccttctggaagaggaacagaaagaggcagaaggggccgtggccgaggcagaggtggctctggtaggcgaggaggaaggttttctgctcaaggaatgggaacctttaacccagctgattatgcagagccagccaatactgatgataactatggcaatagcagcggcaatacgtggaacaacactggccactttgaaccagatgatgggacgagtgcatggaggactgcaacagaggagtgggggactgaagattggaatgaagatctttctgagaccaagatcttcactgcctctaatgtgtcttcagtgcctctgcctgcggagaatgtgacaatcactgctggtcagag

SEQ ID NO: 196987 - DNA, 3988 bp, Homo sapiens
  Payload ID: 18854
  Gene Name: ubiquitin associated protein 2-like
  Uniprot ID: Q14157
  ENST ID: ENST00000428931
  CDS Start-End: 168-3431
aagtgggcgggggaaggcgcgagagcgagcgcgagagggaaaaggagggagggggtggggaagagggaatcttatatcacgtgacaggggcggcgcggcccggggtgtcagtgtggaggagactgagtattctaccttgtaaatactgttatttgtatatactgtaaatgatgacatcggtgggcactaaccgagcccggggaaactgggaacaacctcaaaaccaaaaccagacacagcacaagcagcggccacaggccactgcagaacaaattagacttgcacagatgatttcggaccataatgatgctgactttgaggagaaggtgaaacaattgattgatattacaggcaagaaccaggatgaatgtgtgattgctttgcatgactgcaatggagatgtcaacagagctatcaatgttcttctggaaggaaacccagacacgcattcctgggagatggtcgggaagaagaagggagtctcaggccagaaggatggtggccagacggaatccaatgaggaaggcaaagaaaatcgagaccgggacagagactatagtcggcgacgtggtgggccaccaagacgggggagaggtgccagccgtggacgagagtttcgaggtcaggaaaatggattggatggcaccaagagtggagggccttctggaagaggaacagaaagaggcagaaggggccgtggccgaggcagaggtggctctggtaggcgaggaggaaggttttctgctcaaggaatgggaacctttaacccagctgattatgcagagccagccaatactgatgataactatggcaatagcagcggcaatacgtggaacaacactggccactttgaaccagatgatgggacgagtgcatggaggactgcaacagaggagtgggggactgaagattggaatgaagatctttctgagaccaagatcttcactgcctctaatgtgtcttcagtgcctctgcctgcggagaatgtgacaatcactgctggtcagagaattgaccttgctgttctgctggggaagacaccatctacaatggagaatgattcatctaatctggatccgtctcaggctccttctctggcccagcctctggtgttcagtaattcgaagcagactgccatatcacagcctgcttcagggaacacattttctcatcacagtatggtgagcatgttagggaaaggatttggtgatgtcggtgaagctaaaggcggcagtactacaggctcccagttcttggagcaattcaagactgcccaagccctggctcagttggcagctcagcattctcagtctggaagcaccaccacctcctcttgggacatgggctcgacgacacaatccccatcactggtgcagtatgatttgaagaacccaagtgattcagcagtgcacagcccctttacaaagcgccaggcttttaccccatcttcaaccatgatggaggtgttccttcaggagaagtcacctgcagtggctacctccacagctgcacctccacctccgtcttctcctctgccaagcaaatccacatcggctccacagatgtcgcctggatcttcagacaaccagtcctctagccctcagccggctcagcagaaactgaaacagcagaagaaaaaagcctccttgacttctaagattcctgctctggctgtggagatgcctggctcagcagatatctcagggctaaacctgcagtttggggcattgcagtttgggtcagagcctgtcctttctgattatgagtccacccccaccacgagcgcctcttcaagccaggctccaagtagcctgtataccagcacggccagtgaatcatcctctacaatttcatctaaccagagtcaggagtctggttatcagagcggcccaattcagtcgacaacctatacctcccaaaataatgctcagggccctctttatgaacagagatccacacagactcggcggtaccccagctccatctcttcatcaccccaaaaggacctgactcaggcaaagaatggcttcagttctgtgcaggccacgcagttacagaccacacaatctgttgaaggtgctacaggctctgcagtgaaatctgattcaccttccacttctagcatcccccctctcaatgaaacggtatctgcagcttccttactgacgacaaccaatcagcattcatcctccttgggtggcttgagccacagtgaggagattccaaatactaccaccacacaacacagcagcacgttatctacgcagcagaataccctttcatcatcaacatcttctgggcgcacttcgacatccactcttttgcacacaagtgtggagagtgaggcgaatctccattcttcctccagcactttttccaccacatccagcacagtctctgcacctcccccagtggtcagtgtctcctccagtctcaatagtggcagtagcctgggcctcagcctaggcagcaactccactgtcacagcctcgactcgaagctcagttgctacgacttcaggaaaagctcctcccaacctccctcctggggtcccgccgttgttgcctaatccgtatattatggctccagggctgttacatgcctacccgccacaagtatatggttatgatgacttgcagatgcttcagacaagatttccattggattactacagcatcccatttcccacacccactactccgctgactgggagggatggtagcctggccagcaacccttattctggtgacctcacaaagttcggccgtggggatgcctcctccccagccccggccacaaccttggcccaaccccaacagaaccagacgcagactcaccataccacgcagcagacattcctgaacccggcgctgcctcctggctacagttacaccagcctgccatactatacaggggtcccgggcctccccagcaccttccagtatgggcctgctgtgttccctgtggctcctacctcttccaagcagcatggtgtgaatgtcagtgtgaatgcatcggccacccctttccaacagccgagtggatatgggtctcatggatacaacactggtgtttcagtcacctccagtaacacgggcgtgccagatatctcgggttctgtgtactccaaaacccagcagtcctttgagaaacaaggttttcattccggtactcctgctgcttccttcaacttgccttcagccctaggaagtgggggccccatcaatccggccacagctgctgcctacccacctgccccctttatgcacattctgaccccccatcagcagccgcattctcagatccttcaccatcacctgcagcaggatggccagacgggcagcgggcaacgtagccagaccagctccatcccgcagaagccccagaccaacaagtctgcctacaacagctacagctggggggccaactgaggccctgaccctcttctcccggtcccatcttctgagagggcttctcagcctggaaactatggaaacagcatcaaagagaaaggaatgtggggggtttccgctgccccccacccccagcggcccaccccatgcctcagcttcatgtctgtcccattcctataccatccccaccctgttgtatgtattataggatttgtattttctccttttttttcccccttccattccttctcccctcttgcattcaagattatgaaactttgctatgggccctgcacttcctttgcttcctcctgttcaccctggtggtgtacggatgaggcggggaggtgggacccccaaacatatatcagcccaacagccctaagtctccttctttattattaggaaaacaacaacaacaacaaacaaaaaaatggcgtcatgaatatgaacagcattgtcagatgaattagttgaagtggttttttttttgttttttttttttttttgtactgtgtcctcaaatttaatggattaatgtgtcttgtatatataaaaagaaaacctctaccttc

SEQ ID NO: 196988 - DNA, 911 bp, Homo sapiens
  Payload ID: 18854
  Gene Name: ubiquitin associated protein 2-like
  ENST ID: ENST00000437652
  CDS Start-End: 115-911
gagactgaggtaaagttgggagcgcagcggcgttggcggcggcggcggcggcagcggcagcgcggcggggccggtattctaccttgtaaatactgttatttgtatatactgtaaatgatgacatcggtgggcactaaccgagcccggggaaactgggaacaacctcaaaaccaaaaccagacacagcacaagcagcggccacaggccactgcagaacaaattagacttgcacagatgatttcggaccataatgatgctgactttgaggagaaggtgaaacaattgattgatattacaggcaagaaccaggatgaatgtgtgattgctttgcatgactgcaatggagatgtcaacagagctatcaatgttcttctggaaggaaacccagacacgcattcctgggagatggtcgggaagaagaagggagtctcaggccagaaggatggtggccagacggaatccaatgaggaaggcaaagaaaatcgagaccgggacagagactatagtcggcgacgtggtgggccaccaagacgggggagagttcgaggtcaggaaaatggattggatggcaccaagagtggagggccttctggaagaggaacagaaagaggcagaaggggccgtggccgaggcagaggtggctctggtaggcgaggaggaaggttttctgctcaaggaatgggaacctttaacccagctgattatgcagagccagccaatactgatgataactatggcaatagcagcggcaatacgtggaacaacactggccactttgaaccagatgatgggacgagtgcatggaggactgcaacagaggagtgggggactgaagattggaatgaagatctttctgagaccaagatcttcactgcctctaatgtgtcttcagtgcctctgcctgcggagaa

SEQ ID NO: 196989 - DNA, 1419 bp, Homo sapiens
  Payload ID: 18854
  Gene Name: ubiquitin associated protein 2-like
  ENST ID: ENST00000428595
  CDS Start-End: 1-1150
tgtggagagtgaggcgaatctccattcttcctccagcactttttccaccacatccagcacagtctctgcacctcccccagtggtcagtgtctcctccagtctcaatagtggcagtagcctgggcctcagcctaggcagcaactccactgtcacagcctcgactcgaagctcagttgctacgacttcaggaaaagctcctcccaacctccctcctggggtcccgccgttgttgcctaatccgtatattatggctccagggctgttacatgcctacccgccacaagtatatggttatgatgacttgcagatgcttcagacaagatttccattggattactacagcatcccatttcccacacccactactccgctgactgggagggatggtagcctggccagcaacccttattctggtgacctcacaaagttcggccgtggggatgcctcctccccagccccggccacaaccttggcccaaccccaacagaaccagacgcagactcaccataccacgcagcagacattcctgaacccggcgctgcctcctggctacagttacaccagcctgccatactatacaggggtcccgggcctccccagcaccttccagtatgggcctgctgtgttccctgtggctcctacctcttccaagcagcatggtgtgaatgtcagtgtgaatgcatcggccacccctttccaacagccgagtggatatgggtctcatggatacaacactggtgtttcagtcacctccagtaacacgggcgtgccagatatctcgggttctgtgtactccaaaacccagcagtcctttgagaaacaaggttttcattccggtactcctgctgcttccttcaacttgccttcagccctaggaagtgggggccccatcaatccggccacagctgctgcctacccacctgccccctttatgcacattctgaccccccatcagcagccgcattctcagatccttcaccatcacctgcagcaggatggccagctaccatatttgcagatgattctctgttgccagcgccagcaggaggagcagacgggcagcgggcaacgtagccagaccagctccatcccgcagaagccccagaccaacaagtctgcctacaacagctacagctggggggccaactgaggccctgaccctcttctcccggtcccatcttctgagagggcttctcagcctggaaactatggaaacagcatcaaagagaaaggaatgtggggggtttccgctgccccccacccccagcggcccaccccatgcctcagcttcatgtctgtcccattcctataccatccccaccctgttgtatgtattataggatttgtattttctccttttttttcccccttccattccttctcccctcttgcattcaagattatgaaactttgctatgg

SEQ ID NO: 196990 - DNA, 678 bp, Homo sapiens
  Payload ID: 18854
  Gene Name: ubiquitin associated protein 2-like
  ENST ID: ENST00000441890
  CDS Start-End: 132-678
gggaaaaggagggagggggtggggaagagggaatcttatatcacgtgacaggggcggcgcggcccggggtgtcagtgtggaggagactgagtattctaccttgtaaatactgttatttgtatatactgtaaatgatgacatcggtgggcactaaccgagcccggggaaactgggaacaacctcaaaaccaaaaccagacacagcacaagcagcggccacaggccactgcagaacaaattagacttgcacagatgatttcggaccataatgatgctgactttgaggagaaggtgaaacaattgattgatattacaggcaagaaccaggatgaatgtgtgattgctttgcatgactgcaatggagatgtcaacagagctatcaatgttcttctggaaggaaacccagacacgcattcctgggagatggtcgggaagaagaagggagtctcaggccagaaggatggtggccagacggaatccaatgaggaaggcaaagaaaatcgagaccgggacagagactatagtcggcgacgtggtgggccaccaagacgggggagaggtgccagccgtggacgagagtttcgaggtcaggaaaatggattggatggcaccaagagtggagggccttctggaagaggaacagaaagaggcagaaggggccgtggccgaggcagaggtg

SEQ ID NO: 196991 - DNA, 1789 bp, Homo sapiens
  Payload ID: 18854
  Gene Name: ubiquitin associated protein 2-like
  ENST ID: ENST00000433615
  CDS Start-End: 1-1198
tcagcattcatcctccttgggtggcttgagccacagtgaggagattccaaatactaccaccacacaacacagcagcacgttatctacgcagcagaataccctttcatcatcaacatcttctgggcgcacttcgacatccactcttttgcacacaagtgtggagagtgaggcgaatctccattcttcctccagcactttttccaccacatccagcacagtctctgcacctcccccagtggtcagtgtctcctccagtctcaatagtggcagtagcctgggcctcagcctaggcagcaactccactgtcacagcctcgactcgaagctcagttgctacgacttcaggaaaagctcctcccaacctccctcctggggtcccgccgttgttgcctaatccgtatattatggctccagggctgttacatgcctacccgccacaagtatatggttatgatgacttgcagatgcttcagacaagatttccattggattactacagcatcccatttcccacacccactactccgctgactgggagggatggtagcctggccagcaacccttattctggtgacctcacaaagttcggccgtggggatgcctcctccccagccccggccacaaccttggcccaaccccaacagaaccagacgcagactcaccataccacgcagcagacattcctgaacccggcgctgcctcctggctacagttacaccagcctgccatactatacaggggtcccgggcctccccagcaccttccagtatgggcctgctgtgttccctgtggctcctacctcttccaagcagcatggtgtgaatgtcagtgtgaatgcatcggccacccctttccaacagccgagtggatatgggtctcatggatacaacactggtgtttcagtcacctccagtaacacgggcgtgccagatatctcgggttctgtgtactccaaaacccagcagtcctttgagaaacaaggttttcattccggtactcctgctgcttccttcaacttgccttcagccctaggaagtgggggccccatcaatccggccacagctgctgcctacccacctgccccctttatgcacattctgaccccccatcagcagccgcattctcagatccttcaccatcacctgcagcaggatggccaggacatcctcaatttcgtcgatgaccagcttggtgaataagtattactgtaccaactgggcctcctctagcaggcccctgaaggcagtggaataaaatgaaatcttcgccctttaagaactcctgaccttaatgtggtagtagtatcttgtccttgaggggatttccttcccctcacccctaagactttcacaacctggtgactggaaagaaccaccacaaatcttcatttcctccagaaactgctacatctacagccgatttcaggcagtaaagggagagggatagaggagattgggtggaaaatggagaggatcaagaaggagctgagaccatttcaaagaaaaaaaatgctttatagagttttaagtatgacttagatgggtccaggcaaataaactaaaaagaagtgaaggcaacatgtatcgtctggcagaactaaatcttggagtggggtgagggatgaaagactacatattgggtacagtgtacactgctcgggtgatgggtgcgctaaagtcgcagaaatcactaaagaactcatccatgtaaccaaacaccacctgtaccccaaaaacgaaataaaaaaacaaaaccttggggcccattccccctaggaatggactactgta

SEQ ID NO: 196992 - DNA, 812 bp, Homo sapiens
  Payload ID: 18854
  Gene Name: ubiquitin associated protein 2-like
  ENST ID: ENST00000456325
  CDS Start-End: 110-812
atgcggctagagcctgagaggggagagcgagaaagagcgcgagcgagcgaggcctgggccttgcctgagtattctaccttgtaaatactgttatttgtatatactgtaaatgatgacatcggtgggcactaaccgagcccggggaaactgggaacaacctcaaaaccaaaaccagacacagcacaagcagcggccacaggccactgcagaacaaattagacttgcacagatgatttcggaccataatgatgctgactttgaggagaaggtgaaacaattgattgatattacaggcaagaaccaggatgaatgtgtgattgctttgcatgactgcaatggagatgtcaacagagctatcaatgttcttctggaaggaaacccagacacgcattcctgggagatggtcgggaagaagaagggagtctcaggccagaaggatggtggccagacggaatccaatgaggaaggcaaagaaaatcgagaccgggacagagactatagtcggcgacgtggtgggccaccaagacgggggagaggtgccagccgtggacgagagtttcgaggtcaggaaaatggattggatggcaccaagagtggagggccttctggaagaggaacagaaagaggcagaaggggccgtggccgaggcagaggtggctctggtaggcgaggaggaaggttttctgctcaaggaatgggaacctttaacccagctgattatgcagagccagccaatactgatgataactatggcaatagcagcggcaatacgtggaacaacactggccactttgaaccagatgatgggacga

SEQ ID NO: 196993 - DNA, 3451 bp, Homo sapiens
  Payload ID: 18854
  Gene Name: ubiquitin associated protein 2-like
  Uniprot ID: Q14157
  ENST ID: ENST00000613315
  CDS Start-End: 168-3098
aagtgggcgggggaaggcgcgagagcgagcgcgagagggaaaaggagggagggggtggggaagagggaatcttatatcacgtgacaggggcggcgcggcccggggtgtcagtgtggaggagactgagtattctaccttgtaaatactgttatttgtatatactgtaaatgatgacatcggtgggcactaaccgagcccggggaaactgggaacaacctcaaaaccaaaaccagacacagcacaagcagcggccacaggccactgcagaacaaattagacttgcacagatgatttcggaccataatgatgctgactttgaggagaaggtgaaacaattgattgatattacaggcaagaaccaggatgaatgtgtgattgctttgcatgactgcaatggagatgtcaacagagctatcaatgttcttctggaaggaaacccagacacgcattcctgggagatggtcgggaagaagaagggagtctcaggccagaaggatggtggccagacggaatccaatgaggaaggcaaagaaaatcgagaccgggacagagactatagtcggcgacgtggtgggccaccaagacgggggagagttcgaggtcaggaaaatggattggatggcaccaagagtggagggccttctggaagaggaacagaaagaggcagaaggggccgtggccgaggcagaggtggctctggtaggcgaggaggaaggttttctgctcaaggaatgggaacctttaacccagctgattatgcagagccagccaatactgatgataactatggcaatagcagcggcaatacgtggaacaacactggccactttgaaccagatgatgggacgagtgcatggaggactgcaacagaggagtgggggactgaagattggaatgaagatctttctgagaccaagatcttcactgcctctaatgtgtcttcagtgcctctgcctgcggagaatgtgacaatcactgctggtcagagaattgaccttgctgttctgctggggaagacaccatctacaatggagaatgattcatctaatctggatccgtctcaggctccttctctggcccagcctctggtgttcagtaattcgaagcagactgccatatcacagcctgcttcagggaacacattttctcatcacagtatggtgagcatgttagggaaaggatttggtgatgtcggtgaagctaaaggcggcagtactacaggctcccagttcttggagcaattcaagactgcccaagccctggctcagttggcagctcagcattctcagtctggaagcaccaccacctcctcttgggacatgggctcgacgacacaatccccatcactggtgcagtatgatttgaagaacccaagtgattcagcagtgcacagcccctttacaaagcgccaggcttttaccccatcttcaaccatgatggaggtgttccttcaggagaagtcacctgcagtggctacctccacagctgcacctccacctccgtcttctcctctgccaagcaaatccacatcggctccacagatgtcgcctggatcttcagacaaccagtcctctagccctcagccggctcagcagaaactgaaacagcagaagaaaaaagcctccttgacttctaagattcctgctctggctgtggagatgcctggctcagcagatatctcagggctaaacctgcagtttggggcattgcagtttgggtcagagcctgtcctttctgattatgagtccacccccaccacgagcgcctcttcaagccaggctccaagtagcctgtataccagcacggccagtgaatcatcctctacaatttcatctaaccagagtcaggagtctggttatcagagcggcccaattcagtcgacaacctatacctcccaaaataatgctcagggccctctttatgaacagagatccacacagactcggcggtaccccagctccatctcttcatcaccccaaaaggacctgactcaggcaaagaatggcttcagttctgtgcaggccacgcagttacagaccacacaatctgttgaaggtgctacaggctctgcagtgaaatctgattcaccttccacttctagcatcccccctctcaatgaaacggtatctgcagcttccttactgacgacaaccaatcagcattcatcctccttgggtggcttgagccacagtgaggagattccaaatactaccaccacacaacacagcagcacgttatctacgcagcagaataccctttcatcatcaacatcttctgggcgcacttcgacatccactcttttgcacacaagtgtggagagtgaggcgaatctccattcttcctccagcactttttccaccacatccagcacagtctctgcacctcccccagtggtcagtgtctcctccagtctcaatagtggcagtagcctgggcctcagcctaggcagcaactccactgtcacagcctcgactcgaagctcagttgctacgacttcaggaaaagctcctcccaacctccctcctggggtcccgccgttgttgcctaatccgtatattatggctccagggctgttacatgcctacccgccacaagtatatggttatgatgacttgcagatgcttcagacaagatttccattggattactacagcatcccatttcccacacccactactccgctgactgggagggatggtagcctggccagcaacccttattctggtgacctcacaaagttcggccgtggggatgcctcctccccagccccggccacaaccttggcccaaccccaacagaaccagacgcagactcaccataccacgcagcagacattcctgaacccggcgctgcctcctggctacagttacaccagcctgccatactatacaggggtcccgggcctccccagcaccttccagtatgggcctgctgtgttccctgtggctcctacctcttccaagcagcatggtgtgaatgtcagtgtgaatgcatcggccacccctttccaacagccgagtggatatgggtctcatggatacaacactggaagaaaatatccacccccttacaagcatttctggacggctgagagctaatttggcccaaggctgggggctgtgttttgtgtgtgtgtataaatttgcactgaagtcttgtttcagaaaccagaccactgaggagagcctgctgagctgaggccatggcctgcgtggcttggggaaatgagttggtggataccttctgggcttttgaacttgcccctcccccatttccctctcccccatgtgtctgaccctgtcttacccatttcaagttcaagcggtgcagcaccttcgaagcatcaatgcacacacctgctgttgcttttgatttctggaaggcatgtagtttcaacttgtaacaaaaatatttgtagtcttcaataaactgtggtatttctttagctaac

SEQ ID NO: 196994 - DNA, 1225 bp, Homo sapiens
  Payload ID: 18855
  Gene Name: ubiquitin B
  Uniprot ID: P0CG47
  ENST ID: ENST00000302182
  CDS Start-End: 393-1082
gtttccagagctttcgaggaaggtttcttcaactcaaattcatccgcctgataattttcttatattttcctaaagaaggaagagaagcgcatagaggagaagggaaataattttttaggagcctttcttacggctatgaggaatttggggctcagttgaaaagcctaaactgcctctcgggaggttgggcgcggcgaactactttcagcggcgcacggagacggcgtctacgtgaggggtgataagtgacgcaacactcgttgcataaatttgcgctccgccagcccggagcatttaggggcggttggctttgttgggtgagcttgtttgtgtccctgtgggtggacgtggttggtgattggcaggatcctggtatccgctaacaggtcaaaatgcagatcttcgtgaaaacccttaccggcaagaccatcacccttgaggtggagcccagtgacaccatcgaaaatgtgaaggccaagatccaggataaggaaggcattccccccgaccagcagaggctcatctttgcaggcaagcagctggaagatggccgtactctttctgactacaacatccagaaggagtcgaccctgcacctggtcctgcgtctgagaggtggtatgcagatcttcgtgaagaccctgaccggcaagaccatcaccctggaagtggagcccagtgacaccatcgaaaatgtgaaggccaagatccaggataaagaaggcatccctcccgaccagcagaggctcatctttgcaggcaagcagctggaagatggccgcactctttctgactacaacatccagaaggagtcgaccctgcacctggtcctgcgtctgagaggtggtatgcagatcttcgtgaagaccctgaccggcaagaccatcactctggaggtggagcccagtgacaccatcgaaaatgtgaaggccaagatccaagataaagaaggcatcccccccgaccagcagaggctcatctttgcaggcaagcagctggaagatggccgcactctttctgactacaacatccagaaagagtcgaccctgcacctggtcctgcgcctgaggggtggctgttaattcttcagtcatggcattcgcagtgcccagtgatggcattactctgcactatagccatttgccccaacttaagtttagaaattacaagtttcagtaatagctgaacctgttcaaaatgttaataaaggtttcgttgcatggta

SEQ ID NO: 196995 - DNA, 1014 bp, Homo sapiens
  Payload ID: 18855
  Gene Name: ubiquitin B
  Uniprot ID: P0CG47
  ENST ID: ENST00000395837
  CDS Start-End: 182-871
gggccttgttgacctgaggggggcgagggcggttggcgcgcgcgcgcgttgacggaaactaacggacgcctaaccgatcggcgattctgtcgagtttacttcgcggggaaggcggaaaagaggtagtttgtgtggtttctggaagcctttactttggaatcccagtgtgagaaaggtcaaaatgcagatcttcgtgaaaacccttaccggcaagaccatcacccttgaggtggagcccagtgacaccatcgaaaatgtgaaggccaagatccaggataaggaaggcattccccccgaccagcagaggctcatctttgcaggcaagcagctggaagatggccgtactctttctgactacaacatccagaaggagtcgaccctgcacctggtcctgcgtctgagaggtggtatgcagatcttcgtgaagaccctgaccggcaagaccatcaccctggaagtggagcccagtgacaccatcgaaaatgtgaaggccaagatccaggataaagaaggcatccctcccgaccagcagaggctcatctttgcaggcaagcagctggaagatggccgcactctttctgactacaacatccagaaggagtcgaccctgcacctggtcctgcgtctgagaggtggtatgcagatcttcgtgaagaccctgaccggcaagaccatcactctggaggtggagcccagtgacaccatcgaaaatgtgaaggccaagatccaagataaagaaggcatcccccccgaccagcagaggctcatctttgcaggcaagcagctggaagatggccgcactctttctgactacaacatccagaaagagtcgaccctgcacctggtcctgcgcctgaggggtggctgttaattcttcagtcatggcattcgcagtgcccagtgatggcattactctgcactatagccatttgccccaacttaagtttagaaattacaagtttcagtaatagctgaacctgttcaaaatgttaataaaggtttcgttgcatggta

SEQ ID NO: 196996 - DNA, 1012 bp, Homo sapiens
  Payload ID: 18855
  Gene Name: ubiquitin B
  Uniprot ID: P0CG47
  ENST ID: ENST00000395839
  CDS Start-End: 180-869
gtgggggaggggagggcgaggtgacgcggcgctgggcctttccgggacagtgggccttgttgacctgaggggggcgagggcggttggcgcgcgcgcgcgttgacggaaactaacggacgcctaaccgatcggcgattctgtcgagtttacttcgcggggaaggcggaaaagaggtcaaaatgcagatcttcgtgaaaacccttaccggcaagaccatcacccttgaggtggagcccagtgacaccatcgaaaatgtgaaggccaagatccaggataaggaaggcattccccccgaccagcagaggctcatctttgcaggcaagcagctggaagatggccgtactctttctgactacaacatccagaaggagtcgaccctgcacctggtcctgcgtctgagaggtggtatgcagatcttcgtgaagaccctgaccggcaagaccatcaccctggaagtggagcccagtgacaccatcgaaaatgtgaaggccaagatccaggataaagaaggcatccctcccgaccagcagaggctcatctttgcaggcaagcagctggaagatggccgcactctttctgactacaacatccagaaggagtcgaccctgcacctggtcctgcgtctgagaggtggtatgcagatcttcgtgaagaccctgaccggcaagaccatcactctggaggtggagcccagtgacaccatcgaaaatgtgaaggccaagatccaagataaagaaggcatcccccccgaccagcagaggctcatctttgcaggcaagcagctggaagatggccgcactctttctgactacaacatccagaaagagtcgaccctgcacctggtcctgcgcctgaggggtggctgttaattcttcagtcatggcattcgcagtgcccagtgatggcattactctgcactatagccatttgccccaacttaagtttagaaattacaagtttcagtaatagctgaacctgttcaaaatgttaataaaggtttcgttgcatggta

SEQ ID NO: 196997 - DNA, 704 bp, Homo sapiens
  Payload ID: 18855
  Gene Name: ubiquitin B
  ENST ID: ENST00000535788
  CDS Start-End: 101-562
atttaggggcggttggctttgttgggtgagcttgtttgtgtccctgtgggtggacgtggttggtgattggcaggatcctggtatccgctaacaggtcaaaatgcagatcttcgtgaaaacccttaccggcaagaccatcacccttgaggtggagcccagtgacaccatcgaaaatgtgaaggccaagatccaggataaggaaggcattccccccgaccagcagaggctcatctttgcaggcaagcagctggaagatggccgtactctttctgactacaacatccagaaggagtcgaccctgcacctggtcctgcgtctgagaggtggtatgcagatcttcgtgaagaccctgaccggcaagaccatcactctggaggtggagcccagtgacaccatcgaaaatgtgaaggccaagatccaagataaagaaggcatcccccccgaccagcagaggctcatctttgcaggcaagcagctggaagatggccgcactctttctgactacaacatccagaaagagtcgaccctgcacctggtcctgcgcctgaggggtggctgttaattcttcagtcatggcattcgcagtgcccagtgatggcattactctgcactatagccatttgccccaacttaagtttagaaattacaagtttcagtaatagctgaacctgttcaaaatgttaataaaggtttcgttgcatggt

SEQ ID NO: 196998 - DNA, 724 bp, Homo sapiens
  Payload ID: 18855
  Gene Name: ubiquitin B
  ENST ID: ENST00000577640
  CDS Start-End: 106-724
gctatgaggaatttggggctcagttgaaaagcctaaactgcctctcgggaggttgggcgcggcgaactactttcagcggcgcacggagacggcgtctacgtcaaaatgcagatcttcgtgaaaacccttaccggcaagaccatcacccttgaggtggagcccagtgacaccatcgaaaatgtgaaggccaagatccaggataaggaaggcattccccccgaccagcagaggctcatctttgcaggcaagcagctggaagatggccgtactctttctgactacaacatccagaaggagtcgaccctgcacctggtcctgcgtctgagaggtggtatgcagatcttcgtgaagaccctgaccggcaagaccatcaccctggaagtggagcccagtgacaccatcgaaaatgtgaaggccaagatccaggataaagaaggcatccctcccgaccagcagaggctcatctttgcaggcaagcagctggaagatggccgcactctttctgactacaacatccagaaggagtcgaccctgcacctggtcctgcgtctgagaggtggtatgcagatcttcgtgaagaccctgaccggcaagaccatcactctggaggtggagcccagtgacaccatcgaaaatgtgaaggccaagatccaagataaagaaggcatcccccccgaccagcagaggctcatctttgcaggcaagcagctggaagatggccgca

SEQ ID NO: 196999 - DNA, 500 bp, Homo sapiens
  Payload ID: 18855
  Gene Name: ubiquitin B
  ENST ID: ENST00000578706
  CDS Start-End: 222-500
agtttgtgtggtttctggaagcctttactttggaatcccagtgtgagaaaggtgccccttcttgtgtttcaatgggatttttatttcgcgagtcttgtgggtttggttttgttttcagtttgcctaacaccgtgcttaggtttgaggcagattggagttcggtcgggggagtttgaatatccggaacagttagtggggaaagctgtggacgcttggtcaaaatgcagatcttcgtgaaaacccttaccggcaagaccatcacccttgaggtggagcccagtgacaccatcgaaaatgtgaaggccaagatccaggataaggaaggcattccccccgaccagcagaggctcatctttgcaggcaagcagctggaagatggccgtactctttctgactacaacatccagaaggagtcgaccctgcacctggtcctgcgtctgagaggtggtatgcagatcttcgtgaagaccctgaccggcaagaccatcaccctggaagtg

SEQ ID NO: 197000 - DNA, 376 bp, Homo sapiens
  Payload ID: 18855
  Gene Name: ubiquitin B
  ENST ID: ENST00000577958
  CDS Start-End: 246-376
agtttccagagctttcgaggaaggtttcttcaactcaaattcatccgcctgataattttcttatattttcctaaagaaggaagagaagcgcatagaggagaagggaaataattttttaggagcctttcttacggctatgaggaatttggggctcagttgaaaagcctaaactgcctctcgggaggttgggcgcggcgaactactttcagcggcgcacggagacggcgtctacgtgaggggtcaaaatgcagatcttcgtgaaaacccttaccggcaagaccatcacccttgaggtggagcccagtgacaccatcgaaaatgtgaaggccaagatccaggataaggaaggcattccccccgaccagcagaggctcat

SEQ ID NO: 197001 - DNA, 1056 bp, Homo sapiens
  Payload ID: 18855
  Gene Name: ubiquitin B
  Uniprot ID: P0CG47
  ENST ID: ENST00000614404
  CDS Start-End: 222-911
agtttgtgtggtttctggaagcctttactttggaatcccagtgtgagaaaggtgccccttcttgtgtttcaatgggatttttatttcgcgagtcttgtgggtttggttttgttttcagtttgcctaacaccgtgcttaggtttgaggcagattggagttcggtcgggggagtttgaatatccggaacagttagtggggaaagctgtggacgcttggtcaaaatgcagatcttcgtgaaaacccttaccggcaagaccatcacccttgaggtggagcccagtgacaccatcgaaaatgtgaaggccaagatccaggataaggaaggcattccccccgaccagcagaggctcatctttgcaggcaagcagctggaagatggccgtactctttctgactacaacatccagaaggagtcgaccctgcacctggtcctgcgtctgagaggtggtatgcagatcttcgtgaagaccctgaccggcaagaccatcaccctggaagtggagcccagtgacaccatcgaaaatgtgaaggccaagatccaggataaagaaggcatccctcccgaccagcagaggctcatctttgcaggcaagcagctggaagatggccgcactctttctgactacaacatccagaaggagtcgaccctgcacctggtcctgcgtctgagaggtggtatgcagatcttcgtgaagaccctgaccggcaagaccatcactctggaggtggagcccagtgacaccatcgaaaatgtgaaggccaagatccaagataaagaaggcatcccccccgaccagcagaggctcatctttgcaggcaagcagctggaagatggccgcactctttctgactacaacatccagaaagagtcgaccctgcacctggtcctgcgcctgaggggtggctgttaattcttcagtcatggcattcgcagtgcccagtgatggcattactctgcactatagccatttgccccaacttaagtttagaaattacaagtttcagtaatagctgaacctgttcaaaatgttaataaaggtttcgttgcatggtagc

SEQ ID NO: 197002 - DNA, 2688 bp, Homo sapiens
  Payload ID: 18856
  Gene Name: ubiquitin C
  Uniprot ID: P0CG48
  ENST ID: ENST00000339647
  CDS Start-End: 565-2622
ggagggaggggagggagaccccgactctgcagaaggcgctcgctgcgtgccccacgtccgccgaacgcggggttcgcgacccgaggggaccgcgggggctgaggggaggggccgcggagccgcggctaaggaacgcgggccgcccacccgctcccggtgcagcggcctccgcgccgggttttggcgcctcccgcgggcgcccccctcctcacggcgagcgctgccacgtcagacgaagggcgcagcgagcgtcctgatccttccgcccggacgctcaggacagcggcccgctgctcataagactcggccttagaaccccagtatcagcagaaggacattttaggacgggacttgggtgactctagggcactggttttctttccagagagcggaacaggcgaggaaaagtagtcccttctcggcgattctgcggagggatctccgtggggcggtgaacgccgatgattatataaggacgcgccgggtgtggcacagctagttccgtcgcagccgggatttgggtcgcagttcttgtttgtggatcgctgtgatcgtcacttgacaatgcagatcttcgtgaagactctgactggtaagaccatcaccctcgaggttgagcccagtgacaccatcgagaatgtcaaggcaaagatccaagataaggaaggcatccctcctgaccagcagaggctgatctttgctggaaaacagctggaagatgggcgcaccctgtctgactacaacatccagaaagagtccaccctgcacctggtgctccgtctcagaggtgggatgcaaatcttcgtgaagacactcactggcaagaccatcacccttgaggtcgagcccagtgacaccatcgagaacgtcaaagcaaagatccaggacaaggaaggcattcctcctgaccagcagaggttgatctttgccggaaagcagctggaagatgggcgcaccctgtctgactacaacatccagaaagagtctaccctgcacctggtgctccgtctcagaggtgggatgcagatcttcgtgaagaccctgactggtaagaccatcaccctcgaggtggagcccagtgacaccatcgagaatgtcaaggcaaagatccaagataaggaaggcattcctcctgatcagcagaggttgatctttgccggaaaacagctggaagatggtcgtaccctgtctgactacaacatccagaaagagtccaccttgcacctggtactccgtctcagaggtgggatgcaaatcttcgtgaagacactcactggcaagaccatcacccttgaggtcgagcccagtgacactatcgagaacgtcaaagcaaagatccaagacaaggaaggcattcctcctgaccagcagaggttgatctttgccggaaagcagctggaagatgggcgcaccctgtctgactacaacatccagaaagagtctaccctgcacctggtgctccgtctcagaggtgggatgcagatcttcgtgaagaccctgactggtaagaccatcactctcgaagtggagccgagtgacaccattgagaatgtcaaggcaaagatccaagacaaggaaggcatccctcctgaccagcagaggttgatctttgccggaaaacagctggaagatggtcgtaccctgtctgactacaacatccagaaagagtccaccttgcacctggtgctccgtctcagaggtgggatgcagatcttcgtgaagaccctgactggtaagaccatcactctcgaggtggagccgagtgacaccattgagaatgtcaaggcaaagatccaagacaaggaaggcatccctcctgaccagcagaggttgatctttgctgggaaacagctggaagatggacgcaccctgtctgactacaacatccagaaagagtccaccctgcacctggtgctccgtcttagaggtgggatgcagatcttcgtgaagaccctgactggtaagaccatcactctcgaagtggagccgagtgacaccattgagaatgtcaaggcaaagatccaagacaaggaaggcatccctcctgaccagcagaggttgatctttgctgggaaacagctggaagatggacgcaccctgtctgactacaacatccagaaagagtccaccctgcacctggtgctccgtcttagaggtgggatgcagatcttcgtgaagaccctgactggtaagaccatcactctcgaagtggagccgagtgacaccattgagaatgtcaaggcaaagatccaagacaaggaaggcatccctcctgaccagcagaggttgatctttgctgggaaacagctggaagatggacgcaccctgtctgactacaacatccagaaagagtccaccctgcacctggtgctccgtctcagaggtgggatgcaaatcttcgtgaagaccctgactggtaagaccatcaccctcgaggtggagcccagtgacaccatcgagaatgtcaaggcaaagatccaagataaggaaggcatccctcctgatcagcagaggttgatctttgctgggaaacagctggaagatggacgcaccctgtctgactacaacatccagaaagagtccactctgcacttggtcctgcgcttgagggggggtgtctaagtttccccttttaaggtttcaacaaatttcattgcactttcctttcaataaagttgttgcattccc

SEQ ID NO: 197003 - DNA, 582 bp, Homo sapiens
  Payload ID: 18856
  Gene Name: ubiquitin C
  ENST ID: ENST00000535859
  CDS Start-End: 215-582
tattcgggtgagatgggctggggcaccatctggggaccctgacgtgaagtttgtcactgactggagaactcggtttgtcgtctgttgcgggggcggcagttatggcggtgccgttgggcagtgcacccgtacctttgggagcgcgcgccctcgtcgtgtcgtgacgtcacccgttctgttggcttataatgcagggtggggccacctgccgacaatgcagatcttcgtgaagactctgactggtaagaccatcaccctcgaggttgagcccagtgacaccatcgagaatgtcaaggcaaagatccaagataaggaaggcatccctcctgaccagcagaggctgatctttgctggaaaacagctggaagatgggcgcaccctgtctgactacaacatccagaaagagtccaccctgcacctggtgctccgtctcagaggtgggatgcaaatcttcgtgaagacactcactggcaagaccatcacccttgaggtcgagcccagtgacaccatcgagaacgtcaaagcaaagatccaggacaaggaaggcattcctcctgaccagcagaggttgatctttgccgg

SEQ ID NO: 197004 - DNA, 559 bp, Homo sapiens
  Payload ID: 18856
  Gene Name: ubiquitin C
  ENST ID: ENST00000546271
  CDS Start-End: 150-559
agcaaaatggcggctgttcccgagtcttgaatggaagacgcttgtgaggcgggctgtgaggtcgttgaaacaaggtggggggcatggtgggcggcaagaacccaaggtcttgaggccttcgctaatgcgggaaagctcttattcggacaatgcagatcttcgtgaagactctgactggtaagaccatcaccctcgaggttgagcccagtgacaccatcgagaatgtcaaggcaaagatccaagataaggaaggcatccctcctgaccagcagaggctgatctttgctggaaaacagctggaagatgggcgcaccctgtctgactacaacatccagaaagagtccaccctgcacctggtgctccgtctcagaggtgggatgcaaatcttcgtgaagacactcactggcaagaccatcacccttgaggtcgagcccagtgacaccatcgagaacgtcaaagcaaagatccaggacaaggaaggcattcctcctgaccagcagaggttgatctttgccggaaagcagctggaagatgggcgcaccctgtctgactacaacat

SEQ ID NO: 197005 - DNA, 718 bp, Homo sapiens
  Payload ID: 18856
  Gene Name: ubiquitin C
  ENST ID: ENST00000546120
  CDS Start-End: 19-708
tgtgatcgtcacttgacaatgcagatcttcgtgaagactctgactggtaagaccatcaccctcgaggttgagcccagtgacaccatcgagaatgtcaaggcaaagatccaagataaggaaggcatccctcctgaccagcagaggctgatctttgctggaaaacagctggaagatgggcgcaccctgtctgactacaacatccagaaagagtccaccctgcacctggtgctccgtctcagaggtgggatgcaaatcttcgtgaagacactcactggcaagaccatcacccttgaggtcgagcccagtgacaccatcgagaacgtcaaagcaaagatccaggacaaggaaggcattcctcctgaccagcagaggttgatctttgctgggaaacagctggaagatggacgcaccctgtctgactacaacatccagaaagagtccaccctgcacctggtgctccgtctcagaggtgggatgcaaatcttcgtgaagaccctgactggtaagaccatcaccctcgaggtggagcccagtgacaccatcgagaatgtcaaggcaaagatccaagataaggaaggcatccctcctgatcagcagaggttgatctttgctgggaaacagctggaagatggacgcaccctgtctgactacaacatccagaaagagtccactctgcacttggtcctgcgcttgagggggggtgtctaagtttcccctt

SEQ ID NO: 197006 - DNA, 563 bp, Homo sapiens
  Payload ID: 18856
  Gene Name: ubiquitin C
  ENST ID: ENST00000535131
  CDS Start-End: 115-563
ggcttttctccgtcgcaggacgcagggttcgggcctagggtaggctctcctgaatcgacaggcgccggacctctggtgaggggagggataagtgaggcgtcagtttctctgacaatgcagatcttcgtgaagactctgactggtaagaccatcaccctcgaggttgagcccagtgacaccatcgagaatgtcaaggcaaagatccaagataaggaaggcatccctcctgaccagcagaggctgatctttgctggaaaacagctggaagatgggcgcaccctgtctgactacaacatccagaaagagtccaccctgcacctggtgctccgtctcagaggtgggatgcaaatcttcgtgaagacactcactggcaagaccatcacccttgaggtcgagcccagtgacaccatcgagaacgtcaaagcaaagatccaggacaaggaaggcattcctcctgaccagcagaggttgatctttgccggaaagcagctggaagatgggcgcaccctgtctgactacaacatccagaaagagtctaccctgcacctggtgctccgtctcag

SEQ ID NO: 197007 - DNA, 582 bp, Homo sapiens
  Payload ID: 18856
  Gene Name: ubiquitin C
  ENST ID: ENST00000541272
  CDS Start-End: 74-582
ttctccgtcgcaggacgcagggttcgggcctagggtaggctctcctgaatcgacaggcgccggacctctgacaatgcagatcttcgtgaagactctgactggtaagaccatcaccctcgaggttgagcccagtgacaccatcgagaatgtcaaggcaaagatccaagataaggaaggcatccctcctgaccagcagaggctgatctttgctggaaaacagctggaagatgggcgcaccctgtctgactacaacatccagaaagagtccaccctgcacctggtgctccgtctcagaggtgggatgcaaatcttcgtgaagacactcactggcaagaccatcacccttgaggtggagcccagtgacaccatcgagaatgtcaaggcaaagatccaagataaggaaggcattcctcctgatcagcagaggttgatctttgccggaaaacagctggaagatggtcgtaccctgtctgactacaacatccagaaagagtccaccttgcacctggtactccgtctcagaggtgggatgcaaatcttcgtgaagacactcactggcaagaccatcacccttgaggtcga

SEQ ID NO: 197008 - DNA, 627 bp, Homo sapiens
  Payload ID: 18856
  Gene Name: ubiquitin C
  ENST ID: ENST00000540700
  CDS Start-End: 226-627
acttggtgagtagcgggctgctgggctggccggggctttcgtggccgccgggccgctcggtgggacggaggcgtgtggagagaccgccaagggctgtagtctgggtccgcgagcaaggttgccctgaactgggggttggggggagcgcagcaaaatggcggctgttcccgagtcttgaatggaagacgcttgtgaggcgggctgtgaggtcgttgaaacaagacaatgcagatcttcgtgaagactctgactggtaagaccatcaccctcgaggttgagcccagtgacaccatcgagaatgtcaaggcaaagatccaagataaggaaggcatccctcctgaccagcagaggctgatctttgctggaaaacagctggaagatgggcgcaccctgtctgactacaacatccagaaagagtccaccctgcacctggtgctccgtctcagaggtgggatgcaaatcttcgtgaagacactcactggcaagaccatcacccttgaggtcgagcccagtgacaccatcgagaacgtcaaagcaaagatccaggacaaggaaggcattcctcctgaccagcagaggttgatctttgccggaaagcagctggaagatgggcgcaccctgtctgac

SEQ ID NO: 197009 - DNA, 3745 bp, Homo sapiens
  Payload ID: 18856
  Gene Name: ubiquitin C
  Uniprot ID: P0CG48
  ENST ID: ENST00000536769
  CDS Start-End: 1578-3635
gttccccagctttagggccacgcccgccctgagatctgccgagtcattgtccttgtcccgcggccccgggagccccccgcgaccggcctgggaggctcagggaggttgaagggggctgagcaaaggaagccccgtcattacctcaaatgtgacccaaaaataaagacccgtccatctcgcagggtgggccagggcgggtcaggagggaggggagggagaccccgactctgcagaaggcgctcgctgcgtgccccacgtccgccgaacgcggggttcgcgacccgaggggaccgcgggggctgaggggaggggccgcggagccgcggctaaggaacgcgggccgcccacccgctcccggtgcagcggcctccgcgccgggttttggcgcctcccgcgggcgcccccctcctcacggcgagcgctgccacgtcagacgaagggcgcagcgagcgtcctgatccttccgcccggacgctcaggacagcggcccgctgctcataagactcggccttagaaccccagtatcagcagaaggacattttaggacgggacttgggtgactctagggcactggttttctttccagagagcggaacaggcgaggaaaagtagtcccttctcggcgattctgcggagggatctccgtggggcggtgaacgccgatgattatataaggacgcgccgggtgtggcacagctagttccgtcgcagccgggatttgggtcgcagttcttgtttgtggatcgctgtgatcgtcacttggtgagtagcgggctgctgggctggccggggctttcgtggccgccgggccgctcggtgggacggaggcgtgtggagagaccgccaagggctgtagtctgggtccgcgagcaaggttgccctgaactgggggttggggggagcgcagcaaaatggcggctgttcccgagtcttgaatggaagacgcttgtgaggcgggctgtgaggtcgttgaaacaaggtggggggcatggtgggcggcaagaacccaaggtcttgaggccttcgctaatgcgggaaagctcttattcgggtgagatgggctggggcaccatctggggaccctgacgtgaagtttgtcactgactggagaactcggtttgtcgtctgttgcgggggcggcagttatggcggtgccgttgggcagtgcacccgtacctttgggagcgcgcgccctcgtcgtgtcgtgacgtcacccgttctgttggcttataatgcagggtggggccacctgccggtaggtgtgcggtaggcttttctccgtcgcaggacgcagggttcgggcctagggtaggctctcctgaatcgacaggcgccggacctctggtgaggggagggataagtgaggcgtcagtttctctggtcggttttatgtacctatcttcttaagtagctgaagctccggttttgaactatgcgctcggggttggcgagtgtgttttgtgaagttttttaggcaccttttgaaatgtaatcatttgggtcaatatgtaattttcagtgttagactagtaaattgtccgctaaattctggccgtttttggcttttttgttagacaatgcagatcttcgtgaagactctgactggtaagaccatcaccctcgaggttgagcccagtgacaccatcgagaatgtcaaggcaaagatccaagataaggaaggcatccctcctgaccagcagaggctgatctttgctggaaaacagctggaagatgggcgcaccctgtctgactacaacatccagaaagagtccaccctgcacctggtgctccgtctcagaggtgggatgcaaatcttcgtgaagacactcactggcaagaccatcacccttgaggtcgagcccagtgacaccatcgagaacgtcaaagcaaagatccaggacaaggaaggcattcctcctgaccagcagaggttgatctttgccggaaagcagctggaagatgggcgcaccctgtctgactacaacatccagaaagagtctaccctgcacctggtgctccgtctcagaggtgggatgcagatcttcgtgaagaccctgactggtaagaccatcaccctcgaggtggagcccagtgacaccatcgagaatgtcaaggcaaagatccaagataaggaaggcattcctcctgatcagcagaggttgatctttgccggaaaacagctggaagatggtcgtaccctgtctgactacaacatccagaaagagtccaccttgcacctggtactccgtctcagaggtgggatgcaaatcttcgtgaagacactcactggcaagaccatcacccttgaggtcgagcccagtgacactatcgagaacgtcaaagcaaagatccaagacaaggaaggcattcctcctgaccagcagaggttgatctttgccggaaagcagctggaagatgggcgcaccctgtctgactacaacatccagaaagagtctaccctgcacctggtgctccgtctcagaggtgggatgcagatcttcgtgaagaccctgactggtaagaccatcactctcgaagtggagccgagtgacaccattgagaatgtcaaggcaaagatccaagacaaggaaggcatccctcctgaccagcagaggttgatctttgccggaaaacagctggaagatggtcgtaccctgtctgactacaacatccagaaagagtccaccttgcacctggtgctccgtctcagaggtgggatgcagatcttcgtgaagaccctgactggtaagaccatcactctcgaggtggagccgagtgacaccattgagaatgtcaaggcaaagatccaagacaaggaaggcatccctcctgaccagcagaggttgatctttgctgggaaacagctggaagatggacgcaccctgtctgactacaacatccagaaagagtccaccctgcacctggtgctccgtcttagaggtgggatgcagatcttcgtgaagaccctgactggtaagaccatcactctcgaagtggagccgagtgacaccattgagaatgtcaaggcaaagatccaagacaaggaaggcatccctcctgaccagcagaggttgatctttgctgggaaacagctggaagatggacgcaccctgtctgactacaacatccagaaagagtccaccctgcacctggtgctccgtcttagaggtgggatgcagatcttcgtgaagaccctgactggtaagaccatcactctcgaagtggagccgagtgacaccattgagaatgtcaaggcaaagatccaagacaaggaaggcatccctcctgaccagcagaggttgatctttgctgggaaacagctggaagatggacgcaccctgtctgactacaacatccagaaagagtccaccctgcacctggtgctccgtctcagaggtgggatgcaaatcttcgtgaagaccctgactggtaagaccatcaccctcgaggtggagcccagtgacaccatcgagaatgtcaaggcaaagatccaagataaggaaggcatccctcctgatcagcagaggttgatctttgctgggaaacagctggaagatggacgcaccctgtctgactacaacatccagaaagagtccactctgcacttggtcctgcgcttgagggggggtgtctaagtttccccttttaaggtttcaacaaatttcattgcactttcctttcaataaagttgttgcattcccaattggtgttttttttttttttttttttaagtttattttgcatt

SEQ ID NO: 197010 - DNA, 517 bp, Homo sapiens
  Payload ID: 18856
  Gene Name: ubiquitin C
  ENST ID: ENST00000542416
  CDS Start-End: 333-517
gttgctgggcctctgtcccttctccattggtgccagctctgaagcaatcttttctggggcgcctgcaaaggacggatctgtgggtggaacgaactgaaaacggatccagtgactcatcccgattcttgcacattctagcacatcgcattctagagagcggaacaggcgaggaaaagtagtcccttctcggcgattctgcggagggatctccgtggggcggtgaacgccgatgattatataaggacgcgccgggtgtggcacagctagttccgtcgcagccgggatttgggtcgcagttcttgtttgtggatcgctgtgatcgtcacttgacaatgcagatcttcgtgaagactctgactggtaagaccatcaccctcgaggttgagcccagtgacaccatcgagaatgtcaaggcaaagatccaagataaggaaggcatccctcctgaccagcagaggctgatctttgctggaaaacagctggaagatgggcgcaccctgtctgactacaacatcca

SEQ ID NO: 197011 - DNA, 622 bp, Homo sapiens
  Payload ID: 18856
  Gene Name: ubiquitin C
  ENST ID: ENST00000540351
  CDS Start-End: 141-622
acgtcacccgttctgttggcttataatgcagggtggggccacctgccggtaggtgtgcggtaggcttttctccgtcgcaggacgcagggttcgggcctagggtaggctctcctgaatcgacaggcgccggacctctgacaatgcagatcttcgtgaagactctgactggtaagaccatcaccctcgaggttgagcccagtgacaccatcgagaatgtcaaggcaaagatccaagataaggaaggcatccctcctgaccagcagaggctgatctttgctggaaaacagctggaagatgggcgcaccctgtctgactacaacatccagaaagagtccaccctgcacctggtgctccgtctcagaggtgggatgcaaatcttcgtgaagacactcactggcaagaccatcacccttgaggtcgagcccagtgacaccatcgagaacgtcaaagcaaagatccaggacaaggaaggcattcctcctgaccagcagaggttgatctttgccggaaagcagctggaagatgggcgcaccctgtctgactacaacatccagaaagagtctaccctgcacctggtgctccgtctcagaggtgggatgcagatcttcgtgaagaccctgac

SEQ ID NO: 197012 - DNA, 1303 bp, Homo sapiens
  Payload ID: 18856
  Gene Name: ubiquitin C
  ENST ID: ENST00000538617
  CDS Start-End: 318-1235
attgtccttgtcccgcggccccgggagccccccgcgaccggcctgggaggctcagggaggttgaagggggctgagcaaaggaagccccgtcattacctcaaatgtgacccaaaaataaagacccgtccatctcgcaggagagcggaacaggcgaggaaaagtagtcccttctcggcgattctgcggagggatctccgtggggcggtgaacgccgatgattatataaggacgcgccgggtgtggcacagctagttccgtcgcagccgggatttgggtcgcagttcttgtttgtggatcgctgtgatcgtcacttgacaatgcagatcttcgtgaagactctgactggtaagaccatcaccctcgaggttgagcccagtgacaccatcgagaatgtcaaggcaaagatccaagataaggaaggcatccctcctgaccagcagaggctgatctttgctggaaaacagctggaagatgggcgcaccctgtctgactacaacatccagaaagagtccaccctgcacctggtgctccgtctcagaggtgggatgcaaatcttcgtgaagacactcactggcaagaccatcacccttgaggtcgagcccagtgacaccatcgagaacgtcaaagcaaagatccaggacaaggaaggcattcctcctgaccagcagaggttgatctttgccggaaagcagctggaagatgggcgcaccctgtctgactacaacatccagaaagagtctaccctgcacctggtgctccgtctcagaggtgggatgcagatcttcgtgaagaccctgactggtaagaccatcactctcgaagtggagccgagtgacaccattgagaatgtcaaggcaaagatccaagacaaggaaggcatccctcctgaccagcagaggttgatctttgctgggaaacagctggaagatggacgcaccctgtctgactacaacatccagaaagagtccaccctgcacctggtgctccgtctcagaggtgggatgcaaatcttcgtgaagaccctgactggtaagaccatcaccctcgaggtggagcccagtgacaccatcgagaatgtcaaggcaaagatccaagataaggaaggcatccctcctgatcagcagaggttgatctttgctgggaaacagctggaagatggacgcaccctgtctgactacaacatccagaaagagtccactctgcacttggtcctgcgcttgagggggggtgtctaagtttccccttttaaggtttcaacaaatttcattgcactttcctttcaataaagttgttgcattcccaa

SEQ ID NO: 197013 - DNA, 548 bp, Homo sapiens
  Payload ID: 18856
  Gene Name: ubiquitin C
  ENST ID: ENST00000541645
  CDS Start-End: 83-548
ataatgcagggtggggccacctgccggtaggtgtgcggtaggcttttctccgtcgcaggacgcagggttcgggcctaggacaatgcagatcttcgtgaagactctgactggtaagaccatcaccctcgaggttgagcccagtgacaccatcgagaatgtcaaggcaaagatccaagataaggaaggcatccctcctgaccagcagaggctgatctttgctggaaaacagctggaagatgggcgcaccctgtctgactacaacatccagaaagagtccaccctgcacctggtgctccgtctcagaggtgggatgcaaatcttcgtgaagacactcactggcaagaccatcacccttgaggtcgagcccagtgacaccatcgagaacgtcaaagcaaagatccaggacaaggaaggcattcctcctgaccagcagaggttgatctttgccggaaagcagctggaagatgggcgcaccctgtctgactacaacatccagaaagagtctaccctgcacctggtgctccgtctcagaggtgggatgcagatct

SEQ ID NO: 197014 - DNA, 1172 bp, Homo sapiens
  Payload ID: 18857
  Gene Name: ubiquitin carboxyl-terminal esterase L1 (ubiquitin thiolesterase)
  Uniprot ID: P09936
  ENST ID: ENST00000284440
  CDS Start-End: 145-816
tttccccctcgcttggttctgcccctgctccccctgcacaggcctcacagtgcgtctggccggcgctttatagctgcagcctgggcggctccgctagctgtttttcgtcttccctaggctatttctgccgggcgctccgcgaagatgcagctcaagccgatggagatcaaccccgagatgctgaacaaagtgctgtcccggctgggggtcgccggccagtggcgcttcgtggacgtgctggggctggaagaggagtctctgggctcggtgccagcgcctgcctgcgcgctgctgctgctgtttcccctcacggcccagcatgagaacttcaggaaaaagcagattgaagagctgaagggacaagaagttagtcctaaagtgtacttcatgaagcagaccattgggaattcctgtggcacaatcggacttattcacgcagtggccaataatcaagacaaactgggatttgaggatggatcagttctgaaacagtttctttctgaaacagagaaaatgtcccctgaagacagagcaaaatgctttgaaaagaatgaggccatacaggcagcccatgatgccgtggcacaggaaggccaatgtcgggtagatgacaaggtgaatttccattttattctgtttaacaacgtggatggccacctctatgaacttgatggacgaatgccttttccggtgaaccatggcgccagttcagaggacaccctgctgaaggacgctgccaaggtctgcagagaattcaccgagcgtgagcaaggagaagtccgcttctctgccgtggctctctgcaaggcagcctaatgctctgtgggagggactttgctgatttcccctcttcccttcaacatgaaaatatatacccccccatgcagtctaaaatgcttcagtacttgtgaaacacagctgttcttctgttctgcagacacgccttcccctcagccacacccaggcacttaagcacaagcagagtgcacagctgtccactgggccattgtggtgtgagcttcagatggtgaagcattctccccagtgtatgtcttgtatccgatatctaacgctttaaatggctactttggtttctgtctgtaagttaagaccttggatgtggtttaattgtttgtcctcaaaaggaataaaacttttctgctgataagata

SEQ ID NO: 197015 - DNA, 917 bp, Homo sapiens
  Payload ID: 18857
  Gene Name: ubiquitin carboxyl-terminal esterase L1 (ubiquitin thiolesterase)
  Uniprot ID: P09936
  ENST ID: ENST00000503431
  CDS Start-End: 63-734
ggcccggccgtaccactccgcgctgcgcacggggggctatttctgccgggcgctccgcgaagatgcagctcaagccgatggagatcaaccccgagatgctgaacaaagtgctgtcccggctgggggtcgccggccagtggcgcttcgtggacgtgctggggctggaagaggagtctctgggctcggtgccagcgcctgcctgcgcgctgctgctgctgtttcccctcacggcccagcatgagaacttcaggaaaaagcagattgaagagctgaagggacaagaagttagtcctaaagtgtacttcatgaagcagaccattgggaattcctgtggcacaatcggacttattcacgcagtggccaataatcaagacaaactgggatttgaggatggatcagttctgaaacagtttctttctgaaacagagaaaatgtcccctgaagacagagcaaaatgctttgaaaagaatgaggccatacaggcagcccatgatgccgtggcacaggaaggccaatgtcgggtagatgacaaggtgaatttccattttattctgtttaacaacgtggatggccacctctatgaacttgatggacgaatgccttttccggtgaaccatggcgccagttcagaggacaccctgctgaaggacgctgccaaggtctgcagagaattcaccgagcgtgagcaaggagaagtccgcttctctgccgtggctctctgcaaggcagcctaatgctctgtgggagggactttgctgatttcccctcttcccttcaacatgaaaatatatacccccccatgcagtctaaaatgcttcagtacttgtgaaacacagctgttcttctgttctgcagacacgccttcccctcagccacacccaggcacttaagcacaagcagagtgcacagctgtccac

SEQ ID NO: 197016 - DNA, 748 bp, Homo sapiens
  Payload ID: 18857
  Gene Name: ubiquitin carboxyl-terminal esterase L1 (ubiquitin thiolesterase)
  ENST ID: ENST00000505232
  CDS Start-End: 46-516
gtttttcgtcttccctaggctatttctgccgggcgctccgcgaagatgcagctcaagccgatggagatcaaccccgagatgctgaacaaagtgctgtcccggctgggggtcgccggccagtggcgcttcgtggacgtgctggggctggaagaggagtctctgggctcggtgccagcgcctgcctgcgcgctgctgctgctgtttcccctcacggcccagcatgagaacttcaggaaaaagcagattgaagagctgaagggacaagaagttagtcctaaagtgtacttcatgaagcagaccattgggaattcctgtggcacaatcggacttattcacgcagtggccaataatcaagacaaactgggatttgaggatggatcagttctgaaacagtttctttctgaaacagagaaaatgtcccctgaagacagagcaaaatgctttgaaaagaatgaggccatacaggcagcccatgatgccgtggcacaggaaggccaatgtcggatgacaaggtgaatttccattttattctgtttaacaacgtggatggccacctctatgaacttgatggacgaatgccttttccggtgaaccatggcgccagttcagaggacaccctgctgaaggacgctgccaaggtctgcagagaattcaccgagcgtgagcaaggagaagtccgcttctctgccgtggctctctgcaaggcagcctaatgctctgtgggagggactttgctgatttcccctct

SEQ ID NO: 197017 - DNA, 785 bp, Homo sapiens
  Payload ID: 18857
  Gene Name: ubiquitin carboxyl-terminal esterase L1 (ubiquitin thiolesterase)
  ENST ID: ENST00000512788
  CDS Start-End: 33-758
cctaggctatttctgccgggcgctccgcgaagatgcagctcaagccgatggagatcaaccccgagatgctgaacaaagtgctgtcccggctgggggtcgccggccagtggcgcttcgtggacgtgctggggctggaagaggagtctctgggctcggtgccagcgcctgcctgcgcgctgctgctgctgtttcccctcacggcccagcatgagaacttcaggaaaaagcagattgaagagctgaagggacaagaagttagtcctaaagtgtacttcatgaagcagaccattgggaattcctgtggcacaatcggacttattcacgcagtggccaataatcaagacaaactgggatttgaggatggatcagttctgaaacagtttctttctgaaacagagaaaatgtcccctgaagacagagcaaaatgctttgaaaagaatgaggccatacaggcagcccatgatgccgtggcacaggaaggccaatgtcgggtagatgacaaggtgaatttccattttattctgtttaacaacgtggatggccacctctatgaacttgatggacgaatgccttttccggtgaaccatggcgccagttcagaggacaccctgctgaaggtcatctttggaatgcatctcttcttaatgacgctgccaaggtctgcagagaattcaccgagcgtgagcaaggagaagtccgcttctctgccgtggctctctgcaaggcagcctaatgctctgtgggagggactttgctgatttcccctcttcccttcaacatgaaaa

SEQ ID NO: 197018 - DNA, 1119 bp, Homo sapiens
  Payload ID: 18857
  Gene Name: ubiquitin carboxyl-terminal esterase L1 (ubiquitin thiolesterase)
  ENST ID: ENST00000512419
  CDS Start-End: 67-276
gcctgggcggctccgctagctgtttttcgtcttccctaggctatttctgccgggcgctccgcgaagatgcagctcaagccgatggagatcaaccccgaggtgagcgccaggtgctgtcccggctgggggtcgccggccagtggcgcttcgtggacgtgctggggctggaagaggagtctctgggctcggtgccagcgcctgcctgcgcgctgctgctgctgtttcccctcacggcccagcatgagaacttcaggaaaaagcagattgaagagctgaagggacaagaagttagtcctaaagtgtacttcatgaagcagaccattgggaattcctgtggcacaatcggacttattcacgcagtggccaataatcaagacaaactgggatttgaggatggatcagttctgaaacagtttctttctgaaacagagaaaatgtcccctgaagacagagcaaaatgctttgaaaagaatgaggccatacaggcagcccatgatgccgtggcacaggaaggccaatgtcgggtagatgacaaggtgaatttccattttattctgtttaacaacgtggatggccacctctatgaacttgatggacgaatgccttttccggtgaaccatggcgccagttcagaggacaccctgctgaaggacgctgccaaggtctgcagagaattcaccgagcgtgagcaaggagaagtccgcttctctgccgtggctctctgcaaggcagcctaatgctctgtgggagggactttgctgatttcccctcttcccttcaacatgaaaatatatacccccccatgcagtctaaaatgcttcagtacttgtgaaacacagctgttcttctgttctgcagacacgccttcccctcagccacacccaggcacttaagcacaagcagagtgcacagctgtccactgggccattgtggtgtgagcttcagatggtgaagcattctccccagtgtatgtcttgtatccgatatctaacgctttaaatggctactttggtttctgtctgtaagttaagaccttggatgtggtttaattgtttgtcctcaaaaggaataaaacttttctgctgataagatagccacagctgattctcattttctttt

SEQ ID NO: 197019 - DNA, 445 bp, Homo sapiens
  Payload ID: 18857
  Gene Name: ubiquitin carboxyl-terminal esterase L1 (ubiquitin thiolesterase)
  ENST ID: ENST00000514924
  CDS Start-End: 272-445
gttttattctaggtagtcacttaaaaacgaacctcggtactggtctgacttaacatggaggaggaattgtctaagagactcgagctttagagtaattgggatggtgaaaggatgggtttccagaaacttcgcccaaaattaaagactccatcaaaaggactgctccatacactcaaggaacacccaccaacaaatcccgtctccacaaccaccagattatctcaccggcgagtgagactgcaaggctatttctgccgggcgctccgcgaagatgcagctcaagccgatggagatcaaccccgagatgctgaacaaagtgctgtcccggctgggggtcgccggccagtggcgcttcgtggacgtgctggggctggaagaggagtctctgggctcggtgccagcgcctgcctgcgcgctgctgctgctgtttcccctcacggcccag

SEQ ID NO: 197020 - DNA, 827 bp, Homo sapiens
  Payload ID: 18857
  Gene Name: ubiquitin carboxyl-terminal esterase L1 (ubiquitin thiolesterase)
  ENST ID: ENST00000508768
  CDS Start-End: 38-661
tcttccctaggctatttctgccgggcgctccgcgaagatgcagctcaagccgatggagatcaaccccgagatgctgaacaaagtgctgtcccggctgggggtcgccggccagtggcgcttcgtggacgtgctggggctggaagaggagtctctgggctcggtgccagcgcctgcctgcgcgctgctgctgctgtttcccctcacggcccagcatgagaacttcaggaaaaagcagattgaagagctgaagggacaagaagttagtcctaaagtgtacttcatgaagcagaccattgggaattcctgtggcacaatcggacttattcacgcagtggccaataatcaagacaaactgggatttgaggatggatcagttctgaaacagtttctttctgaaacagagaaaatgtcccctgaagacagagcaaaatgctttgaaaagaatgaggtagatgacaaggtgaatttccattttattctgtttaacaacgtggatggccacctctatgaacttgatggacgaatgccttttccggtgaaccatggcgccagttcagaggacaccctgctgaaggacgctgccaaggtctgcagagaattcaccgagcgtgagcaaggagaagtccgcttctctgccgtggctctctgcaaggcagcctaatgctctgtgggagggactttgctgatttcccctcttcccttcaacatgaaaatatatacccccccatgcagtctaaaatgcttcagtacttgtgaaacacagctgttcttctgttctgcagacacgccttcccctcagccacacccaggcacttaagcacaagcag

SEQ ID NO: 197021 - DNA, 844 bp, Homo sapiens
  Payload ID: 18858
  Gene Name: ubiquitin carboxyl-terminal esterase L3 (ubiquitin thiolesterase)
  Uniprot ID: P15374
  ENST ID: ENST00000377595
  CDS Start-End: 31-723
gtcagagctggagggccgggcaccgcggccatggagggtcaacgctggctgccgctggaggccaatcccgaggtcaccaaccagtttcttaaacaattaggtctacatcctaactggcaattcgttgatgtatatggaatggatcctgaactccttagcatggtaccaagaccagtctgtgcagtcttacttctctttcctattacagaaaagtatgaagtattcagaacagaagaggaagaaaaaataaaatctcagggacaagatgttacatcatcagtatatttcatgaagcaaacaatcagcaatgcctgtggaacaattggactgattcatgctattgcaaacaataaagacaagatgcactttgaatctggatcaaccttgaaaaaattcctggaggaatctgtgtcaatgagccctgaagaacgagccagatacctggagaactatgatgccatccgagttactcatgagaccagtgcccatgaaggtcagactgaggcaccaagtatagatgagaaagtagatcttcattttattgcattagttcatgtagatgggcatctctatgaattagatgggcggaagccatttccaattaaccatggtgaaactagtgatgaaactttattagaggatgccatagaagtttgcaagaagtttatggagcgcgaccctgatgaactaagatttaatgcgattgctctttctgcagcatagcttgtcaataatggaaacaccaaaaactgtattatttgcaactaaattttctctgccatacactaactcaaaaattttgatattttcattaacttgatgattaaactttatgtgagttaaa

SEQ ID NO: 197022 - DNA, 824 bp, Homo sapiens
  Payload ID: 18858
  Gene Name: ubiquitin carboxyl-terminal esterase L3 (ubiquitin thiolesterase)
  ENST ID: ENST00000419068
  CDS Start-End: 1-687
acagaagaggaagaaaaaataaaatctcagggacaagatgttacatcatcagtatatttcatgaagcaaacaatcagcaatgcctgtggaacaattggactgattcatgctattgcaaacaataaagacaagatgcactttgaatctggatcaaccttgaaaaaattcctggaggaatctgtgtcaatgagccctgaagaacgagccagatacctggagaactatgatgccatccgagttactcatgagaccagtgcccatgaaggtcagactgagtcctcctcgccatcctcatcacagcctcattctagccactgcagaacgaaggcctcatcattgtgtcaccatgcatccctgccctgggtcaaacgtaaccatgtaggccctgcaaaggctaccagtccatctctccgtcttcgtcgctggcgacccttcttacgtctaccatctttgggtctccattctgttgcaccaagtatagatgagaaagtagatcttcattttattgcattagttcatgtagatgggcatctctatgaattagatgggcggaagccatttccaattaaccatggtgaaactagtgatgaaactttattagaggatgccatagaagtttgcaagaagtttatggagcgcgaccctgatgaactaagatttaatgcgattgctctttctgcagcatagcttgtcaataatggaaacaccaaaaactgtattatttgcaactaaattttctctgccatacactaactcaaaaattttgatattttcattaacttgatgattaaactttatgtgagttaaactttgccttaacctgt

SEQ ID NO: 197023 - DNA, 1050 bp, Homo sapiens
  Payload ID: 18858
  Gene Name: ubiquitin carboxyl-terminal esterase L3 (ubiquitin thiolesterase)
  ENST ID: ENST00000618773
  CDS Start-End: 258-842
ggcgcatgcgtagaacgcgagcgctcggcaaggctcggctcggaagagtccaagcgtgaggggagagggctgtggattcagatactgtttttctcccgaaataggaaattggcttatttttttctcctcggcagcatcttaatttaaaatatgacacttgacctacggccctgcacggagcggttaagagggtgagaggcccgtttcttaaacaattaggtctacatcctaactggcaattcgttgatgtatatggaatggatcctgaactccttagcatggtaccaagaccagtctgtgcagtcttacttctctttcctattacagaaaagtatgaagtattcagaacagaagaggaagaaaaaataaaatctcagggacaagatgttacatcatcagtatatttcatgaagcaaacaatcagcaatgcctgtggaacaattggactgattcatgctattgcaaacaataaagacaagatgcactttgaatctggatcaaccttgaaaaaattcctggaggaatctgtgtcaatgagccctgaagaacgagccagatacctggagaactatgatgccatccgagttactcatgagaccagtgcccatgaaggtcagactgaggcaccaagtatagatgagaaagtagatcttcattttattgcattagttcatgtagatgggcatctctatgaattagatgggcggaagccatttccaattaaccatggtgaaactagtgatgaaactttattagaggatgccatagaagtttgcaagaagtttatggagcgcgaccctgatgaactaagatttaatgcgattgctctttctgcagcatagcttgtcaataatggaaacaccaaaaactgtattatttgcaactaaattttctctgccatacactaactcaaaaattttgatattttcattaacttgatgattaaactttatgtgagttaaactttgccttaacctgtgttttatgttatttttgctccaggttaaaggtgcaatgctttcctcctcttttcttgtgaaggatttatct

SEQ ID NO: 197024 - DNA, 1534 bp, Homo sapiens
  Payload ID: 18859
  Gene Name: ubiquitin carboxyl-terminal hydrolase L5
  Uniprot ID: Q9Y5K5
  ENST ID: ENST00000367448
  CDS Start-End: 102-1082
cgagctcggcggcgggtttgctgagatctgtggccggcggcagctggtgcggggggcagctgagagcgagaggtggatcggggcggtgtgtggccagggccatgacgggcaatgccggggagtggtgcctcatggaaagcgaccccggggtcttcaccgagctcattaaaggattcggttgccgaggagcccaagtagaagaaatatggagtttagagcctgagaattttgaaaaattaaagccagttcatgggttaatttttcttttcaagtggcagccaggagaagaaccagcaggctctgtggttcaggactcccgacttgacacgatattttttgctaagcaggtaattaataatgcttgtgctactcaagccatagtgagtgtgttactgaactgtacccaccaggatgtccatttaggcgagacattatcagagtttaaagaattttcacaaagttttgatgcagctatgaaaggcttggcactgagcaattcagatgtgattcgacaagtacacaacagtttcgccagacagcaaatgtttgaatttgatacgaagacatcagcaaaagaagaagatgcttttcactttgtcagttatgttcctgttaatgggagactgtatgaattagatggattaagagaaggaccgattgatttaggtgcatgcaatcaagatgattggatcagtgcagtaaggcctgtcatagaaaaaaggatacaaaagtacagtgaaggtgaaattcgatttaatttaatggccattgtgtctgacagaaaaatgatatatgagcagaagatagcagagttacaaagacaacttgcagaggaacccatggatacagatcaaggtaatagtatgttaagtgctattcagtcagaagttgccaaaaatcagatgcttattgaagaagaagtacagaaattaaaaagatacaagattgagaatatcagaaggaagcataattatctgcctttcattatggaattgttaaagactttagcagaacaccagcagttaataccactagtagaaaagtttgagaaacactttgagaagacactactaggcaaataaaattttggaccattaacttaaagacgagaatacatgggaaaataggataaaagaacaaggtgtgagaaggaatagaaggaaacaaacaggaaagatatggctgcaccatgcagtgctactatatgctgagattctacaggatgagatttttgaatagctgaggcagttgcctataatctgtgatgacataaaagtatttgacctaaaatctttttatttgcaaaataataaataaaaagtgattctccctcggcatggctataatgaacttggttagaacctataaatgtttttgttatgtgagactttttaaccgatgaattcgttgaatacacaccacatttaaaaactgcctaggaggtaatccaaaaatatatagttataaaacttcttgtattatgtaccaaatctctttcttaaaatataaaataaaattatctagtttaagatta

SEQ ID NO: 197025 - DNA, 1507 bp, Homo sapiens
  Payload ID: 18859
  Gene Name: ubiquitin carboxyl-terminal hydrolase L5
  Uniprot ID: Q9Y5K5
  ENST ID: ENST00000367449
  CDS Start-End: 150-1100
acggcgcccggaggctgtcgggaagtaggcggggtgacgtgtggttgacgagctcggcggcgggtttgctgagatctgtggccggcggcagctggtgcggggggcagctgagagcgagaggtggatcggggcggtgtgtggccagggccatgacgggcaatgccggggagtggtgcctcatggaaagcgaccccggggtcttcaccgagctcattaaaggattcggttgccgaggagcccaagtagaagaaatatggagtttagagcctgagaattttgaaaaattaaagccagttcatgggttaatttttcttttcaagtggcagccaggagaagaaccagcaggctctgtggttcaggactcccgacttgacacgatattttttgctaagcaggtaattaataatgcttgtgctactcaagccatagtgagtgtgttactgaactgtacccaccaggatgtccatttaggcgagacattatcagagtttaaagaattttcacaaagttttgatgcagctatgaaaggcttggcactgagcaattcagatgtgattcgacaagtacacaacagtttcgccagacagcaaatgtttgaatttgatacgaagacatcagcaaaagaagaagatgcttttcactttgtcagttatgttcctgttaatgggagactgtatgaattagatggattaagagaaggaccgattgatttaggtgcatgcaatcaagatgattggatcagtgcagtaaggcctgtcatagaaaaaaggatacaaaagtacagtgaaggtgaaattcgatttaatttaatggccattgtgtctgacagaaaaatgatatatgagcagaagatagcagagttacaaagacaacttgcagaggaacccatggatacagatcaaggtaatagtatgttaagtgctattcagtcagaagttgccaaaaatcagatgcttattgaagaagaagtacagaaattaaaaagatacaagattgagaatatcagaaggaagcataattatctgcctttcattatggaattgttaaagactttagcagaacaccagcagttaataccactagtagaaaagggaaaataggataaaagaacaaggtgtgagaaggaatagaaggaaacaaacaggaaagatatggctgcaccatgcagtgctactatatgctgagattctacaggatgagatttttgaatagctgaggcagttgcctataatctgtgatgacataaaagtatttgacctaaaatctttttatttgcaaaataataaataaaaagtgattctccctcggcatggctataatgaacttggttagaacctataaatgtttttgttatgtgagactttttaaccgatgaattcgttgaatacacaccacatttaaaaactgcctaggaggtaatccaaaaatatatagttataaaacttcttgtattatgtaccaaatctctttcttaaaatataaaataaaattatctagtttaagatta

SEQ ID NO: 197026 - DNA, 1355 bp, Homo sapiens
  Payload ID: 18859
  Gene Name: ubiquitin carboxyl-terminal hydrolase L5
  ENST ID: ENST00000367450
  CDS Start-End: 1-1107
gcgagaggtggatcggggcggtgtgtggccagggccatgacgggcaatgccggggagtggtgcctcatggaaagcgaccccggggtcttcaccgagctcattaaaggattcggttgccgaggagcccaagtagaagaaatatggagtttagagcctgagaattttgaaaaattaaagccagttcatgggttaatttttcttttcaagtggcagccaggagaagaaccagcaggctctgtggttcaggactcccgacttgacacgatattttttgctaagcaggtaattaataatgcttgtgctactcaagccatagtgagtgtgttactgaactgtacccaccaggatgtccatttaggcgagacattatcagagtttaaagaattttcacaaagttttgatgcagctatgaaaggcttggcactgagcaattcagatgtgattcgacaagtacacaacagtttcgccagacagcaaatgtttgaatttgatacgaagacatcagcaaaagaagaagatgcttttcactttgtcagttatgttcctgttaatgggagactgtatgaattagatggattaagagaaggaccgattgatttaggtgcatgcaatcaagatgattggatcagtgcagtaaggcctgtcatagaaaaaaggatacaaaaagacgggttttcaccatgttgcccaggctggtctcagactcctgagctcaagccatccgcctgcctcgacctcccaaagtggtacagtgaaggtgaaattcgatttaatttaatggccattgtgtctgacagaaaaatgatatatgagcagaagatagcagagttacaaagacaacttgcagaggaggaacccatggatacagatcaaggtaatagtatgttaagtgctattcagtcagaagttgccaaaaatcagatgcttattgaagaagaagtacagaaattaaaaagatacaagattgagaatatcagaaggaagcataattatctgcctttcattatggaattgttaaagactttagcagaacaccagcagttaataccactagtagaaaaggcaaaagaaaaacagaacgcaaagaaagctcaggaaaccaaatgaagatgttttcagatatgtacacatttctgcttctgcacatattttcatggaaaccattatgtataaagaacttagagcaacatcctaattggctcagtgcacgtttggcaatagtgccagcctgtcttgtctttaatgcatggattcataaacttcttccctacctgcatcatgtgcatgtagtgcatattaaatgaaagtgatattaagaatgctttcccaaattccattatttgacattgagtctg

SEQ ID NO: 197027 - DNA, 1346 bp, Homo sapiens
  Payload ID: 18859
  Gene Name: ubiquitin carboxyl-terminal hydrolase L5
  ENST ID: ENST00000367451
  CDS Start-End: 90-1157
cgggtttgctgagatctgtggccggcggcagctggtgcggggggcagctgagagcgagaggtggatcggggcggtgtgtggccagggccatgacgggcaatgccggggagtggtgcctcatggaaagcgaccccggggtcttcaccgagctcattaaaggattcggttgccgaggagcccaagtagaagaaatatggagtttagagcctgagaattttgaaaaattaaagccagttcatgggttaatttttcttttcaagtggcagccaggagaagaaccagcaggctctgtggttcaggactcccgacttgacacgatattttttgctaagcaggtaattaataatgcttgtgctactcaagccatagtgagtgtgttactgaactgtacccaccaggatgtccatttaggcgagacattatcagagtttaaagaattttcacaaagttttgatgcagctatgaaaggcttggcactgagcaattcagatgtgattcgacaagtacacaacagtttcgccagacagcaaatgtttgaatttgatacgaagacatcagcaaaagaagaagatgcttttcactttgtcagttatgttcctgttaatgggagactgtatgaattagatggattaagagaaggaccgattgatttaggtgcatgcaatcaagatgattggatcagtgcagtaaggcctgtcatagaaaaaaggatacaaaaagacgggttttcaccatgttgcccaggctggtctcagactcctgagctcaagccatccgcctgcctcgacctcccaaagtggtacagtgaaggtgaaattcgatttaatttaatggccattgtgtctgacagaaaaatgatatatgagcagaagatagcagagttacaaagacaacttgcagaggaacccatggatacagatcaaggtaatagtatgttaagtgctattcagtcagaagttgccaaaaatcagatgcttattgaagaagaagtacagaaattaaaaagatacaagattgagaatatcagaaggaagcataattatctgcctttcattatggaattgttaaagactttagcagaacaccagcagttaataccactagtagaaaaggcaaaagaaaaacagaacgcaaagaaagctcaggaaaccaaatgaagatgttttcagatatgtacacatttctgcttctgcacatattttcatggaaaccattatgtataaagaacttagagcaacatcctaattggctcagtgcacgtttggcaatagtgccagcctgtcttgtctttaatgcatggattcataaacttcttccctacctgcatcatgtgcatgtagtgcata

SEQ ID NO: 197028 - DNA, 1815 bp, Homo sapiens
  Payload ID: 18859
  Gene Name: ubiquitin carboxyl-terminal hydrolase L5
  Uniprot ID: Q9Y5K5
  ENST ID: ENST00000367454
  CDS Start-End: 237-1223
cgctacgggtgctgcaaggcctgggaagagtttcgatgtctctagggtggctagagcgtcctcccgcgctcagtcgcgctgcaggtgacggcgcccggaggctgtcgggaagtaggcggggtgacgtgtggttgacgagctcggcggcgggtttgctgagatctgtggccggcggcagctggtgcggggggcagctgagagcgagaggtggatcggggcggtgtgtggccagggccatgacgggcaatgccggggagtggtgcctcatggaaagcgaccccggggtcttcaccgagctcattaaaggattcggttgccgaggagcccaagtagaagaaatatggagtttagagcctgagaattttgaaaaattaaagccagttcatgggttaatttttcttttcaagtggcagccaggagaagaaccagcaggctctgtggttcaggactcccgacttgacacgatattttttgctaagcaggtaattaataatgcttgtgctactcaagccatagtgagtgtgttactgaactgtacccaccaggatgtccatttaggcgagacattatcagagtttaaagaattttcacaaagttttgatgcagctatgaaaggcttggcactgagcaattcagatgtgattcgacaagtacacaacagtttcgccagacagcaaatgtttgaatttgatacgaagacatcagcaaaagaagaagatgcttttcactttgtcagttatgttcctgttaatgggagactgtatgaattagatggattaagagaaggaccgattgatttaggtgcatgcaatcaagatgattggatcagtgcagtaaggcctgtcatagaaaaaaggatacaaaagtacagtgaaggtgaaattcgatttaatttaatggccattgtgtctgacagaaaaatgatatatgagcagaagatagcagagttacaaagacaacttgcagaggaacccatggatacagatcaaggtaatagtatgttaagtgctattcagtcagaagttgccaaaaatcagatgcttattgaagaagaagtacagaaattaaaaagatacaagattgagaatatcagaaggaagcataattatctgcctttcattatggaattgttaaagactttagcagaacaccagcagttaataccactagtagaaaaggcaaaagaaaaacagaacgcaaagaaagctcaggaaaccaaatgaagatgttttcagatatgtacacatttctgcttctgcacatattttcatggaaaccattatgtataaagaacttagagcaacatcctaattggctcagtgcacgtttggcaatagtgccagcctgtcttgtctttaatgcatggattcataaacttcttccctacctgcatcatgtgcatgtagtgcatattaaatgaaagtgatattaagaatgctttcccaaattccattatttgacattgagtctgacaactgttagttttctggttgtctaactaccatatgaagctagaaaatgcacaaacgatattccttatctgtaatttaaatacttaaaatttgcaattgtcagatcttgattaaactggttgtcttatttcttctcatcattaacggaaaaaaaatcagtatttctatctttgatatctaagtgttttgaggattttaaaactgaattttatctgctataccagttatttgagaaagtatgattttaatgtaaatcatttaaaaaggacaaaagtataatttccagtgattttcactgctgtcagtagaaaagtaataaacatctcaattttattttagtaaa

SEQ ID NO: 197029 - DNA, 5327 bp, Homo sapiens
  Payload ID: 18859
  Gene Name: ubiquitin carboxyl-terminal hydrolase L5
  Uniprot ID: Q9Y5K5
  ENST ID: ENST00000367455
  CDS Start-End: 237-1226
cgctacgggtgctgcaaggcctgggaagagtttcgatgtctctagggtggctagagcgtcctcccgcgctcagtcgcgctgcaggtgacggcgcccggaggctgtcgggaagtaggcggggtgacgtgtggttgacgagctcggcggcgggtttgctgagatctgtggccggcggcagctggtgcggggggcagctgagagcgagaggtggatcggggcggtgtgtggccagggccatgacgggcaatgccggggagtggtgcctcatggaaagcgaccccggggtcttcaccgagctcattaaaggattcggttgccgaggagcccaagtagaagaaatatggagtttagagcctgagaattttgaaaaattaaagccagttcatgggttaatttttcttttcaagtggcagccaggagaagaaccagcaggctctgtggttcaggactcccgacttgacacgatattttttgctaagcaggtaattaataatgcttgtgctactcaagccatagtgagtgtgttactgaactgtacccaccaggatgtccatttaggcgagacattatcagagtttaaagaattttcacaaagttttgatgcagctatgaaaggcttggcactgagcaattcagatgtgattcgacaagtacacaacagtttcgccagacagcaaatgtttgaatttgatacgaagacatcagcaaaagaagaagatgcttttcactttgtcagttatgttcctgttaatgggagactgtatgaattagatggattaagagaaggaccgattgatttaggtgcatgcaatcaagatgattggatcagtgcagtaaggcctgtcatagaaaaaaggatacaaaagtacagtgaaggtgaaattcgatttaatttaatggccattgtgtctgacagaaaaatgatatatgagcagaagatagcagagttacaaagacaacttgcagaggaggaacccatggatacagatcaaggtaatagtatgttaagtgctattcagtcagaagttgccaaaaatcagatgcttattgaagaagaagtacagaaattaaaaagatacaagattgagaatatcagaaggaagcataattatctgcctttcattatggaattgttaaagactttagcagaacaccagcagttaataccactagtagaaaaggcaaaagaaaaacagaacgcaaagaaagctcaggaaaccaaatgaagatgttttcagatatgtacacatttctgcttctgcacatattttcatggaaaccattatgtataaagaacttagagcaacatcctaattggctcagtgcacgtttggcaatagtgccagcctgtcttgtctttaatgcatggattcataaacttcttccctacctgcatcatgtgcatgtagtgcatattaaatgaaagtgatattaagaatgctttcccaaattccattatttgacattgagtctgacaactgttagttttctggttgtctaactaccatatgaagctagaaaatgcacaaacgatattccttatctgtaatttaaatacttaaaatttgcaattgtcagatcttgattaaactggttgtcttatttcttctcatcattaacggaaaaaaaatcagtatttctatctttgatatctaagtgttttgaggattttaaaactgaattttatctgctataccagttatttgagaaagtatgattttaatgtaaatcatttaaaaaggacaaaagtataatttccagtgattttcactgctgtcagtagaaaagtaataaacatctcaattttattttagtaaattttcttcaagtgtttggggttatttgtttatgtattagagaattgtttcaggaaggtctgagtattatgcttcaaagcaaaatttcaggttaagaagaaattgtaaatcttaaagaatgttggtgttactctcaatggaatattgtttcaagcttgtaagctgtgtataaaaaaactggaggtctgacagttcatgttatctgcttttttaaaaagatggtagtggtgatgggggtctttctatgccaatttgaataaatttcgtacagcctgcagttttcaagagccatatgtaatttgctcacaattgatttttaaaaattgatttgggagttgctttgtaataatcttctgcttctaatcttcctttgcaagtcagactttaaagaagactttataaagctttcttttttaaaggaagtaacctacttttttctttatcaagaatatttctgaggttgatacatgactttaacattttattatttattgtaaaatcaatttagcataatttattttattagggagaatgtgtacccatcttccagcttcagcacatttttaaggattgtttttaagcttagtaattgtggtattaaatgacttagaactaatggagaaaaacctgataggaaattgatagaaaaacgaatgaaatatttttcatacataatttcagttggaggtaatggaaaatatgtagtctctcagttatttgtgggtaaatatgttttgctgttgatacagtaataattatggagtgttttcaaagccatgatataatttttaaaaatagatttttaaggaaggctcatcttgatctcattcgtttatttcagcttaatttatatattctttcctattgaggcttaaattttgttaagcaatgtgaggattattgtggtaagttgtatttagtaatcaatacagtgtgatactggcactaggattgacaaataaagcaatggaacagaagagagagcctgaaaacagatcaacgtttatatgatcacttgatttcgacaaaggtggcaaaacaattcaacagagaaggaaagtcttttcaacaaatggagccagaatagaatagctgaatatccatatagaaaaaagtgaacaatgaccccctacctcacaaaaatgactttgagatgaatcatagacctaaatgtaatattttaaaagtatgaagctttttaactgaaaacagatgatatttttgtgacttggggggttagccaaaggtttcttaggtcacagaaagcagtaaccataaaagatccaaaattagagctcatcagaattgtcattgaaagtgttaacaaaagtaatatcaaatgacatttgaaaaatatccttgtaaaatgactatattaataggtataaggatttttcttattaatctaataaaattccttaataggaatttccatagcttaagagtggtttattttatctgcatcttctttggtgattgcaaatcccttgtgatacttcatgattacttctgtctgtgaataaagaagtgtgacttgtctgggtgctatatgttgctggtttgaaattaagtcatgaagctagagggtagagaaaatggaagaataaagagcaacccataaatagataaatgctatttggaaagttttttttaaatgatattttatagaaaatcttgctcatttcatatttagtcttttctaaaattttatttaattattgggtaggtgaagtcgcttccattctattttaagccttcaaaatagccaattctaagggatgtacttctgttattatcaacaaaaaccttgccaacagctgcggcactggctactctcaccttatatgtttagttcccaagatagcttgcccttttccgaacagcagtcagctcgactgtgccactaaaacagacaaatatttgctcgggaatcacaaccacggggacttgctcccccagttaggaccatggtacatatttgtgtgtatattatggtgttacatgcagattaatactttcaattaatcctcctagttgcctgtaacgttaacatttcaagatgcatttagatatttttatcctgtaggaggattttgtttatttgagggaaaaaaagggcttttaatgtattctcctcaaaaaccatttagagaaaacagataagtaaaaataaaatttaaattaccatatttctatttacagggatgagcacattaacattttatgtatttagtgatcctttttcctcatgtgtacacatatgtttttgtgtgttagtcttgcttgccctccccatagtctgaaatagttctatgaagtttatattatttttaaacttgatcatatacaaattttcaggaaacaaaccactctagctatttgaagaggaatgcagatttatattgggagttttgaaactacatagtttcttacaaaatcattggaaggtttggaggagcggtttcaagcttaagtctccagagattactcccatccaaacatacagtattggtgtacctagggaactgctcacttttgcaacagtcagggagttcactgttggaactattaatgttagaacatgttgcagtagttgtgttcaaggaatgaggaacctgctgtaacacttaatgactgtgcactggaatgcagaaaagttaaaccttctatgcctaaatgcctaaaacagacaaactggatagttatatttttagaatgatactgcgttttttagagtagtatgaattcctagatcagtcaaacatgcatgttatttagtttgttctttagtatattgttaactggcctaaatccaatgactgacatggtaaagattcaccacttctagcatactgggcactttttatttttgacttgattacattaactttttgaaaactattcagtgatttattcagccaatcttatgaggtacatctgagttgttctagatgctagaggatagtataacaggaaaaagcccctgctctcatggtgagacagataataagtatgtaatacaacttttcaaatagtagtatgaatggtaaaaaaaatagggaaaaggggtgggaggagctgaggtttgatagaatggtcatggaagatcccattaatgagatgtactttaagtagagacctaaatgaagataattttttctctagtactgaactagcactgtacaagtggattgcatataggcatataggcagaacttctctagtactgaactaacactgtacaagtggattgcatataggcatataggcagaaccaatgtgcaataattaagaatattaatttgcaatcatgtttgatggttaaatggtttattaatgttggagtgtcaatatgaaaatgggttgaataaaagatatatggaaatgcctaggactactgctctatttactttttagcttatccatatattttatgtaatatgcttctttgattctttcttgtagcaatgataatataatattgaataaaccataaaaccagtggggaaa

SEQ ID NO: 197030 - DNA, 834 bp, Homo sapiens
  Payload ID: 18859
  Gene Name: ubiquitin carboxyl-terminal hydrolase L5
  ENST ID: ENST00000421683
  CDS Start-End: 61-834
tctcaggccccagcccttccgaatccgctacgggtgctgcaaggcctgggaagagtttcgatgtctctagggtggctagagcgtcctcccgcgctcagtcgcgctgcaggttgccgaggagcccaagtagaagaaatatggagtttagagcctgagaattttgaaaaattaaagccagttcatgggttaatttttcttttcaagtggcagccaggagaagaaccagcaggctctgtggttcaggactcccgacttgacacgatattttttgctaagcaggtaattaataatgcttgtgctactcaagccatagtgagtgtgttactgaactgtacccaccaggatgtccatttaggcgagacattatcagagtttaaagaattttcacaaagttttgatgcagctatgaaaggcttggcactgagcaattcagatgtgattcgacaagtacacaacagtttcgccagacagcaaatgtttgaatttgatacgaagacatcagcaaaagaagaagatgcttttcactttgtcagttatgttcctgttaatgggagactgtatgaattagatggattaagagaaggaccgattgatttaggtgcatgcaatcaagatgattggatcagtgcagtaaggcctgtcatagaaaaaaggatacaaaagtacagtgaaggtgaaattcgatttaatttaatggccattgtgtctgacagaaaaatgatatatgagcagaagatagcagagttacaaagacaacttgcagaggaacccatggatacagatcaaggtaatagtatgttaagtgctattcagtcagaagttgccaaaaatcag

SEQ ID NO: 197031 - DNA, 785 bp, Homo sapiens
  Payload ID: 18859
  Gene Name: ubiquitin carboxyl-terminal hydrolase L5
  ENST ID: ENST00000443327
  CDS Start-End: 1-550
acagcaaatgtttgaatttgatacgaagacatcagcaaaagaagaagatgcttttcactttgtcagttatgttcctgttaatgggagactgtatgaattagatggattaagagaaggaccgattgatttaggtgcatgcaatcaagatgattggatcagtgcagtaaggcctgtcatagaaaaaaggatacaaaagtacagtgaaggtgaaattcgatttaatttaatggccattgtgtctgacagaaaaatgatatatgagcagaagatagcagagttacaaagacaacttgcagaggaggaacccatggatacagatcaaggtaatagtatgttaagtgctattcagtcagaagttgccaaaaatcagatgcttattgaagaagaagtacagaaattaaaaagatacaagattgagaatatcagaaggaagcataattatctgcctttcattatggaattgttaaagactttagcagaacaccagcagttaataccactagtagaaaagtttgagaaacactttgagaagacactactaggcaaataaaattttggaccattaacttaaagacgagaatacatgggaaaataggataaaagaacaaggtgtgagaaggaatagaaggaaacaaacaggaaagatatggctgcaccatgcagtgctactatatgctgagattctacaggatgagatttttgaatagctgaggcagttgcctataatctgtgatgacataaaagtatttgacctaaaatctttttatttgcaaaataataaataa

SEQ ID NO: 197032 - DNA, 411 bp, Homo sapiens
  Payload ID: 18859
  Gene Name: ubiquitin carboxyl-terminal hydrolase L5
  ENST ID: ENST00000416915
  CDS Start-End: 1-298
taatttaatggccattgtgtctgacagaaaaatgatatatgagcagaagatagcagagttacaaagacaacttgcagaggaacccatggatacagatcaaggtaatagtatgttaagtgctattcagtcagaagttgccaaaaatcagatgcttattgaagaagaagtacagaaattaaaaagatacaagattgagaatatcagaaggaagcataattatctgcctttcattatggaattgttaaagactttagcagaacaccagcagttaataccactagtagaaaagatattctgatataggggaaggattctttaataagttccccaagtgattctaatgcaactggtctgtgtaccacagtttgagaaacactttgagaagacactactaggcaaataaaattttgg

SEQ ID NO: 197033 - DNA, 784 bp, Homo sapiens
  Payload ID: 18859
  Gene Name: ubiquitin carboxyl-terminal hydrolase L5
  ENST ID: ENST00000449480
  CDS Start-End: 1-346
tgaaggtgaaattcgatttaatttaatggccattgtgtctgacagaaaaatgatatatgagcagaagatagcagagttacaaagacaacttgcagaggaacccatggatacagatcaaggtaatagtatgttaagtgctattcagtcagaagttgccaaaaatcagatgcttattgaagaagaagtacagaaattaaaaagatacaagattgagaatatcagaaggaagcataattatctgcctttcattatggaattgttaaagactttagcagaacaccagcagttaataccactagtagaaaagtttgagaaacactttgagaagacactactaggcaaataaaattttggaccattaacttaaagacgagaatacatggcaaaagaaaaacagaacgcaaagaaagctcaggaaaccaaatgaagatgttttcagatatgtacacatttctgcttctgcacatattttcatggaaaccattatgtataaagaacttagagcaacatcctaattggctcagtgcacgtttggcaatagtgccagcctgtcttgtctttaatgcatggattcataaacttcttccctacctgcatcatgtgcatgtagtgcatattaaatgaaagtgatattaagaatgctttcccaaattccattatttgacattgagtctgacaactgttagttttctggttgtctaactaccatatgaagctagaaaatgcacaaacgatattccttatctgtaatttaaatacttaaaatttgcaattgtcagatctt

SEQ ID NO: 197034 - DNA, 1329 bp, Homo sapiens
  Payload ID: 18859
  Gene Name: ubiquitin carboxyl-terminal hydrolase L5
  ENST ID: ENST00000420791
  CDS Start-End: 1-656
cattatcagagtttaaagaattttcacaaagttttgatgcagctatgaaaggcttggcactgagcaattcagatgtgattcgacaagtacacaacagtttcgccagacagcaaatgtttgaatttgatacgaagacatcagcaaaagaagaagatgcttttcactttgtcagttatgttcctgttaatgggagactgtatgaattagatggattaagagaaggaccgattgatttaggtgcatgcaatcaagatgattggatcagtgcagtaaggcctgtcatagaaaaaaggatacaaaagtacagtgaaggtgaaattcgatttaatttaatggccattgtgtctgacagaaaaatgatatatgagcagaagatagcagagttacaaagacaacttgcagaggaggaacccatggatacagatcaaggtaatagtatgttaagtgctattcagtcagaagttgccaaaaatcagatgcttattgaagaagaagtacagaaattaaaaagatacaagattgagaatatcagaaggaagcataattatctgcctttcattatggaattgttaaagactttagcagaacaccagcagttaataccactagtagaaaagtttgagaaacactttgagaagacactactaggcaaataaaattttggaccattaacttaaagacgagaatacatggcaaaagaaaaacagaacgcaaagaaagctcaggaaaccaaatgaagatgttttcagatatgtacacatttctgcttctgcacatattttcatggaaaccattatgtataaagaacttagagcaacatcctaattggctcagtgcacgtttggcaatagtgccagcctgtcttgtctttaatgcatggattcataaacttcttccctacctgcatcatgtgcatgtagtgcatattaaatgaaagtgatattaagaatgctttcccaaattccattatttgacattgagtctgacaactgttagttttctggttgtctaactaccatatgaagctagaaaatgcacaaacgatattccttatctgtaatttaaatacttaaaatttgcaattgtcagatcttgattaaactggttgtcttatttcttctcatcattaacggaaaaaaaatcagtatttctatctttgatatctaagtgttttgaggattttaaaactgaattttatctgctataccagttatttgagaaagtatgattttaatgtaaatcatttaaaaaggacaaaagtataatttccagtgattttcactgctgtcagtagaaaagtaataaacatctcaattttattttagtaaa

SEQ ID NO: 197035 - DNA, 577 bp, Homo sapiens
  Payload ID: 18859
  Gene Name: ubiquitin carboxyl-terminal hydrolase L5
  ENST ID: ENST00000417752
  CDS Start-End: 83-577
aggccctctcgacgtcggcctgtggggagcgatgccgacaagcaggagcggtcccggcttcggaaagggcccaccctgaggaatggtccggccgggcctagcgaggatgtccctaccgcgatgctggttccgttacccagggtggacaggcgcggaagcgggacggggaagagcgatagtttcgcggcgtttgcccagcctcaacccctgggatgcgggtgagagacatggaggactggtcagaatttgcgcgtccctggggccgcacaaaaggctcccagccggcctcccgcaatgtcctcacctgtacctggcagccgaccccctggatccgcagcgccgccaggagaagtcctgcgcagcgctgggaaacgacaaaagaaggcagcctgacgggcagcgacagccacagcaacagcaacagccccactgccgccggggattccaggccccagcccttccgaatccgctacgggtgctgcaaggcctgggaagagtttcgatgtctctagggtggctagagcgtcctcccgcgctcagtcgcgctgcaggttgccgaggagcccaagtagaagaa

SEQ ID NO: 197036 - DNA, 1087 bp, Homo sapiens
  Payload ID: 18860
  Gene Name: ubiquitin D
  Uniprot ID: O15205
  ENST ID: ENST00000377050
  CDS Start-End: 225-722
gattgcttgaggagagaagtatgtgatcagaaagcattctttgtctattaactcctgcccagcaaaagtgaaagaaaattcatgggagcatgcaagaacaaagagcacagcaaagctggacaaacacagcaatccaggcaggggatttccaactcaactctggtatataagctgcatgcaaagtcctttttctgtctctggtttctggccccttgtctgcagagatggctcccaatgcttcctgcctctgtgtgcatgtccgttccgaggaatgggatttaatgacctttgatgccaacccatatgacagcgtgaaaaaaatcaaagaacatgtccggtctaagaccaaggttcctgtgcaggaccaggttcttttgctgggctccaagatcttaaagccacggagaagcctctcatcttatggcattgacaaagagaagaccatccaccttaccctgaaagtggtgaagcccagtgatgaggagctgcccttgtttcttgtggagtcaggtgatgaggcaaagaggcacctcctccaggtgcgaaggtccagctcagtggcacaagtgaaagcaatgatcgagactaagacgggtataatccctgagacccagattgtgacttgcaatggaaagagactggaagatgggaagatgatggcagattacggcatcagaaagggcaacttactcttcctggcatgttattgtattggagggtgaccaccctgggcatggggtgttggcaggggtcaaaaagcttatttcttttaatctcttactcaacgaacacatcttctgatgatttcccaaaattaatgagaatgagatgagtagagtaagatttgggtgggatgggtaggatgaagtatattgcccaactctatgtttctttgattctaacacaattaattaagtgacatgatttttactaatgtattactgagactagtaaataaatttttaaggcaaaatagagcattcaaagccagcttggaatttaattctgtcttgataccttgttatttatgcaaaaactcctatctcctttcctttatgacaagagagtaagttttaggttgggatcc

SEQ ID NO: 197037 - DNA, 990 bp, Homo sapiens
  Payload ID: 18860
  Gene Name: ubiquitin D
  Uniprot ID: O15205
  ENST ID: ENST00000383547
  CDS Start-End: 225-722
gattgcttgaggagagaagtatgtgatcagaaagcattctttgtctattaactcctgcccagcaaaagtgaaagaaaattcatgggagcatgcaagaacaaagagcacagcaaagctggacaaacacagcaatccaggcaggggatttccaactcaactctggtatataagctgcatgcaaagtcctttttctgtctctggtttctggccccttgtctgcagagatggctcccaatgcttcctgcctctgtgtgcatgtccgttccgaggaatgggatttaatgacctttgatgccaacccatatgacagcgtgaaaaaaatcaaagaacatgtccggtctaagaccaaggttcctgtgcaggaccaggttcttttgctgggctccaagatcttaaagccacggagaagcctctcatcttatggcattgacaaagagaagaccatccaccttaccctgaaagtggtgaagcccagtgatgaggagctgcccttgtttcttgtggagtcaggtgatgaggcaaagaggcacctcctccaggtgcgaaggtccagctcagtggcacaagtgaaagcaatgatcgagactaagacgggtataatccctgagacccagattgtgacttgcaatggaaagagactggaagatgggaagatgatggcagattacggcatcagaaagggcaacttactcttcctggcatcttattgtattggagggtgaccaccctggggatggggtgttggcaggggtcaaaaagcttatttcttttaatctcttactcaacgaacacatcttctgatgatttcccaaaattaatgagaatgagatgagtagagtaagatttgggtgggatgggtaggatgaagtatattgcccaactctatgtttctttgattctaacacaattaattaagtgacatgatttttactaatgtattactgagactagtaaataaatttttaaggcaaaatagagcattcaaagcca

SEQ ID NO: 197038 - DNA, 990 bp, Homo sapiens
  Payload ID: 18860
  Gene Name: ubiquitin D
  ENST ID: ENST00000383641
  CDS Start-End: 225-722
gattgcttgaggagagaagtatgtgatcagaaagcattctttgtctattaactcctgcccagcaaaagtgaaagaaaattcatgggagcatgcaagaacaaagagcacagcaaagctggacaaacacagcaatccaggcaggggatttccaactcaactctggtatataagctgcatgcaaagtcctttttctgtctctggtttctggccccttgtctgcagagatggctcccaatgcttcctgcctctgtgtgcatgtccgttccgaggaatgggatttaatgacctttgatgccaacccatatgacagcgtgaaaaaaatcaaagaacatgtccggtctaagaccaaggttcctgtgcaggaccaggttcttttgctgggctccaagatcttaaagccacggagaagcctctcatcttatggcactgacaaagagaagaccatccaccttaccctgaaagtggtgaagcccagtgatgaggagctgcccttgtttcttgtggagtcaggtgatgaggcaaagaggcacctcctccaggtgcgaaggtccagctcagtggcacaagtgaaagcaatgatcgagactaagacgggtataatccctgagacccagattgtgacttgcaatggaaagagactggaagatgggaagatgatggcagattacggcatcagaaagggcaacttactcttcctggcatcttattgtattggagggtgaccaccctggggatggggtgttggcaggggtcaaaaagcttatttcttttaatctcttactcaacgaacacatcttctgatgatttcccaaaattaatgagaatgagatgagtagagtaagatttgggtgggatgggtaggatgaagtatattgcccaactctatgtttctttgattctaacacaattaattaagtgacatgatttttactaatgtattactgagactagtaaataaatttttaaggcaaaatagagcattcaaagcca

SEQ ID NO: 197039 - DNA, 990 bp, Homo sapiens
  Payload ID: 18860
  Gene Name: ubiquitin D
  Uniprot ID: O15205
  ENST ID: ENST00000421519
  CDS Start-End: 225-722
gattgcttgaggagagaagtatgtgatcagaaagcattctttgtctattaactcctgcccagcaaaagtgaaagaaaattcatgggagcatgcaagaacaaagagcacagcaaagctggacaaacacagcaatccaggcaggggatttccaactcaactctggtatataagctgcatgcaaagtcctttttctgtctctggtttctggccccttgtctgcagagatggctcccaatgcttcctgcctctgtgtgcatgtccgttccgaggaatgggatttaatgacctttgatgccaacccatatgacagcgtgaaaaaaatcaaagaacatgtccggtctaagaccaaggttcctgtgcaggaccaggttcttttgctgggctccaagatcttaaagccacggagaagcctctcatcttatggcattgacaaagagaagaccatccaccttaccctgaaagtggtgaagcccagtgatgaggagctgcccttgtttcttgtggagtcaggtgatgaggcaaagaggcacctcctccaggtgcgaaggtccagctcagtggcacaagtgaaagcaatgatcgagactaagacgggtataatccctgagacccagattgtgacttgcaatggaaagagactggaagatgggaagatgatggcagattacggcatcagaaagggcaacttactcttcctggcatgttattgtattggagggtgaccaccctgggcatggggtgttggcaggggtcaaaaagcttatttcttttaatctcttactcaacgaacacatcttctgatgatttcccaaaattaatgagaatgagatgagtagagtaagatttgggtgggatgggtaggatgaagtatattgcccaactctatgtttctttgattctaacacaattaattaagtgacatgatttttactaatgtattactgagactagtaaataaatttttaaggcaaaatagagcattcaaagcca

SEQ ID NO: 197040 - DNA, 990 bp, Homo sapiens; identical to SEQ ID NO: 197038
  Payload ID: 18860
  Gene Name: ubiquitin D
  ENST ID: ENST00000429935
  CDS Start-End: 225-722

SEQ ID NO: 197041 - DNA, 990 bp, Homo sapiens; identical to SEQ ID NO: 197038
  Payload ID: 18860
  Gene Name: ubiquitin D
  ENST ID: ENST00000414436
  CDS Start-End: 225-722

SEQ ID NO: 197042 - DNA, 990 bp, Homo sapiens
  Payload ID: 18860
  Gene Name: ubiquitin D
  Uniprot ID: O15205
  ENST ID: ENST00000432676
  CDS Start-End: 225-722
gattgcttgaggagagaagtatgtgatcagaaagcattctttgtctattaactcctgcccagcaaaagtgaaagaaaattcatgggagcatgcaagaacaaagagcacagcaaagctggacaaacacagcaatccaggcaggggatttccaactcaactctggtatataagctgcatgcaaagtcctttttctgtctctggtttctggccccttgtctgcagagatggctcccaatgcttcctgcctctgtgtgcatgtccgttccgaggaatgggatttaatgacctttgatgccaacccatatgacagcgtgaaaaaaatcaaagaacatgtccggtctaagaccaaggttcctgtgcaggaccaggttcttttgctgggctccaagatcttaaagccacggagaagcctctcatcttacggcattgacaaagagaagaccatccaccttaccctgaaagtggtgaagcccagtgatgaggagctgcccttgtttcttgtggagtcaggtgatgaggcaaagaggcacctcctccaggtgcgaaggtccagctcagtggcacaagtgaaagcaatgatcgagactaagacgggtataatccctgagacccagattgtgacttgcaatggaaagagactggaagatgggaagatgatggcagattacggcatcagaaagggcaacttactcttcctggcatcttattgtattggagggtgaccaccctgggcatggggtgttggcaggggtcaaaaagcttatttcttttaatctcttactcaacgaacacatcttctgatgatttcccaaaattaatgagaatgagatgagtagagtaagatttgggtgggatgggtaggatgaagtatattgcccaactctatgtttctttgattctaacacaattaattaagtgacatgatttttactaatgtattactgagactagtaaataaatttttaaggcaaaatagagcattcaaagcca

SEQ ID NO: 197043 - DNA, 1706 bp, Homo sapiens
  Payload ID: 18861
  Gene Name: ubiquitin domain containing 1
  Uniprot ID: Q9HAC8
  ENST ID: ENST00000370664
  CDS Start-End: 337-1020
gcccctgcctggtgccccgagcgagccgggagtagctgcggcggtgcccgccccctctctccgcccctccagcggagctggtctccggccgggcaccgtcgcgggcccccctggcccggccacctgggaccgtgctggggagtctgccacttccctctctcccctggcccgcaaagttttggcggagccatcgctggggctgagcgcgcccccggggggagatcggggagcgcccgatgccgggcggccggagccattgacccgggacgccgccgtccgctgagcagccgaccaccccgccgcctccggtgcatggggactggctgaggagccagcatgggcaactgcgtggggagacagcgccgggagaggccggcagccccgggacacccccgcaagcgagcaggacgcaatgagcccctgaagaaagagcggcttaagtggaagagcgactaccccatgactgacgggcagctgcggagcaaacgggatgagttctgggacacagcgcctgccttcgagggccgcaaggagatctgggatgccctcaaggctgccgcctatgctgctgaagccaacgaccacgagctggcccaggccatcctggatggagccagcatcaccctgcctcatggcaccctctgtgaatgctacgatgagctgggcaatcgctaccagctgcccatctactgcctgtcaccgccggtgaacctgctgctggagcacacggaggaggagagcctggagccccccgagcctccacccagcgtgcgccgtgagttcccgctgaaggtgcgcctgtccacgggcaaggacgtgaggctcagcgccagcctgcccgacacagtggggcagctcaagaggcagctgcacgcccaggagggcatcgagccatcgtggcagcggtggttcttctccgggaagctgctcacagaccgcacacggctccaggagaccaagatccagaaagattttgtcatccaggtcatcatcaaccagcccccaccaccccaggactgatgggcccacggacccctgggaagaggccccgcctggagcactaggcccccaccctgctgctgccttccagtgctgtcattttcttcaggggccctcccctcggtgtggctggtgggtgagccgtgaagggaccctgcctttcagggcactacgcgccaccagttcccggtacccagggagcaggcagccacacacgggccttgcaaccttgtcagagaaaaggcgaacagggccctcaccctgcctgtctcccgaagcaggttcgagccacaagggccaaccaggaggcccctggagcccagatctgtcatctggtgctgccagctgtgctcactctggttttctgctcagggtctgaagcagctgctgtctccctcctctgcccccatcccctggctctcccctgggcacagtgccactcccttggaagggagggaaccacccgtgagccccagggcttgggaagcctgaggcgggcctctgcctctccctgcccccagcacaattggcagagatgaggcgggtggtggacagctgggctgtcgtggcagggtctgcacagggccatgtcctggctgtaacccaggcagtgggaggtctgcagcctggtcatggcctccacagcaggtccctgtggacagacatatctgcatatttatcaataaagccttttgctccttctcgct

SEQ ID NO: 197044 - DNA, 3301 bp, Homo sapiens
  Payload ID: 18862
  Gene Name: ubiquitin domain containing 2
  Uniprot ID: Q8WUN7
  ENST ID: ENST00000393792
  CDS Start-End: 407-1111
ggcgccgcgggccgggggccgatgggtcctggcggacgcgaggcgccggcgcggggctcgcctggactcgggtgtgcggggctgtgagggggcgaggcgggcgctgcggcccgcccgggatgggccagccctggcctggcggggctgagccgaaggcgagggcggcgcgcgggccaggcctgccgggcgggcggcccgggggttgaggtagaagtgggcgcggaggaaggggccgagccaaggcggtgggtggagcggcgaggggggcggaggctgggccgcggcgggcgagcggagcggcgcgcctgtccggagctcggcggtggcgccggaggaggctgcagcggcggcggcggcgggcccggacgagcgtccggaggtggcggacgaggcgccgggggcccccatgggcgggtgtgtgggcgcccagcacgactcctcgggcagcctcaacgagaactcggagggcaccggagttgctctaggtcgtaaccagcctttgaaaaaggagaaaccaaaatggaaaagcgattatcctatgacagatggacaactacgcagcaagagggatgaattttgggatacagcaccagcttttgaaggccggaaagagatttgggatgccttgaaggctgctgcacatgcttttgagagcaatgatcatgaactggcacaagcaatcattgatggtgcaaacataacattaccacatggtgcacttacagagtgctacgatgaactggggaacagatatcagcttccagtgtattgcttggcaccgccaatcaacatgatagaggaaaagagcgacatagagactctggatattcctgagccaccacccaattctggatatgaatgtcagcttcgtttgcgcctttccacaggcaaagacctcaagcttgtggttcgcagcacagacacagtattccacatgaagagacggttgcatgcagcagagggagtggaaccaggtagtcagcggtggtttttttctggcagacctctcactgacaaaatgaagttcgaagagctgaagatcccaaaggactatgttgtacaggttatagtgagccaacctgtgcagaacccaacaccagtggagaactgaactgagccctgttggccagctcccacatccctctgctcctttttatggttcttgttgtcatttcctactctgcggcgtgaaatctatttcactgctctaaattccctatgaatggatttagttctgaggaattaccagtgaaaaattccatctgtgatggagaccaacaaaaataataaaacacaaagagccaggctttgagactcatgtaattacaatttctaatttgaaaggcagttaagaaatagataaccatttattttagaacactcaacaactatgtaatggctatatttcagtgacttggactgtaaatgaaacattgcatccatgaaggacagcaccaagcacctttttgaatacagaatttttttagaaaaatatatcaaattatataatttccagaaaccataaataatggatataaaacttaacctttttgttttgttttgttttgttttgttttgttttgttttgttttggttaatggaaactgaaaagagcagtatttgaggttgcttctattctggttttttattcttagctcaattaatatttagccataaatgagtagagactggcaaattgtgctttagtgttgctttcctcatccccacatcttgagctccttatttacattcacactaaattttggtgccttccagcacattagtggcaggcacccttctggaacactaggcaataatttcatcaatacagtcaggtctcttgagtttcaacagatactcagttgaaaagtcgctgtcatcttgctgcataagtattttgaaaggtctgtataacgaagccatttttatatccaggcttagaaggtcactactatatagtaccttcattgatctatctattctgcttggaacttttcatagctaagtataacccccaaatgcatggttcctgggtcaggagacaccaaaatcaattatagctgttcccactcaagttaataaagtaaatgatttcctccactttgcatggaggggtgtaaggaaagcctattttatctgtgcctgggagaactgtgcctattttcagtcttttagaggaaatttcaactcaaaatttttaagtgtgaaagatttactggtgtcacataaacattagcagtgagaccaaataatgaaacattgctttataccttagtgctttccagttcactgttacctctagtcatggtagatgacaattttcctccctcatcttttgtagcaaagaagcaaattaagagccttttgcaagttagattaggggactgaaaaatccagggagataacctgattcttctatactatgactggagtaaagctgccaagagttaggttgaatttggagccttttaaaagttggttccataagtgagaaggggggctaacatgtgaccactgtgcccctgagaatccatgagatggaaaagtacagacaagaaggcacttaacgctgttctcagttggaaaatgtcagccctccacacctgtttggatgtgaagtgcattattaattttaatgacaaaatgaaactgctaattagtttaaatgtaatgtttaaatggtattgaatttcctattgcctgattaaatatatctgtaattgtaacatcatgtttctgagagctttaactacttccttatttttatgcaatcattttaaagattgtggctatatctaatttaaatttgctgatgattgaatctaaattcaagtgaagaccacagcattaatcccaaaggagattttttttatgtttagaggtggagatattagggtaaatcagtatattgctcctgtcatcaaagtttttgttcatttgtgtgccacatcgaatagcagcacttctcaaagtttgtcaactggaaaaaagtgtttaaaactgtttttttcttaagcagatttggtgatgtcatcaatatctatgatatcgattggtaaaaggtctttctttgttgaggatttgagctctctttttaagagtttattttattttaaaggaacatatgctttgaataacaattctctgggcatgtttaactaacctaggtgggaaaaccatggtgctgtttaattgtaaatagattgatataagattggaccagtacttgatgtgtataattttagtatgtagggtttatgtgctttttttaaaaaaaaaaaaaaggttcaatttttctctt

SEQ ID NO: 197045 - DNA, 5110 bp, Homo sapiens
  Payload ID: 18863
  Gene Name: ubiquitin family domain containing 1
  Uniprot ID: O14562
  ENST ID: ENST00000395878
  CDS Start-End: 382-1311
cgtgggcttctccctgcgtcacttccggggactgcttccagccaatcggcctccgccacagccagcgcagccttgccccttaaagtcacaggccccctagcgcgaaatcccacgcccccctggacggctgcggccgcactcgccaccagggggcagaggccagagaaagggctatttcccggacccgcccccttcagcttgggaaagcgaaagcgtggcaggggccggacctgggagcggaggaggcgggtctccatagaaacctccacctgtttccggccgggctgtgagagattaggggctgctgcgggggccaatctcagccagctcgcctcttcccagcggcctctgcgggagcggtgggtgttgtacacaatcatcatggcggcggccggggccccggatggcatggaggaacctggcatggacacggaggccgagactgtggctactgaggctcccgcgcggcccgtcaactgcctggaggctgaagccgcggcgggggcggcggccgaggactccggcgccgcacgaggcagcctgcagccggccccggcccagccccctggggaccccgcagcccaggcctcggtcagcaacggcgaagacgcgggcggcggcgcgggcagggagctggtggacttgaagatcatctggaataagaccaagcatgacgtgaagttccccctggacagcacaggctccgagctgaaacagaagatccactcgattacaggtctcccgcctgccatgcagaaagtcatgtataagggactcgtccccgaggataaaacattgagagaaataaaagtgaccagtggggccaagatcatggtggttggctccaccatcaatgatgttttagcagtaaacacacccaaagatgctgcgcagcaggatgcaaaggccgaagagaacaagaaggagcctctctgcaggcagaaacaacacaggaaagtgttggataaaggaaaacctgaagatgtgatgccatctgttaagggggcccaggagcgcctgccaacggtaccgctgtccggcatgtacaataaatctggaggaaaagtgagactcacctttaaactagaacaagaccagctgtggattggcactaaagagcggactgagaaattgcccatgggctccataaaaaatgtggtcagtgaacctatcgaaggacatgaagactaccacatgatggcgtttcagttgggccccacggaagcctcttactactgggtgtactgggttccaactcaatatgtggatgcaatcaaagacactgtgctggggaaatggcagtatttttgaaagcactttcacctctggcccaggagactgacccaaagtgaaggacattgccgggagaggcctgcagcatccctggatttcagagttctggaactttgttcataaaaaatctatattcaatctgaggtgatgtggtgactgaagccagaggtgatgtactttcaccattagcttaattttaacttaaaattaccagttccctttcttgcagtcagcttcataccatttttaaagtcaatacgatggaaatcaataaatctgaattccgaacatgttgtgtggaatactcttaagtgtgtttgagagtagatctgccaattatgttgacaagggaatgatcaaaagctttgttttttttaaaaaaaaaaaaagcagtttcaattgaaatattttcatacatctttggttgcaaacatttggactgcattgcaatgagttggggtgttttttttttccttttttgtataaaattgtatgcaaaatgggggtgggttagtaagccacatatttctgtccattgattcagatttaattctttccctttttcattctctcgcttcctcaatttgagtttttgttttaagaacccaaagatgtcagttcttcttttggtacctcatcaacgcttcctttcctgggctccctcccgccgtgctgctgctgcctgtgaacgcacggtgggagaggaagagctgctcagtcttgggcaaggagctctcacacttgctgtggtgttcgttgagcagcagagtatctcccagtgactcctgtttaaatgtcttgccctttgggcccccatctccaaggagttccattgctggttggatgattgtctgcacccctcactgagcttggcctagaggcccagcctggcatggttgtgcctgggctgtgccgctcaacagccccagctcccaagcagacaaagacctcttccaggaggagccaggtagaagatagttatacagccatatagctgcagatccagataaccttctttctttggaagttttcaagaaattcttaagcagtccaaggatgatttcaattatgcttctccattgggtccttctgctcatgcattcagttcaagtgtcctttatcccaggttcagagatgctgcctttctgaagaagacatctgaccctagcaggttggccagtgttattgaacaacaaaaatgggataaattgctttcatgattagctcaccttcttctggttttagcccttctgttctctgtacacgtgaacttctgtcatctccttctggcttggttgcctctgaaaggagggaaagtctcttggtaaattatctcttttgtgctgtttgctgtttctctgctgccgtctttgcagttctcctctcactggttgcaggctttcatagtaaggtttggcgagaaatgttccaaacatcacattttggattctaggctgtcacccctcattctgtgaaacgtattagcatgtgttcgcccaagatgactattccttgtgagccagttaatgatgatattctacgcccttcccttctaagctgtagttcaggaatccagcccacatagacagactcttgctttccatggtgtagtcaatgccaagtgatgcatctaggcaggaaaatctactctttgcttttttgggggcaattagtacatttgtgaagtgcagcatccaagaaacagcctgttttttcatcccttgagaaaggagcagtcattgcagcttttctgtccttgtcggcctgcagttcctggggaaaagagtacatctgagctacttgtccaagcctctgtctgcaggtgacaggttttgggggaaatgagatgcattaagtagaacatcatctcgggtcagacattgccccttttgtttgccaatgccccagtcctagagacttgtcctgacagtgccgcacacctacttttgatctctcagagcaggtggctccatccccagactagcctggctgctctccgaggcccctccacctgctccccttattgccccattcttgtggcttgccgggccacttggcctcccttcttgccggtgacagcgttccatcatctccccgctccccaagggccaactgcttctcactcaggctggtgtcatttcaggaggaccaaagcctgcgtgagcctttttattttcagtaaaatggtgcttttttccttacttcgagatactatatataaataataatgtaaatgacaccttttcgtacggagctgtttgagtattgctttacagagctcactaaatcagcttcaacaatcttgagctctgtggctcctcaccctgtctgcatggaagaccttgctggacgctctcgggagagcagacatagcaccagaagccactgggagaagtgttttcgatccgtgtctgggccacagtagtattcactgtttagtctttgagttccgtaagcagtctcttcatacatttcttacagtctggagtgtactgactaaatctgtgtaagcaaattgaaatactctttcttttaggtagcgtcacagtggttttttttttcctcaggataatttctatacaatttccttactgtcagagggaccagatctttccctcactgtggcaggggccgtgcaggtggataaaggaagagctggtttccggagagtgactgtaacagcgttgactcgaagctagagatggagggggtggccgtctcttagacattggacacctctcagagcctcctgagggcttctttgtcttctagaatctctaccggtggtcctcctgcaggttctggctcacagacatcatcatgcctttttttccctccctgaggcgccttggcagaagagcgtgaccctgtgagccaggccccccttagctctgcttcagatcacagaacacagacagactcgcgagttgctggacctctttggtattaagtgtttgaatccatggtgggccttttgcaagtagcgttagctctttttaaatgttgaactgagctaaggatgcactttcttgtggacatagaaggggcccacgtaaggccctgagtaggctccttagttgctgctttacctgatgagggccaaagagattaactctgcctcgttgccatgtctcagaaaagttgccatatttcacccagaaggggcttgttttcctcttactcttactttaaccatgtgcctggaggagccattctgggctcttgcacttgcccagcctttctttgccaggggcagagaagggaaagggggtagattgagtgtgccaagggccgtgcaagggcaggcttgctttccacccatctgctgagggagccctctcctctcgctccttgcctctgttcacacctgttgtcttggaagaggatggtccctttgtcttaaggctttgtgataaagtcatctccagttaggatctgcacctgtttccttcgtaatagtgcctggcggcctttctgaagttacaggtggttgggagccctctcgcatgcagaacatctggtagattgatctgccaggctgggtggttctactgctttctcaatttctaagaaccttttttttttcttaaagagttctgctgaattatttgacaatatttgtaagtaccatgtttccttgtggtgtatgctctgttctggtttctgttttcaaatcaaatgcctgtttgggaggagatgaacgtatttagtctattagatttgcactgctggattttttttttaaagtgtaaccttgaatagctgtcttattgtttatcctgtaagattagtcaatcgattaaagtttgataattaa

SEQ ID NO: 197046 - DNA, 4727 bp, Homo sapiens
  Payload ID: 18863
  Gene Name: ubiquitin family domain containing 1
  ENST ID: ENST00000567212
  CDS Start-End: 28-930
gtgggtgttgtacacaatcatcatggcatggaggaacctggcatggacacggaggccgagactgtggctactgaggctcccgcgcggcccgtcaactgcctggaggctgaagccgcggcgggggcggcggccgaggactccggcgccgcacgaggcagcctgcagccggccccggcccagccccctggggaccccgcagcccaggcctcggtcagcaacggcgaagacgcgggcggcggcgcgggcagggagctggtggacttgaagatcatctggaataagaccaagcatgacgtgaagttccccctggacagcacaggctccgagctgaaacagaagatccactcgattacaggtctcccgcctgccatgcagaaagtcatgtataagggactcgtccccgaggataaaacattgagagaaataaaagtgaccagtggggccaagatcatggtggttggctccaccatcaatgatgttttagcagtaaacacacccaaagatgctgcgcagcaggatgcaaaggccgaagagaacaagaaggagcctctctgcaggcagaaacaacacaggaaagtgttggataaaggaaaacctgaagatgtgatgccatctgttaagggggcccaggagcgcctgccaacggtaccgctgtccggcatgtacaataaatctggaggaaaagtgagactcacctttaaactagaacaagaccagctgtggattggcactaaagagcggactgagaaattgcccatgggctccataaaaaatgtggtcagtgaacctatcgaaggacatgaagactaccacatgatggcgtttcagttgggccccacggaagcctcttactactgggtgtactgggttccaactcaatatgtggatgcaatcaaagacactgtgctggggaaatggcagtatttttgaaagcactttcacctctggcccaggagactgacccaaagtgaaggacattgccgggagaggcctgcagcatccctggatttcagagttctggaactttgttcataaaaaatctatattcaatctgaggtgatgtggtgactgaagccagaggtgatgtactttcaccattagcttaattttaacttaaaattaccagttccctttcttgcagtcagcttcataccatttttaaagtcaatacgatggaaatcaataaatctgaattccgaacatgttgtgtggaatactcttaagtgtgtttgagagtagatctgccaattatgttgacaagggaatgatcaaaagctttgttttttttaaaaaaaaaaaaagcagtttcaattgaaatattttcatacatctttggttgcaaacatttggactgcattgcaatgagttggggtgttttttttttccttttttgtataaaattgtatgcaaaatgggggtgggttagtaagccacatatttctgtccattgattcagatttaattctttccctttttcattctctcgcttcctcaatttgagtttttgttttaagaacccaaagatgtcagttcttcttttggtacctcatcaacgcttcctttcctgggctccctcccgccgtgctgctgctgcctgtgaacgcacggtgggagaggaagagctgctcagtcttgggcaaggagctctcacacttgctgtggtgttcgttgagcagcagagtatctcccagtgactcctgtttaaatgtcttgccctttgggcccccatctccaaggagttccattgctggttggatgattgtctgcacccctcactgagcttggcctagaggcccagcctggcatggttgtgcctgggctgtgccgctcaacagccccagctcccaagcagacaaagacctcttccaggaggagccaggtagaagatagttatacagccatatagctgcagatccagataaccttctttctttggaagttttcaagaaattcttaagcagtccaaggatgatttcaattatgcttctccattgggtccttctgctcatgcattcagttcaagtgtcctttatcccaggttcagagatgctgcctttctgaagaagacatctgaccctagcaggttggccagtgttattgaacaacaaaaatgggataaattgctttcatgattagctcaccttcttctggttttagcccttctgttctctgtacacgtgaacttctgtcatctccttctggcttggttgcctctgaaaggagggaaagtctcttggtaaattatctcttttgtgctgtttgctgtttctctgctgccgtctttgcagttctcctctcactggttgcaggctttcatagtaaggtttggcgagaaatgttccaaacatcacattttggattctaggctgtcacccctcattctgtgaaacgtattagcatgtgttcgcccaagatgactattccttgtgagccagttaatgatgatattctacgcccttcccttctaagctgtagttcaggaatccagcccacatagacagactcttgctttccatggtgtagtcaatgccaagtgatgcatctaggcaggaaaatctactctttgcttttttgggggcaattagtacatttgtgaagtgcagcatccaagaaacagcctgttttttcatcccttgagaaaggagcagtcattgcagcttttctgtccttgtcggcctgcagttcctggggaaaagagtacatctgagctacttgtccaagcctctgtctgcaggtgacaggttttgggggaaatgagatgcattaagtagaacatcatctcgggtcagacattgccccttttgtttgccaatgccccagtcctagagacttgtcctgacagtgccgcacacctacttttgatctctcagagcaggtggctccatccccagactagcctggctgctctccgaggcccctccacctgctccccttattgccccattcttgtggcttgccgggccacttggcctcccttcttgccggtgacagcgttccatcatctccccgctccccaagggccaactgcttctcactcaggctggtgtcatttcaggaggaccaaagcctgcgtgagcctttttattttcagtaaaatggtgcttttttccttacttcgagatactatatataaataataatgtaaatgacaccttttcgtacggagctgtttgagtattgctttacagagctcactaaatcagcttcaacaatcttgagctctgtggctcctcaccctgtctgcatggaagaccttgctggacgctctcgggagagcagacatagcaccagaagccactgggagaagtgttttcgatccgtgtctgggccacagtagtattcactgtttagtctttgagttccgtaagcagtctcttcatacatttcttacagtctggagtgtactgactaaatctgtgtaagcaaattgaaatactctttcttttaggtagcgtcacagtggttttttttttcctcaggataatttctatacaatttccttactgtcagagggaccagatctttccctcactgtggcaggggccgtgcaggtggataaaggaagagctggtttccggagagtgactgtaacagcgttgactcgaagctagagatggagggggtggccgtctcttagacattggacacctctcagagcctcctgagggcttctttgtcttctagaatctctaccggtggtcctcctgcaggttctggctcacagacatcatcatgcctttttttccctccctgaggcgccttggcagaagagcgtgaccctgtgagccaggccccccttagctctgcttcagatcacagaacacagacagactcgcgagttgctggacctctttggtattaagtgtttgaatccatggtgggccttttgcaagtagcgttagctctttttaaatgttgaactgagctaaggatgcactttcttgtggacatagaaggggcccacgtaaggccctgagtaggctccttagttgctgctttacctgatgagggccaaagagattaactctgcctcgttgccatgtctcagaaaagttgccatatttcacccagaaggggcttgttttcctcttactcttactttaaccatgtgcctggaggagccattctgggctcttgcacttgcccagcctttctttgccaggggcagagaagggaaagggggtagattgagtgtgccaagggccgtgcaagggcaggcttgctttccacccatctgctgagggagccctctcctctcgctccttgcctctgttcacacctgttgtcttggaagaggatggtccctttgtcttaaggctttgtgataaagtcatctccagttaggatctgcacctgtttccttcgtaatagtgcctggcggcctttctgaagttacaggtggttgggagccctctcgcatgcagaacatctggtagattgatctgccaggctgggtggttctactgctttctcaatttctaagaaccttttttttttcttaaagagttctgctgaattatttgacaatatttgtaagtaccatgtttccttgtggtgtatgctctgttctggtttctgttttcaaatcaaatgcctgtttgggaggagatgaacgtatttagtctattagatttgcactgctggattttttttttaaagtgtaaccttgaatagctgtcttattgtttatcctgtaagattagtcaatcgattaaagtttgataatt

SEQ ID NO: 197047 - DNA, 642 bp, Homo sapiens
  Payload ID: 18863
  Gene Name: ubiquitin family domain containing 1
  ENST ID: ENST00000567264
  CDS Start-End: 17-589
gttgtacacaatcatcatggcggcggccggggccccggatggcatggaggaacctggcatggacacggaggccgagactgtggctactgaggctcccgcgcggcccgtcaactgcctggaggctgaagccgcggcgggggcggcggccgaggactccggcgccgcacgaggcagcctgcagccggccccggcccagccccctggggaccccgcagcccaggcctcggtcagcaacggcgaagacgcgggcggcggcgcgggcagggagctggtggacttgaagatcatctggaataagaccaagcatgacgtgaagttccccctggacagcacaggctccgagctgaaacagaagatccactcgattacaggtctcccgcctgccatgcagaaagtcatgtataagggactcgtccccgaggataaaacattgagagaaataaaagtgaccagtggggccaagatcatggtggttggctccaccatcaatgatgttttagcagtaaacacacccaaagatgctgcgcagcaggatgcaaaggccgaagagaacaagaaggagcctctctgcaggcagaaaggcccatgatggaaatttatggcagcagttgggtgccgcagagtggaggtgacaactacctg

SEQ ID NO: 197048 - DNA, 1814 bp, Homo sapiens
  Payload ID: 18864
  Gene Name: ubiquitin fusion degradation 1 like (yeast)
  Uniprot ID: Q92890
  ENST ID: ENST00000263202
  CDS Start-End: 131-1054
acttccggtgagcctctggggcgtaccggcttggcgcggcggcagcggcagcggcggctgggagagcggtcggcggggtttcttcgttgcattgcctgagaggagcggagtctgccaggtggtgtccatcatgttctctttcaacatgttcgaccaccctattcccagggtcttccaaaaccgcttctccacacagtaccgctgcttctctgtgtccatgctagcagggcctaatgacaggtcagatgtggagaaaggagggaagataattatgccaccctcggccctggaccaactcagccgacttaacattacctatcccatgctgttcaaactgaccaataagaattcggaccgcatgacgcattgtggcgtgctggagtttgtggctgatgagggcatctgctacctcccacactggatgatgcagaacttactcttggaagaaggcggcctggtccaggtggagagcgtcaaccttcaagtggccacctactccaaattccaacctcagagccctgacttcctggacatcaccaaccccaaagccgtattagaaaacgcacttaggaactttgcctgtctgaccaccggggatgtgattgccatcaactataatgaaaagatctacgaactgcgtgtgatggagaccaaacccgacaaggcagtgtccatcattgagtgtgacatgaacgtggactttgatgctcccctgggctacaaagaacccgaaagacaagtccagcatgaggagtcgacagaaggtgaagccgaccacagtggctatgctggagagctgggcttccgcgctttctctggatctggcaatagactggatggaaagaagaaaggggtagagcccagcccctccccaatcaagcctggagatattaaaagaggaattcccaattatgaatttaaacttggtaagataactttcatcagaaattcacgtccccttgtcaaaaaggttgaagaggatgaagctggaggcagattcgtcgctttctctggagaaggacagtcattgcgtaaaaagggaagaaagccctaagtgaggactgttggctgattggaaaataataaaagaatcatttgcaacatcttggcttttagttactggcactgacagggacgagcctcatcagagaatactctgttacttaagatttatttagagttacctaagaattattaagtttgacttggaagtggagcagcaggactttgtagttgtatgcttgatttggggaaagacaaagagctgtccctgagggcctgtagatagctgcctcctcacctcttcacgctttcagcttgaggggagctcccactgcctcagcaggagcaattctgcatccctaattctgtcaaaacctatgaaggtgactaaattgtctaacatgaagtgttctttctttttcttcatttatcctttcttttcctacatcaattgcataggtgtcagtctttggcctaaaaaaaggctttaaatagacatgtgttctataagtagtggctgtcccactactgtggctgcaatttaagtatttgacaaagaatgtttctatttttattttacatatttttttcaaaaacaccactcagaagaacctgatctgaatgagtttgcacttttattctcatttcatatggacataactggctccttagtgaacctgttcatagtgaaacaactccatggagaagcaaacatgtgaatgttagaatgaacaaatgctaaagagatgttcctctccttcttccctactccccaactcccaattttaatttattaaatcatccaagcttct

SEQ ID NO: 197049 - DNA, 1007 bp, Homo sapiens
  Payload ID: 18864
  Gene Name: ubiquitin fusion degradation 1 like (yeast)
  Uniprot ID: Q92890
  ENST ID: ENST00000399523
  CDS Start-End: 88-888
agcggcagcggcggctgggagagcggtcggcggggtttcttcgttgcattgcctgagaggagcggagtctgccaggtggtgtccatcatgttctctttcaacatgttcgaccaccctattcccagggtcttccaaaaccgcttctccacacagtaccgctgcttctctgtgtccatgctagcagggcctaatgacaggtcagatgtggagaaaggagggaagataattatgccaccctcggccctggaccaactcagccgacttaacattacctatcccatgctgttcaaactgaccaataagaattcggaccgcatgacgcattgtggcgtgctggagtttgtggctgatgagggcatctgctacctcccacactggatgatgcagaacttactcttggaagaaggcggcctggtccaggtggagagcgtcaaccttcaagtggccacctactccaaattccaacctcagagccctgacttcctggacatcaccaaccccaaagccgtattagaaaacgcacttaggaactttgcctgtctgaccaccggggatgtgattgccatcaactataatgaaaagatctacgaactgcgtgtgatggagaccaaacccgacaaggcagtgtccatcattgagtgtgacatgaacgtggactttgatgctcccctgggctacaaagaacccgaaagacaagtccagcatgaggagtcgacagaaggtgaagccgaccacagtggctatgctggagagctgggcttccgcgctttctctggatctggcaatagactggatggaaagaagaaaggggtagagcccagcccctccccaatcaagcctggagatattaaaagaggaattcccaattatgaatttaaacttggatgaagctggaggcagattcgtcgctttctctggagaaggacagtcattgcgtaaaaagggaagaaagccctaagtgaggactgttggctgattggaaaataataaaagaatcatttgcaaca

SEQ ID NO: 197050 - DNA, 596 bp, Homo sapiens
  Payload ID: 18864
  Gene Name: ubiquitin fusion degradation 1 like (yeast)
  ENST ID: ENST00000447868
  CDS Start-End: 118-596
ctctggggcgtaccggcttggcgcggcggcagcggcagcggcggctgggagagcggtcggcggggtttcttcgttgcattgcctgagaggagcggagtctgccaggtggtgtccatcatgatgatgcagaacttactcttggaagaaggcggcctggtccaggtggagagcgtcaaccttcaagtggccacctactccaaattccaacctcagagccctgacttcctggacatcaccaaccccaaagccgtattagaaaacgcacttaggaactttgcctgtctgaccaccggggatgtgattgccatcaactataatgaaaagatctacgaactgcgtgtgatggagaccaaacccgacaaggcagtgtccatcattgagtgtgacatgaacgtggactttgatgctcccctgggctacaaagaacccgaaagacaagtccagcatgaggagtcgacagaaggtgaagccgaccacagtggctatgctggagagctgggcttccgcgctttctctggatctggcaatagactggatggaaagaagaaaggggtagagcccagcccctccccaatcaagcctggagatattaaaag

SEQ ID NO: 197051 - DNA, 670 bp, Homo sapiens
  Payload ID: 18864
  Gene Name: ubiquitin fusion degradation 1 like (yeast)
  ENST ID: ENST00000421968
  CDS Start-End: 101-670
ttggcgcggcggcagcggcagcggcggctgggagagcggtcggcggggtttcttcgttgcattgcctgagaggagcggagtctgccaggtggtgtccatcatgttctctttcaacatgttcgaccaccctattcccagggtcttccaaaaccgcttctccacacagtaccgctgcttctctgtgtccatgctagcagggcctaatgacaggtcagatgtggagaaaggagggaagagccgacttaacattacctatcccatgctgttcaaactgaccaataagaattcggaccgcatgacgcattgtggcgtgctggagtttgtggctgatgagggcatctgctacctcccacactggatgatgcagaacttactcttggaagaaggcggcctggtccaggtggagagcgtcaaccttcaagtggccacctactccaaattccaacctcagagccctgacttcctggacatcaccaaccccaaagccgtattagaaaacgcacttaggaactttgcctgtctgaccaccggggatgtgattgccatcaactataatgaaaagatctacgaactgcgtgtgatggagaccaaacccgacaaggcagtgtccatcattgagtgtgacatgaacgtggactttgatgctcccctgggctacaaagaacccgaa

SEQ ID NO: 197052 - DNA, 293 bp, Homo sapiens
  Payload ID: 18864
  Gene Name: ubiquitin fusion degradation 1 like (yeast)
  ENST ID: ENST00000474226
  CDS Start-End: 86-293
ggcggggtttcttcgttgcattgcctgagaggagcggagtctgccaggtggtgtccatcatggccgacttaacattacctatcccatgctgttcaaactgaccaataagaattcggaccgcatgacgcattgtggcgtgctggagtttgtggctgatgagggcatctgctacctcccacactggatgatgcagaacttactcttggaagaaggcggcctggtccaggtggagagcgtcaaccttcaagtggccacctactccaaattccaacctcagagccctgacttcctgg

SEQ ID NO: 197053 - DNA, 588 bp, Homo sapiens
  Payload ID: 18864
  Gene Name: ubiquitin fusion degradation 1 like (yeast)
  ENST ID: ENST00000494054
  CDS Start-End: 182-588
aagcaggacccttgaccactaaccgcctgtggtcgcgtccgccggtcctgaacgtggctcgcattctgtctcagccggacttgccctccttgacgaaagaaaggaaggtttgtgtccattcacgggtttcccaagtgctggacgcgcaacaggtttccataaacccaaattctctttcaacatgttcgaccaccctattcccagggtcttccaaaaccgcttctccacacagtaccgctgcttctctgtgtccatgctagcagggcctaatgacaggtcagatgtggagaaaggagggaagataattatgccaccctcggccctggaccaactcagccgacttaacattacctatcccatgctgttcaaactgaccaataagaattcggaccgcatgacgcattgtggcgtgctggagtttgtggctgatgagggcatctgctacctcccacactggatgatgcagaacttactcttggaagaaggcggcctggtccaggtggagagcgtcaaccttcaagtggccacctactccaaattccaacctcagagccctgacttcctggacatcaccaaccccaaagccgt

SEQ ID NO: 197054 - DNA, 2570 bp, Homo sapiens
  Payload ID: 18865
  Gene Name: ubiquitin interaction motif containing 1
  Uniprot ID: Q96RL1
  ENST ID: ENST00000377227
  CDS Start-End: 134-2293
gggctcgggatgcggggctgggaccctcccgattccggggcggattccggacgccgggaccggccattactggtgccgggttgggcttctccagatgccggggctgggtccttcccaaggttgagacaaaaggatgccacggagaaagaaaaaagttaaagaagtctccgaatctcggaacctggagaagaaggatgtggaaactaccagttctgtcagtgtgaagaggaagcgtagacttgaggatgcattcattgtgatatccgatagtgatggagaggaaccaaaggaggaaaatgggttgcagaaaacgaagacaaaacagtcgaatagagcaaagtgtttggccaaaagaaaaatcgcacagatgacagaagaagaacagtttgctctggctctcaaaatgagtgagcaggaagctagggaggtgaacagccaggaggaggaagaagaggagctcttgaggaaagccattgctgaaagcctgaatagttgccggccttctgatgcttccgctaccagatctcgacctctggccactggaccgtcttcccagtcccatcaagagaaaaccacagactctgggctcactgaaggcatatggcagctggtacctccatcactgtttaaaggctcacatatcagtcagggaaacgaggctgaggaaagagaggagccttgggaccacactgaaaaaactgaagaggagccggtctctggcagctcaggaagctgggaccagtcaagccagccagtgtttgagaatgtgaacgttaaatcttttgacagatgtactggccactcggctgagcacacacagtgtgggaagccacaggaaagtactgggaggggttctgcttttctcaaagctgtccagggtagcggggacacatctaggcactgtctacctaccctagcagatgccaaaggtctccaggacactgggggcactgtgaactatttctggggtattccattctgccctgatggagtagaccctaaccagtataccaaggtcattctctgccagttggaggtttatcaaaagagcctgaaaatggctcagaggcagctccttaataaaaaaggttttggggaaccagtgttacctagacctccttctctgatccagaatgaatgtggccaaggagagcaggctagtgagaaaaatgaatgcatctcagaagatatgggagatgaagacaaagaggagaggcaggagtctagggcatctgactggcactcaaaaaccaaggatttccaggaaagctcaattaaaagcttgaaagagaaacttttgttggaggaagaaccaacaaccagtcatggtcagtcttcccaagggattgttgaagaaacttctgaagagggaaactctgtacctgcttcacaaagtgttgctgctttgaccagtaagagaagcttagtccttatgccagagagttctgcagaagaaatcactgtttgtcctgagacccagctaagttcctctgaaacttttgaccttgaaagagaagtctctccaggtagcagagatatcttggatggagtcagaataataatggcagataaggaggttggtaacaaggaagatgctgagaaggaagtagctatttctaccttctcatccagtaaccaggtatcctgcccgctatgtgaccaatgctttccacccacaaagattgaacgacatgccatgtactgcaatggtctgatggaggaagatacagtattgactcggagacaaaaagaggccaagaccaagagtgacagtgggacagctgcccagacttctctagacattgacaagaatgagaagtgttacctctgtaaatccctggtcccatttagagagtatcagtgtcatgtggactcctgtctccagcttgcaaaggctgaccaaggagatggacctgaagggagtggaagagcatgttcaactgtggaggggaagtggcagcagaggctgaagaacccaaaggaaaaaggccacagtgaaggccgactccttagtttcttggaacagtctgagcacaagacttcagatgcagacatcaagtcttcagaaacaggagccttcagggtgccttcaccagggatggaagaggcaggctgcagcagagagatgcagagttctttcacacgtcgtgacttaaatgaatctcccgtcaagtcttttgtttccatttcagaagccacagattgcttagtggactttaaaaagcaagttactgtccagccaggtagtcggacacggaccaaagctggcagaggaagaaggagaaaattctgaatttctagggtccaaaagttgacaaaaccattagtaggaggggtgggccatgttcattaagccatagtggtccctagttcattgttgagcaagttttagccctgcagttttcaccaccagcacctacccagcattctggtttttatgttttttatgatctatgcagacaactgtgtattctgttttataacagtttgtttgaatttacttacagttaaaaaatttaaatatatttatgtttgtacgaaatcttatttcaatagatggaaattttaat

SEQ ID NO: 197055 - DNA, 2502 bp, Homo sapiens
  Payload ID: 18865
  Gene Name: ubiquitin interaction motif containing 1
  Uniprot ID: Q96RL1
  ENST ID: ENST00000511320
  CDS Start-End: 111-2270
cggacgcgcgcgcccctccccctccccccgcgctcccaacgtgtggcggctcgcgacccccggcaacccggagaaggtctacagagcggcctgcgccagcgaacaaaaggatgccacggagaaagaaaaaagttaaagaagtctccgaatctcggaacctggagaagaaggatgtggaaactaccagttctgtcagtgtgaagaggaagcgtagacttgaggatgcattcattgtgatatccgatagtgatggagaggaaccaaaggaggaaaatgggttgcagaaaacgaagacaaaacagtcgaatagagcaaagtgtttggccaaaagaaaaatcgcacagatgacagaagaagaacagtttgctctggctctcaaaatgagtgagcaggaagctagggaggtgaacagccaggaggaggaagaagaggagctcttgaggaaagccattgctgaaagcctgaatagttgccggccttctgatgcttccgctaccagatctcgacctctggccactggaccgtcttcccagtcccatcaagagaaaaccacagactctgggctcactgaaggcatatggcagctggtacctccatcactgtttaaaggctcacatatcagtcagggaaacgaggctgaggaaagagaggagccttgggaccacactgaaaaaactgaagaggagccggtctctggcagctcaggaagctgggaccagtcaagccagccagtgtttgagaatgtgaacgttaaatcttttgacagatgtactggccactcggctgagcacacacagtgtgggaagccacaggaaagtactgggaggggttctgcttttctcaaagctgtccagggtagcggggacacatctaggcactgtctacctaccctagcagatgccaaaggtctccaggacactgggggcactgtgaactatttctggggtattccattctgccctgatggagtagaccctaaccagtataccaaggtcattctctgccagttggaggtttatcaaaagagcctgaaaatggctcagaggcagctccttaataaaaaaggttttggggaaccagtgttacctagacctccttctctgatccagaatgaatgtggccaaggagagcaggctagtgagaaaaatgaatgcatctcagaagatatgggagatgaagacaaagaggagaggcaggagtctagggcatctgactggcactcaaaaaccaaggatttccaggaaagctcaattaaaagcttgaaagagaaacttttgttggaggaagaaccaacaaccagtcatggtcagtcttcccaagggattgttgaagaaacttctgaagagggaaactctgtacctgcttcacaaagtgttgctgctttgaccagtaagagaagcttagtccttatgccagagagttctgcagaagaaatcactgtttgtcctgagacccagctaagttcctctgaaacttttgaccttgaaagagaagtctctccaggtagcagagatatcttggatggagtcagaataataatggcagataaggaggttggtaacaaggaagatgctgagaaggaagtagctatttctaccttctcatccagtaaccaggtatcctgcccgctatgtgaccaatgctttccacccacaaagattgaacgacatgccatgtactgcaatggtctgatggaggaagatacagtattgactcggagacaaaaagaggccaagaccaagagtgacagtgggacagctgcccagacttctctagacattgacaagaatgagaagtgttacctctgtaaatccctggtcccatttagagagtatcagtgtcatgtggactcctgtctccagcttgcaaaggctgaccaaggagatggacctgaagggagtggaagagcatgttcaactgtggaggggaagtggcagcagaggctgaagaacccaaaggaaaaaggccacagtgaaggccgactccttagtttcttggaacagtctgagcacaagacttcagatgcagacatcaagtcttcagaaacaggagccttcagggtgccttcaccagggatggaagaggcaggctgcagcagagagatgcagagttctttcacacgtcgtgacttaaatgaatctcccgtcaagtcttttgtttccatttcagaagccacagattgcttagtggactttaaaaagcaagttactgtccagccaggtagtcggacacggaccaaagctggcagaggaagaaggagaaaattctgaatttctagggtccaaaagttgacaaaaccattagtaggaggggtgggccatgttcattaagccatagtggtccctagttcattgttgagcaagttttagccctgcagttttcaccaccagcacctacccagcattctggtttttatgttttttatgatctatgcagacaactgtgtattctgttttataacagtttgtttgaatttacttacagttaaaaaatttaaatata

SEQ ID NO: 197056 - DNA, 249 bp, Homo sapiens
  Payload ID: 18865
  Gene Name: ubiquitin interaction motif containing 1
  ENST ID: ENST00000428382
  CDS Start-End: 155-249
actctccgggaggggcgcttcccgacgccaagtcttactgttgctcaggctggaatgcagtggtgcgctctcggctcactgcaacctctcccttctgggttcaagcgattctcgtgcctcagcctcccaagtagctgggattacagacaaaaggatgccacggagaaagaaaaaagttaaagaagtctccgaatctcggaacctggagaagaaggatgtggaaactaccagttctgtcagtgtgaagag

SEQ ID NO: 197057 - DNA, 1334 bp, Homo sapiens
  Payload ID: 18865
  Gene Name: ubiquitin interaction motif containing 1
  Uniprot ID: Q96RL1
  ENST ID: ENST00000510698
  CDS Start-End: 69-1118
ggaggaggaagaagaggagctcttgaggaaagccattgctgaaagcctgaatagttgccggccttctgatgcttccgctaccagatctcgacctctggccactggaccgtcttcccagtcccatcaagagaaaaccacagactctgggctcactgaagtcttcccaagggattgttgaagaaacttctgaagagggaaactctgtacctgcttcacaaagtgttgctgctttgaccagtaagagaagcttagtccttatgccagagagttctgcagaagaaatcactgtttgtcctgagacccagctaagttcctctgaaacttttgaccttgaaagagaagtctctccaggtagcagagatatcttggatggagtcagaataataatggcagataaggaggttggtaacaaggaagatgctgagaaggaagtagctatttctaccttctcatccagtaaccaggtatcctgcccgctatgtgaccaatgctttccacccacaaagattgaacgacatgccatgtactgcaatggtctgatggaggaagatacagtattgactcggagacaaaaagaggccaagaccaagagtgacagtgggacagctgcccagacttctctagacattgacaagaatgagaagtgttacctctgtaaatccctggtcccatttagagagtatcagtgtcatgtggactcctgtctccagcttgcaaaggctgaccaaggagatggacctgaagggagtggaagagcatgttcaactgtggaggggaagtggcagcagaggctgaagaacccaaaggaaaaaggccacagtgaaggccgactccttagtttcttggaacagtctgagcacaagacttcagatgcagacatcaagtcttcagaaacaggagccttcagggtgccttcaccagggatggaagaggcaggctgcagcagagagatgcagagttctttcacacgtcgtgacttaaatgaatctcccgtcaagtcttttgtttccatttcagaagccacagattgcttagtggactttaaaaagcaagttactgtccagccaggtagtcggacacggaccaaagctggcagaggaagaaggagaaaattctgaatttctagggtccaaaagttgacaaaaccattagtaggaggggtgggccatgttcattaagccatagtggtccctagttcattgttgagcaagttttagccctgcagttttcaccaccagcacctacccagcattctggtttttatgttttttatgatctatgcagacaactgtgtattctgttttataacagtttgtttgaatttacttacagtt

SEQ ID NO: 197058 - DNA, 619 bp, Homo sapiens
  Payload ID: 18865
  Gene Name: ubiquitin interaction motif containing 1
  ENST ID: ENST00000509236
  CDS Start-End: 148-619
gcttattttgctttgctacctctggtacctcagagcgtgtgccgtggattcggaaacctgtcgctgattccgcagcagtgacccccccctcccggagaggctcgtgtggttttggctcatggctctcaccttgctcacgacaaaaggatgccacggagaaagaaaaaagttaaagaagtctccgaatctcggaacctggagaagaaggatgtggaaactaccagttctgtcagtgtgaagaggaagcgtagacttgaggatgcattcattgtgatatccgatagtgatggagaggaaccaaaggaggaaaatgggttgcagaaaacgaagacaaaacagtcgaatagagcaaagtgtttggccaaaagaaaaatcgcacagatgacagaagaagaacagtttgctctggctctcaaaatgagtgagcaggaagctagggaggtgaacagccaggaggaggaagaagaggagctcttgaggaaagccattgctgaaagcctgaatagttgccggccttctgatgcttccgctaccagatctcgacctctggccactggaccgtcttcccagtcccatcaagagaaaaccacagactctgggctcactgaaggcatatggc

SEQ ID NO: 197059 - DNA, 425 bp, Homo sapiens
  Payload ID: 18865
  Gene Name: ubiquitin interaction motif containing 1
  ENST ID: ENST00000507513
  CDS Start-End: 159-425
aacgtgtggcggctcgcgacccccggcaacccggagaaggtctacagagcggcctgcgccagcgagttgaagaaaaaaaacaacaacctaggatcagtttggggagaattgatatgtttactatgttgaagcttccaacctgtgggcatgacaaaaggatgccacggagaaagaaaaaagttaaagaagtctccgaatctcggaacctggagaagaaggatgtggaaactaccagttctgtcagtgtgaagaggaagcgtagacttgaggatgcattcattgtgatatccgatagtgatggagaggaaccaaaggaggaaaatgggttgcagaaaacgaagacaaaacagtcgaatagagcaaagtgtttggccaaaagaaaaatcgcacagatgacagaagaagaacagtttgctctggctctc

SEQ ID NO: 197060 - DNA, 2467 bp, Homo sapiens
  Payload ID: 18865
  Gene Name: ubiquitin interaction motif containing 1
  ENST ID: ENST00000512031
  CDS Start-End: 75-575
caacgtgtggcggctcgcgacccccggcaacccggagaaggtctacagagcggcctgcgccagcgaacaaaaggatgccacggagaaagaaaaaagttaaagaagtctccgaatctcggaacctggagaagaaggatgtggaaactaccagttctgtcagtgtgaagaggaagcgtagacttgaggatgcattcattgtgatatccgatagtgatggagaggaaccaaaggaggaaaatgggttgcagaaaacgaagacaaaacagtcgaatagagcaaagtgtttggccaaaagaaaaatcgcacagatgacagaagaagaacagtttgctctggctctcaaaatgagtgagcaggaagctagggaggtgaacagccaggaggaggaagaagaggagctcttgaggaaagccattgctgaaagcctgaatagttgccggccttctgatgcttccgctaccagatctcgacctctggccactggaccgtcttcccagtcccatcaagagaaaaccacagactctgggctcactgaaggcatgcatatggcagctggtacctccatcactgtttaaaggctcacatatcagtcagggaaacgaggctgaggaaagagaggagccttgggaccacactgaaaaaactgaagaggagccggtctctggcagctcaggaagctgggaccagtcaagccagccagtgtttgagaatgtgaacgttaaatcttttgacagatgtactggccactcggctgagcacacacagtgtgggaagccacaggaaagtactgggaggggttctgcttttctcaaagctgtccagggtagcggggacacatctaggcactgtctacctaccctagcagatgccaaaggtctccaggacactgggggcactgtgaactatttctggggtattccattctgccctgatggagtagaccctaaccagtataccaaggtcattctctgccagttggaggtttatcaaaagagcctgaaaatggctcagaggcagctccttaataaaaaaggttttggggaaccagtgttacctagacctccttctctgatccagaatgaatgtggccaaggagagcaggctagtgagaaaaatgaatgcatctcagaagatatgggagatgaagacaaagaggagaggcaggagtctagggcatctgactggcactcaaaaaccaaggatttccaggaaagctcaattaaaagcttgaaagagaaacttttgttggaggaagaaccaacaaccagtcatggtcagtcttcccaagggattgttgaagaaacttctgaagagggaaactctgtacctgcttcacaaagtgttgctgctttgaccagtaagagaagcttagtccttatgccagagagttctgcagaagaaatcactgtttgtcctgagacccagctaagttcctctgaaacttttgaccttgaaagagaagtctctccaggtagcagagatatcttggatggagtcagaataataatggcagataaggaggttggtaacaaggaagatgctgagaaggaagtagctatttctaccttctcatccagtaaccaggtatcctgcccgctatgtgaccaatgctttccacccacaaagattgaacgacatgccatgtactgcaatggtctgatggaggaagatacagtattgactcggagacaaaaagaggccaagaccaagagtgacagtgggacagctgcccagacttctctagacattgacaagaatgagaagtgttacctctgtaaatccctggtcccatttagagagtatcagtgtcatgtggactcctgtctccagcttgcaaaggctgaccaaggagatggacctgaagggagtggaagagcatgttcaactgtggaggggaagtggcagcagaggctgaagaacccaaaggaaaaaggccacagtgaaggccgactccttagtttcttggaacagtctgagcacaagacttcagatgcagacatcaagtcttcagaaacaggagccttcagggtgccttcaccagggatggaagaggcaggctgcagcagagagatgcagagttctttcacacgtcgtgacttaaatgaatctcccgtcaagtcttttgtttccatttcagaagccacagattgcttagtggactttaaaaagcaagttactgtccagccaggtagtcggacacggaccaaagctggcagaggaagaaggagaaaattctgaatttctagggtccaaaagttgacaaaaccattagtaggaggggtgggccatgttcattaagccatagtggtccctagttcattgttgagcaagttttagccctgcagttttcaccaccagcacctacccagcattctggtttttatgttttttatgatctatgcagacaactgtgtattctgttttataacagtttgtttgaatttacttacagttaaaaaatttaaat

SEQ ID NO: 197061 - DNA, 1945 bp, Homo sapiens
  Payload ID: 18865
  Gene Name: ubiquitin interaction motif containing 1
  Uniprot ID: Q96RL1
  ENST ID: ENST00000506128
  CDS Start-End: 52-1713
cgcggcccgctactctccgggaggggcgcttcccgacgccaagacaaaaggatgccacggagaaagaaaaaagttaaagaagtctccgaatctcggaacctggagaagaaggatgtggaaactaccagttctgtcagtgtgaagaggaagcgtagacttgaggatgcattcattgtgatatccgatagtgatggagaggaaccaaaggaggaaaatgggttgcagaaaacgaagacaaaacagtcgaatagagcaaagtgtttggccaaaagaaaaatcgcacagatgacagaagaagaacagtttgctctggctctcaaaatgagtgagcaggaagctagggaggtgaacagccaggaggaggaagaagaggagctcttgaggaaagccattgctgaaagcctgaatagttgccggccttctgatgcttccgctaccagatctcgacctctggccactggaccgtcttcccagtcccatcaagagaaaaccacagactctgggctcactgaaggcatatggcagctggtacctccatcactgtttaaaggctcacatatcagtcagggaaacgaggctgaggaaagagaggagccttgggaccacactgaaaaaactgaagaggagccggtctctggcagctcaggaagctgggaccagtcaagccagccagtgtttgagaatgtgaacgttaaatcttttgacagatgtactggccactcggctgagcacacacagtgtgggaagccacagtcttcccaagggattgttgaagaaacttctgaagagggaaactctgtacctgcttcacaaagtgttgctgctttgaccagtaagagaagcttagtccttatgccagagagttctgcagaagaaatcactgtttgtcctgagacccagctaagttcctctgaaacttttgaccttgaaagagaagtctctccaggtagcagagatatcttggatggagtcagaataataatggcagataaggaggttggtaacaaggaagatgctgagaaggaagtagctatttctaccttctcatccagtaaccaggtatcctgcccgctatgtgaccaatgctttccacccacaaagattgaacgacatgccatgtactgcaatggtctgatggaggaagatacagtattgactcggagacaaaaagaggccaagaccaagagtgacagtgggacagctgcccagacttctctagacattgacaagaatgagaagtgttacctctgtaaatccctggtcccatttagagagtatcagtgtcatgtggactcctgtctccagcttgcaaaggctgaccaaggagatggacctgaagggagtggaagagcatgttcaactgtggaggggaagtggcagcagaggctgaagaacccaaaggaaaaaggccacagtgaaggccgactccttagtttcttggaacagtctgagcacaagacttcagatgcagacatcaagtcttcagaaacaggagccttcagggtgccttcaccagggatggaagaggcaggctgcagcagagagatgcagagttctttcacacgtcgtgacttaaatgaatctcccgtcaagtcttttgtttccatttcagaagccacagattgcttagtggactttaaaaagcaagttactgtccagccaggtagtcggacacggaccaaagctggcagaggaagaaggagaaaattctgaatttctagggtccaaaagttgacaaaaccattagtaggaggggtgggccatgttcattaagccatagtggtccctagttcattgttgagcaagttttagccctgcagttttcaccaccagcacctacccagcattctggtttttatgttttttatgatctatgcagacaactgtgtattctgttttataacagtttgtttgaatttacttacagttaaaaaatttaaatata

SEQ ID NO: 197062 - DNA, 7761 bp, Homo sapiens
  Payload ID: 18866
  Gene Name: ubiquitin protein ligase E3 component n-recognin 1
  Uniprot ID: Q8IWV7
  ENST ID: ENST00000290650
  CDS Start-End: 80-5329
cctgtctctccgaccggccacaggtttccgcttgcctctggccgggggtcggcaactgcaggcgtcagtttccctcaagatggcggacgaggaggctggaggtactgagaggatggaaatcagcgcggagttaccccagacccctcagcgtctggcatcttggtgggatcagcaagttgatttttatactgctttcttgcatcatttggcacaattggtgccagaaatttactttgctgaaatggacccagacttggaaaagcaggaggaaagtgtacaaatgtcaatattcactccactggaatggtacttatttggagaagatccagatatttgcttagagaaattgaagcacagtggagcatttcagctttgtgggagggttttcaaaagtggagagacaacctattcttgcagggattgtgcaattgatccaacatgtgtactctgtatggactgcttccaggacagtgttcataaaaatcatcgttacaagatgcatacttctactggaggagggttctgtgactgtggagacacagaggcatggaaaactggccctttttgtgtaaatcatgaacctggaagagcaggtactataaaagagaattcacgctgtccgttgaatgaagaggtaattgtccaagccaggaaaatatttccttcagtgataaaatatgtcgtagaaatgactatatgggaagaggaaaaagaactgcctcctgaactccagataagggagaaaaatgaaagatactattgtgtccttttcaatgatgaacaccattcatatgaccacgtcatatacagcctacaaagagctcttgactgtgagctcgcagaggcccagttgcataccactgccattgacaaagagggtcgtcgggctgttaaagcgggagcttatgctgcttgccaggaagcaaaggaagatataaagagtcattcagaaaatgtctctcaacatccacttcatgtagaagtattacactcagagattatggctcatcagaaatttgctttgcgtcttggttcctggatgaacaaaattatgagctattcaagtgactttaggcagatcttttgccaagcatgccttagagaagaacctgactcggagaatccctgtctcataagcaggttaatgctttgggatgcaaagctttataaaggtgcccgtaagatccttcatgaattgatcttcagcagtttttttatggagatggaatacaaaaaactctttgctatggaatttgtgaagtattataaacaactgcagaaagaatatatcagtgatgatcatgacagaagtatctctataactgcactttcagttcagatgtttactgttcctactctggctcgacatcttattgaagagcagaatgttatctctgtcattactgaaactctgctagaagttttacctgagtacttggacaggaacaataaattcaacttccagggttatagccaggacaaattgggaagagtatatgcagtaatatgtgacctaaagtatatcctgatcagcaaacccacaatatggacagaaagattaagaatgcagttccttgaaggttttcgatcttttttgaagattcttacctgtatgcagggaatggaagaaatccgaagacaggttgggcaacacattgaagtggatcctgattgggaggctgccattgctatacagatgcaattgaagaatattttactcatgttccaagagtggtgtgcttgtgatgaagaactcttacttgtggcttataaagaatgtcacaaagctgtgatgaggtgcagtaccagtttcatatctagtagcaagacagtagtacaatcgtgtggacatagtttggaaacaaagtcctacagagtatctgaggatcttgtaagcatacatctgccactctctaggacccttgctggtcttcatgtacgtttaagcaggctgggtgctgtttcaagactgcatgaatttgtgtcttttgaggactttcaagtagaggtactagtggaatatcctttacgttgtctggtgttggttgcccaggttgttgctgagatgtggcgaagaaatggactgtctcttattagccaggtgttttattaccaagatgttaagtgcagagaagaaatgtatgataaagatatcatcatgcttcagattggtgcatctttaatggatcccaataagttcttgttactggtacttcagaggtatgaacttgccgaggcttttaacaagaccatatctacaaaagaccaggatttgattaaacaatataatacactaatagaagaaatgcttcaggtcctcatctatattgtgggtgagcgttatgtacctggagtgggaaatgtgaccaaagaagaggtcacaatgagagaaatcattcacttgctttgcattgaacccatgccacacagtgccattgccaaaaatttacctgagaatgaaaataatgaaactggcttagagaatgtcataaacaaagtggccacatttaagaaaccaggtgtatcaggccatggagtttatgaactaaaagatgaatcactgaaagacttcaatatgtacttttatcattactccaaaacccagcatagcaaggctgaacatatgcagaagaaaaggagaaaacaagaaaacaaagatgaagcattgccgccaccaccacctcctgaattctgccctgctttcagcaaagtgattaaccttctcaactgtgatatcatgatgtacattctcaggaccgtatttgagcgggcaatagacacagattctaacttgtggaccgaagggatgctccaaatggcttttcatattctggcattgggtttactagaagagaagcaacagcttcaaaaagctcctgaagaagaagtaacatttgacttttatcataaggcttcaagattgggaagttcagccatgaatatacaaatgcttttggaaaaactcaaaggaattccccagttagaaggccagaaggacatgataacgtggatacttcagatgtttgacacagtgaagcgattaagagaaaaatcttgtttaattgtagcaaccacatcaggatcggaatctattaagaatgatgagattactcatgataaagaaaaagcagaacgaaaaagaaaagctgaagctgctaggctacatcgccagaagatcatggctcagatgtctgccttacagaaaaacttcattgaaactcataaactcatgtatgacaatacatcagaaatgcctgggaaagaagattccattatggaggaagagagcaccccagcagtcagtgactactctagaattgctttgggtcctaaacggggtccatctgttactgaaaaggaggtgctgacgtgcatcctttgccaagaagaacaggaggtgaaaatagaaaataatgccatggtattatcggcctgtgtccagaaatctactgccttaacccagcacaggggaaaacccatagaactctcaggagaagccctagacccacttttcatggatccagacttggcatatggaacttatacaggaagctgtggtcatgtaatgcacgcagtgtgctggcagaagtattttgaagctgtacagctgagctctcagcagcgcattcatgttgacctttttgacttggaaagtggagaatatctttgccctctttgcaaatctctgtgcaatactgtgatccccattattcctttgcaacctcaaaagataaacagtgagaatgcagatgctcttgctcaacttttgaccctggcacggtggatacagactgttctggccagaatatcaggttataatataagacatgctaaaggagaaaacccaattcctattttctttaatcaaggaatgggagattctactttggagttccattccatcctgagttttggcgttgagtcttcgattaaatattcaaatagcatcaaggaaatggttattctctttgccacaacaatttatagaattggattgaaagtgccacctgatgaaagggatcctcgagtccccatgctgacctggagcacctgcgctttcactatccaggcaattgaaaatctattgggagatgaaggaaaacctctgtttggagcacttcaaaataggcagcataatggtctgaaagcattaatgcagtttgcagttgcacagaggattacctgtcctcaggtcctgatacagaaacatctggttcgtcttctatcagttgttcttcctaacataaaatcagaagatacaccatgccttctgtctatagatctgtttcatgttttggtgggtgctgtgttagcattcccatccttgtattgggatgaccctgttgatctgcagccttcttcagttagttcttcctataaccacctttatctcttccatttgatcaccatggcacacatgcttcagatactacttacagtagacacaggcctaccccttgctcaggttcaagaagacagtgaagaggctcattccgcatcttctttctttgcagaaatttctcaatatacaagtggctccattgggtgtgatattcctggctggtatttgtgggtctcactgaagaatggcatcaccccttatcttcgctgtgctgcattgtttttccactatttacttggggtaactccgcctgaggaactgcataccaattctgcagaaggagagtacagtgcactctgtagctatctatctttacctacaaatttgttcctgctcttccaggaatattgggatactgtaaggcccttgctccagaggtggtgtgcagatcctgccttactaaactgtttgaagcaaaaaaacaccgtggtcaggtaccctagaaaaagaaatagtttgatagagcttcctgatgactatagctgcctcctgaatcaagcttctcatttcaggtgcccacggtctgcagatgatgagcgaaagcatcctgtcctctgccttttctgtggggctatactatgttctcagaacatttgctgccaggaaattgtgaacggggaagaggttggagcttgcatttttcacgcacttcactgtggagccggagtctgcattttcctaaaaatcagagaatgccgagtggtcctggttgaaggtaaagccagaggctgtgcctatccagctccttacttggatgaatatggagaaacagaccctggcctgaagaggggcaacccccttcatttatctcgtgagcggtatcggaagctccatttggtctggcaacaacactgcattatagaagagattgctaggagccaagagactaatcagatgttatttggattcaactggcagttactgtgagctccaactctgcctcaagacaatcacaaatgacgacagtagtaaaggctgattcaaaattatggaaaactttctgagggctgggaaagtattggagggtcttttgctccatgtccaggttcacttacatcaataaaatatttcttaatggagtattgctttcaattagcaaacatatgcttcacaggaaaaaaggacatagatcaatctgttttatgtgctagtatttccaggaatttattccccttcataatttgtctcatttcattttatttcatccacttggtagatgaagtcacgtcaaacagttgtagacattttatatgttggttaactcttctgcaattttgtatttggtgttttccccccaagtttagttcaactgacattggatcactgacaaaattctaataatctgtgatagtcttccttgcagttaaagaagaattgcagaaaccatgcaatatacttgggaaagattccaaaaataaattttttattatttctcttttaaggaaatacccctaatgtgccacctgctgctatcaccacaaattaaactcaatctctatgtggacagaggatgatttctgccaatatggaaaagcttttttctcactgtaggcctcaagaaaagttagggtaatgtatttgttattcattcctgacggtacaaagagcttgcagttctcacctctgactaccagtagctttgttgagttttgaaataatacttgacattttccaaaggcaaatctcattctgcaaggagattgtggcaccatcctgtttgactctcagaaacctcttgtaattctgatgtaaaaactgtagaatgaagatgagaaaattctcgcaatgagtggatcatgacaactgtaaattagaacaatcagatttaaaccaattccgcagtcttctatatctttgtaaaagacaaatccttgatgttgtctgtgtgcaaccttttcataaactctggttttatgactagtacaaaccaccaaaaaagccatgtgatcaatagtctgtgtcctgttataacatgctgtggttgagccatcttgtttataaataatagagctctcctgaatttgtgcatagacttcttggttcctggcttttgttttttgtatcaagagattgtgatataaaacagcagaagataaatggaaaccttccattttaacttacgttgtttctggggtaatgttagaaccttgaaagatgcattcaaagactgtatcttattttgcccttggctattagtgtctcacatatgtgtgtaaatgttttcctaccttctttttgctcagcaaaggcaagcaagtaaaatatatttgctaagtgattagtgatgcacatttggggctagatttttttggtacttttatgtaaagaaaagtggattttgcagtaagggattggcatgagcaggcgtcagaatcacaatcatgattttctacttgaataattacaattcagaaggtatctggataaatagatacatgtctagtgaacaatttgtaacaataacaggtaaggatcaggaaattcagtattcagtttgtcagatttgccagaatgatgaaagtatttgaacatgtgtgtttgtttcttatataattgtattgagtggattgtttgactgggaaatctgggctagaataggaaacagaagatactgacttctaccctaatagatgggccccaatttagcaaagataaactgactttatttttagtcctttttatattaacttaataaattctggagttaggctctcaagaggacagagggactgtctggcaatggccagccagacctttactgccaaagaacccatttcatattgcgttccactgattgagattgattcagatttttgcactgtagatgagcgtatgtctcagtgctgccccaagccccagggatttctcattatgttcaaatgtcctagtgatttaccttaatcattgcaaacaattatgcttatgaagtttacttacaaacaagcaactgagtcactttattttctttagtgtagtatgtgaaggcactggttcaacaggatggctccagaactgtgtttttctaatgtttggtaaggggctagtgagaattttaatgatatggtgaagaaaaatatatctgtataattaatttattatattggtgtatgggctgtgagttcaccttttagtggtcatttgtcatttcataacaactatgcattttggttcactgtgatgatgatctatatttagtgactgcaacatgtttataccactgattcaaattccatccatgatgaagttatacaaataatgcatatattgataacttttattgcaaaaatgtaaatttaaaacttgtataatgttcttgtgctttttaaaataaaatatatgtgtatatttaaaaagaaaaa

SEQ ID NO: 197063 - DNA, 549 bp, Homo sapiens
  Payload ID: 18866
  Gene Name: ubiquitin protein ligase E3 component n-recognin 1
  ENST ID: ENST00000569337
  CDS Start-End: 86-274
gtcgtccctgtctctccgaccggccacaggtttccgcttgcctctggccgggggtcggcaactgcaggcgtcagtttccctcaagatggcggacgaggaggctggaggtactgagaggatggaaatcagcgcggagttaccccagacccctcagcgtctggcatctatggggtctcactgtgttgcccaggctggagtgcagtggcatgatctccgctcactgacctctccctctctgactcaagcaattctcccacctcagcctcccgaatagctgggaccacagtggtgggatcagcaagttgatttttatactgctttcttgcatcatttggcacaattggtgccagaaatttactttgctgaaatggacccagacttggaaaagcaggaggaaagtgtacaaatgtcaatattcactccactggaatggtacttatttggagaagatccagatatttgcttagagaaattgaagcacagtggagcatttcagctttgtgggagggttttcaaaagtggagagacaacctattcttgcagggattg

SEQ ID NO: 197064 - DNA, 721 bp, Homo sapiens
  Payload ID: 18866
  Gene Name: ubiquitin protein ligase E3 component n-recognin 1
  ENST ID: ENST00000569971
  CDS Start-End: 1-219
caacatccacttcatgtagaagtattacactcagagattatggctcatcagaaatttgctttgcgtcttggttcctggatgaacaaaattatgagctattcaagtgactttaggcagatcttttgccaagcatgccttagagaagaacctgactcggagaatccctgtctcataagcaggttaatgctttgggatgcaaagctttataaagtattataaacaactgcagaaagaatatatcagtgatgatcatgacagaagtatctctataactgcactttcagttcagatgtttactgttcctactctggtatatcctgatcagcaaacccacaatatggacagaaagattaagaatgcagttccttgaaggttttcgatcttttttgaagattcttacctgtatgcagggaatggaagaaatccgaagacaggttgggcaacacattgaagtggatcctgattgggaggctgccattgctatacagatgcaattgaagaatattttactcatgttccaagagtggtgtgcttgtgatgaagaactcttacttgtggcttataaagaatgtcacaaagctgtgatgaggtgcagtaccagtttcatatctagtagcaagacagtagtacaatcgtgtggacatagtttggaaacaaagtcctacagagtatctgaggatcttgtaagcatacatctgccactctctaggacccttgctgg

SEQ ID NO: 197065 - DNA, 2250 bp, Homo sapiens
  Payload ID: 18866
  Gene Name: ubiquitin protein ligase E3 component n-recognin 1
  ENST ID: ENST00000569066
  CDS Start-End: 1-447
gttgcccaggttgttgctgagatgtggcgaagaaatggactgtctcttattagccaggtgttttattaccaagatgttaagtgcagagaagaaatgtatgataaagatatcatcatgcttcagattggtgcatctttaatggatcccaataagttcttgttactggtacttcagaggtatgaacttgccgaggcttttaacaagaccatatctacaaaagaccaggatttgattaaacaatataatacactaatagaagaaatgcttcaggtcctcatctatattgtgggtgagcgttatgtacctggagtgggaaatgtgaccaaagaagaggtcacaatgagagaaatcattcacttgctttgcattgaacccatgccacacagtgccattgccaaaaatttacctgagaatgaaaccaggtgtatcaggccatggagtttatgaactaaaagatgaatcactgaaagacttcaatatgtacttttatcattactccaaaacccagcatagcaaggtagaaaaaagtatccttttcagtaaataaacctaaatgctttatgctttctaactccacagaaaattttctgctttttctatagtttcacgctggttcttattaatagaggtcattatgtcacccaagaattaaaattgaatcaataatcttatctagtatacaggcaatattcagattttcctgattatactacatatgtctttaatagctgttttgggaagaggattcaatcaagcatcatggacttcatcatcacacactcatttgattgtcatgtttctttagtttttgttttgttttgttttttgtttttgtttttgttttgtgaaatggagcctcactctgttgtccaggctggaacgtagttgcacgatatcagctcactgcaacctccacctcccaggttcaagtgattctcctgccccagcatcctgagtagctgggactataggcacatgccaccatgcctggctaatttttgtatttttagtaaagaccgggtttcaccatgttgtccaggctggtctcaaattcctgacctcaaatgattccacccacctcggcctcccaacgtcctgggattacaggcgtgagccacctcgcccggccaatagtttcctttaatttagaagataattcttttgcatttttttcttttgtaacatcggcatttctatagagtaccaaatagattcagcttaaacagtttttggcaagaatactatgtaaatgatatattgcatcccattattaggcacatacgtctttttgtcccatgaaggatcatgttaagtttgatcagttagttaaggtgatgtctggctttgtccttatcaagtaaatactttacagcccatagcatagtaccctgtgcataataggtactgggtaaatattttcagtagaaaataatggagactaagtttttgatcagggatattcctcatctattttgcattaggtttctctagaacacaattttatttctaggacaaagaggcattttgaatacatgcttcagtatataaagtattttaataggtggttgggtctttcctgactgctttaatgtatttcatttgtttcatgcttccaaagcagtatatttaatgatagatttttttataggctgaacatatgcagaagaaaaggagaaaacaagaaaacaaagatgaaggtaaaaacattgccgccaccaccacctcctgaattctgccctgctttcagcaaagtgattaaccttctcaactgtgatatcatgatgtacattctcaggaccgtatttgagcgggcaatagacacagattctaacttgtggaccgaagggatgctccaaatggcttttcatattctggcattgggtttactagaagagaagcaacagcttcaaaaagctcctgaagaagaagtaacatttgacttttatcataaggcttcaagattgggaagttcagccatgaatatacaaatgcttttggaaaaactcaaaggaattccccagttagaaggccagaaggacatgataacgtggatacttcaggtaaactaaaaaagtaaagtgatcatatcttggtttaaatatttaagaattctctgcttgcctccagtgttaaaccactgtaccattgtagacatttactactggttttcataatcacttatttttcatgttaataattctattttcctatattttattgtagttttaaaaataaactaagatttattca

SEQ ID NO: 197066 - DNA, 545 bp, Homo sapiens
  Payload ID: 18866
  Gene Name: ubiquitin protein ligase E3 component n-recognin 1
  ENST ID: ENST00000563239
  CDS Start-End: 67-162
ccggccacaggtttccgcttgcctctggccgggggtcggcaactgcaggcgtcagtttccctcaagatggcggacgaggaggctggaggtactgagaggatggaaatcagcgcggagttaccccagacccctcagcgtctggcatctggattgtgcaattgatccaacatgtgtactctgtatggactgcttccaggacagtgttcataaaaatcatcgttacaagatgcatacttctactggaggagggttctgtgactgtggagacacagaggcatggaaaactggccctttttgtgtaaatcatgaacctggaagagcaggtactataaaagagaattcacgctgtccgttgaatgaagagggaatggaagaaatccgaagacaggttgggcaacacattgaagtggatcctgattgggaggctgccattgctatacagatgcaattgaagaatattttactcatgttccaagagtggtgtgcttgtgatgaagaactcttacttgtggcttataaagaatgtcacaaagctgtgatgaggt

SEQ ID NO: 197067 - DNA, 702 bp, Homo sapiens
  Payload ID: 18866
  Gene Name: ubiquitin protein ligase E3 component n-recognin 1
  ENST ID: ENST00000569243
  CDS Start-End: 1-517
gaaaccaggtgtatcaggccatggagtttatgaactaaaagatgaatcactgaaagacttcaatatgtacttttatcattactccaaaacccagcatagcaaggctgaacatatgcagaagaaaaggagaaaacaagaaaacaaagatgaagcattgccgccaccaccacctcctgaattctgccctgctttcagcaaagtgattaaccttctcaactgtgatatcatgatgtacattctcaggaccgtatttgagcgggcaatagacacagattctaacttgtggaccgaagggatgctccaaatggcttttcatattctggcattgggtttactagaagagaagcaacagcttcaaaaagctcctgaagaagaagtaacatttgacttttatcataaggcttcaagattgggaagttcagccatgaatatacaaatgcttttggaaaaactcaaaggaattccccagttagaaggccagaaggacatgataacgtggatacttcaggtaaactaaaaaagtaaagtgatcatatcttggtttaaatatttaagaattctctgcttgcctccagtgttaaaccactgtaccattgtagacatttactactggttttcataatcacttatttttcatgttaataattctattttcctatattttattgtagttttaaaaataaactaagatttattcatttt

SEQ ID NO: 197068 - DNA, 735 bp, Homo sapiens
  Payload ID: 18866
  Gene Name: ubiquitin protein ligase E3 component n-recognin 1
  ENST ID: ENST00000564540
  CDS Start-End: 1-214
gaatgtcataaacaaagtggccacatttaagaaaccaggtgtatcaggccatggagtttatgaactaaaagatgaatcactgaaagacttcaatatgtacttttatcattactccaaaacccagcatagcaaggctgaacatatgcagaagaaaaggagaaaacaagaaaacaaagatgaaggtaaaaacattgccgccaccaccacctcctgaattctgccctgctttcagcaaagtgattaaccttctcaactgtgatatcatgatgtacattctcaggaccgtatttgagcgggcaatagacacagattctaacttgtggaccgaagggatgctccaaatggcttttcatattctggcattgggtttactagaagagaagcaacagcttcaaaaagctcctgaagaagaagtaacatttgacttttatcataaggcttcaagattgggaagttcagccatgaatatacaaatgcttttggaaaaactcaaaggaattccccagttagaaggccagaaggacatgataacgtggatacttcaggtaaactaaaaaagtaaagtgatcatatcttggtttaaatatttaagaattctctgcttgcctccagtgttaaaccactgtaccattgtagacatttactactggttttcataatcacttatttttcatgttaataattctattttcctatattttattgtagttttaaaaataaactaagatttattca

SEQ ID NO: 197069 - DNA, 3332 bp, Homo sapiens
  Payload ID: 18866
  Gene Name: ubiquitin protein ligase E3 component n-recognin 1
  ENST ID: ENST00000546274
  CDS Start-End: 92-3304
aaaagtgtcgtccctgtctctccgaccggccacaggtttccgcttgcctctggccgggggtcggcaactgcaggcgtcagtttccctcaagatggcggacgaggaggctggaggtactgagaggatggaaatcagcgcggagttaccccagacccctcagcgtctggcatcttggtgggatcagcaagttgatttttatactgctttcttgcatcatttggcacaattggtgccagaaatttactttgctgaaatggacccagacttggaaaagcaggaggaaagtgtacaaatgtcaatattcactccactggaatggtacttatttggagaagatccagatatttgcttagagaaattgaagcacagtggagcatttcagctttgtgggagggttttcaaaagtggagagacaacctattcttgcagggattgtgcaattgatccaacatgtgtactctgtatggactgcttccaggacagtgttcataaaaatcatcgttacaagatgcatacttctactggaggagggttctgtgactgtggagacacagaggcatggaaaactggccctttttgtgtaaatcatgaacctggaagagcaggtactataaaagagaattcacgctgtccgttgaatgaagaggtaattgtccaagccaggaaaatatttccttcagtgataaaatatgtcgtagaaatgactatatgggaagaggaaaaagaactgcctcctgaactccagataagggagaaaaatgaaagatactattgtgtccttttcaatgatgaacaccattcatatgaccacgtcatatacagcctacaaagagctcttgactgtgagctcgcagaggcccagttgcataccactgccattgacaaagagggtcgtcgggctgttaaagcgggagcttatgctgcttgccaggaagcaaaggaagatataaagagtcattcagaaaatgtctctcaacatccacttcatgtagaagtattacactcagagattatggctcatcagaaatttgctttgcgtcttggttcctggatgaacaaaattatgagctattcaagtgactttaggcagatcttttgccaagcatgccttagagaagaacctgactcggagaatccctgtctcataagcaggttaatgctttgggatgcaaagctttataaaggtgcccgtaagatccttcatgaattgatcttcagcagtttttttatggagatggaatacaaaaaactctttgctatggaatttgtgaagtattataaacaactgcagaaagaatatatcagtgatgatcatgacagaagtatctctataactgcactttcagttcagatgtttactgttcctactctggctcgacatcttattgaagagcagaatgttatctctgtcattactgaaactctgctagaagttttacctgagtacttggacaggaacaataaattcaacttccagggttatagccaggacaaattgggaagagtatatgcagtaatatgtgacctaaagtatatcctgatcagcaaacccacaatatggacagaaagattaagaatgcagttccttgaaggttttcgatcttttttgaagattcttacctgtatgcagggaatggaagaaatccgaagacaggttgggcaacacattgaagtggatcctgattgggaggctgccattgctatacagatgcaattgaagaatattttactcatgttccaagagtggtgtgcttgtgatgaagaactcttacttgtggcttataaagaatgtcacaaagctgtgatgaggtgcagtaccagtttcatatctagtagcaagacagtagtacaatcgtgtggacatagtttggaaacaaagtcctacagagtatctgaggatcttgtaagcatacatctgccactctctaggacccttgctggtcttcatgtacgtttaagcaggctgggtgctgtttcaagactgcatgaatttgtgtcttttgaggactttcaagtagaggtactagtggaatatcctttacgttgtctggtgttggttgcccaggttgttgctgagatgtggcgaagaaatggactgtctcttattagccaggtgttttattaccaagatgttaagtgcagagaagaaatgtatgataaagatatcatcatgcttcagattggtgcatctttaatggatcccaataagttcttgttactggtacttcagaggtatgaacttgccgaggcttttaacaagaccatatctacaaaagaccaggatttgattaaacaatataatacactaatagaagaaatgcttcaggtcctcatctatattgtgggtgagcgttatgtacctggagtgggaaatgtgaccaaagaagaggtcacaatgagagaaatcattcacttgctttgcattgaacccatgccacacagtgccattgccaaaaatttacctgagaatgaaaataatgaaactggcttagagaatgtcataaacaaagtggccacatttaagaaaccaggtgtatcaggccatggagtttatgaactaaaagatgaatcactgaaagacttcaatatgtacttttatcattactccaaaacccagcatagcaaggctgaacatatgcagaagaaaaggagaaaacaagaaaacaaagatgaagcattgccgccaccaccacctcctgaattctgccctgctttcagcaaagtgattaaccttctcaactgtgatatcatgatgtacattctcaggaccgtatttgagcgggcaatagacacagattctaacttgtggaccgaagggatgctccaaatggcttttcatattctggcattgggtttactagaagagaagcaacagcttcaaaaagctcctgaagaagaagtaacatttgacttttatcataaggcttcaagattgggaagttcagccatgaatatacaaatgcttttggaaaaactcaaaggaattccccagttagaaggccagaaggacatgataacgtggatacttcagatgtttgacacagtgaagcgattaagagaaaaatcttgtttaattgtagcaaccacatcaggatcggaatctattaagaatgatgagattactcatgataaagaaaaagcagaacgaaaaagaaaagctgaagctgctaggctacatcgccagaagatcatggctcagatgtctgccttacagaaaaacttcattgaaactcataaactcatgtatgacaatacatcagaaatgcctgggaaagaagattccattatggaggaagagaggtaaaataaagcaaaccaaaaattaccaactc

SEQ ID NO: 197070 - DNA, 189 bp, Homo sapiens
  Payload ID: 18866
  Gene Name: ubiquitin protein ligase E3 component n-recognin 1
  ENST ID: ENST00000627960
  CDS Start-End: 1-189
atggcggacgaggaggctggaggtactgagaggatggaaatcagcgcggagttaccccagacccctcagcgtctggcatctatggggtctcactgtgttgcccaggctggagtgcagtggcatgatctccgctcactgacctctccctctctgactcaagcaattctcccacctcagcctcccgaatag

SEQ ID NO: 197071 - DNA, 7857 bp, Homo sapiens
  Payload ID: 18867
  Gene Name: ubiquitin protein ligase E3 component n-recognin 2
  Uniprot ID: Q8IWV8
  ENST ID: ENST00000372899
  CDS Start-End: 259-5526
ttctgtgtccttccctgggtcagggacgagccagtgacttgactcttgggcgctaagcttgggagggagcgcaggaggccgctgtccttcctttccggttcacgtcacccttctctccctctgttgctccacctgcagccacttggacggctccgggactgattgcctggggcaggggtggcagtcgaggccgccggggccgaggtgaggctgcagctctccgggcggcggtagcgctggggaggaggaggagagaagatggcgtcggagctagagccagaggtgcaggccatcgaccggagcttgctggaatgttcggccgaggagattgcggggaaatggctgcaagcaactgacctcactagagaagtgtaccagcatttagcccactatgtacccaaaatctactgcaggggtcccaacccttttccacagaaagaagacatgctggcacagcatgttttgttgggaccaatggaatggtacctttgtggtgaagatcctgcatttggatttccaaaacttgagcaagcaaacaaaccttctcatctttgtggtcgtgtttttaaagtaggagagcctacatattcttgcagagactgtgcagttgatccaacttgtgttttgtgcatggagtgctttttgggaagtattcacagagatcatcgatataggatgacaacatcaggaggtggaggtttctgtgactgtggtgatactgaagcctggaaagagggtccttactgtcaaaaacatgaacttaacacctctgaaattgaggaagaagaggatcctcttgttcatttatcagaagatgtgatagcaagaacttataacatttttgctattacgtttcggtatgcagtagaaatattaacctgggaaaaagaaagtgaattgccagcagatttagagatggtagagaagagtgacacctactattgcatgctgtttaatgatgaggttcacacctatgaacaagttatttatactcttcagaaagctgttaactgtacacaaaaagaagctattggttttgcaactacagtagatcgagatgggcgtaggtctgttcgatatggagattttcagtattgtgagcaagcaaaatcagtaattgtgagaaataccagtagacagacaaagccactcaaagttcaagttatgcattcgtctattgtcgcacatcagaattttggtttgaaacttttgtcttggctgggaagtattattggatattcagatggccttcgccggattttatgtcaagttggtttacaagaagggccagatggtgaaaactcttctctagtggacagactgatgcttagtgattccaaattatggaaaggtgctaggagtgtatatcatcagttgttcatgagcagtctgcttatggatttgaaatacaagaaactatttgctgttcgatttgcaaaaaattaccagcagttgcagagagattttatggaggatgatcacgagcgagcagtgtcggtgactgctctatctgtccagttcttcaccgcacctactctggctcgaatgctcatcacagaagaaaacttaatgagcattatcattaagacttttatggatcatttgagacatcgagatgcccagggcagatttcagtttgaacgatacactgctttacaagccttcaaatttaggagagtacagagccttattttagatctcaagtatgtgttaattagcaaaccaactgaatggtcagatgagctgaggcagaagttcctagaagggtttgatgcctttttggaattactaaaatgtatgcagggaatggatccaattacacgtcaagtaggacaacatattgaaatggaaccagagtgggaagcagccttcacactacaaatgaaattaacacatgtcatttcaatgatgcaggactggtgtgcttcagatgaaaaagtgttaatcgaagcttacaagaaatgtctcgctgtactgatgcagtgtcatggtggttatactgatggtgaacagccaatcacactaagcatttgtggacattcagtggaaactatcagatactgtgtttcccaagaaaaagttagcattcacctcccagtttctcgcttacttgcaggtttacatgtattattaagcaaaagtgaagtggcatataaatttccagagctcctacctctaagtgaacttagcccacccatgttgatagaacaccctcttagatgtcttgttctgtgtgcccaagtacatgccggaatgtggagaagaaatgggttctctctagtaaaccagatttattactaccataatgtgaaatgcagacgtgagatgtttgacaaggatgtagtaatgcttcagacaggtgtctccatgatggatccaaatcatttcctgatgatcatgctcagccgctttgaactttatcagattttcagtactccagactatggaaaaagatttagttctgagattacccataaggatgttgttcagcagaacaatactctaatagaagaaatgctatacctcattataatgcttgttggagagagatttagtcctggagttggacaggtaaatgctacagatgaaatcaagcgagagattatccatcagttgagtatcaagcctatggctcatagtgaattggtaaagtctttacctgaagatgagaacaaggagactggcatggagagtgtaatcgaagcagttgcccatttcaagaaacctggattaacaggacgaggcatgtatgaactgaaaccagaatgtgccaaagagttcaacttgtatttctatcacttttcaagggcagaacagtccaaggcagaagaagcgcaacggaaattgaaaagacaaaatagagaagatacagcactcccacctccggtgttgcctccattctgccctctgtttgcaagcctggttaacattttgcagtcagatgtcatgttgtgcatcatgggaacaattctgcaatgggctgtggaacataatggatatgcctggtcagagtccatgctgcaaagggtgttacatttaattggcatggcactacaagaagaaaaacaacatttagagaatgtcacggaagagcatgtagtaacatttaccttcactcagaagatatcaaaacctggtgaagcgccaaaaaattctcctagcatactagctatgctggaaacactacaaaatgctccctacctagaagtccacaaagacatgattcggtggatattgaagacttttaatgctgttaaaaagatgagggagagttcacctaccagtcccgtggcagagacagaaggaaccataatggaagagagttcaagggacaaagacaaagctgagaggaagagaaaagcagagattgccagactgcgcagagaaaagatcatggctcagatgtctgaaatgcagcggcattttattgatgaaaacaaagaactctttcagcagacattagaactggatgcctcaacctctgctgttcttgatcatagccctgtggcttcagatatgacacttacagcactgggccccgcacaaactcaggttcctgaacaaagacaattcgttacatgtatattgtgtcaagaggagcaagaagttaaagtggaaagcagggcaatggtcttggcagcatttgttcagagatcaactgtattatcaaaaaacagaagtaaatttattcaagatccagaaaaatatgatccattattcatgcaccctgatctgtcttgtggaacacacactagtagctgtgggcacattatgcatgcccattgttggcaaaggtattttgattccgttcaagctaaagaacagcgaaggcaacagagattacgcttacatacgagctatgatgtagaaaacggagaattcctttgccccctttgtgaatgcttgagtaatactgttattcctctgctgcttcctccaagaaatatttttaacaacaggttaaatttttcagaccaaccaaatctgactcagtggattagaacaatatctcagcaaataaaagcattacagtttcttaggaaagaagaaagtactcctaataatgcctctacaaagaattcagaaaatgtggatgaattacagctccctgaagggttcaggcctgattttcgtcctaagatcccttattctgagagcataaaagaaatgctaacgacatttggaactgctacctacaaggtgggactaaaggttcatcccaatgaagaggatcctcgtgttcccataatgtgttggggtagctgcgcgtacaccatccaaagcatagaaagaattttgagtgatgaagataaaccattgtttggtcctttaccttgcagactggatgactgtcttaggtcattgacgagatttgccgcagcacactggacagtggcatcagtttcagtggtgcaaggacatttttgtaaactttttgcatcactggtgcctaatgacagccatgaggaacttccatgcatattagatattgacatgtttcatttattggtgggcttggtgcttgcatttcctgcgttgcagtgtcaggatttttcagggatcagccttggcactggagaccttcacattttccatctggttactatggcacacatcatacagatcttacttacctcatgtacagaagagaatggcatggatcaagaaaatcccccttgtgaagaagaatcagcagttcttgctttgtataaaacacttcaccagtatacgggaagtgccttgaaagaaataccatccggctggcatctgtggaggagtgtcagagctggaatcatgcctttcctgaagtgttctgctttattttttcattacttaaatggagttccttccccacccgacattcaagttcctggaacaagccattttgaacatttatgtagctatctttccctaccaaacaacctcatttgcctttttcaagaaaatagtgagataatgaattcactgattgaaagttggtgccgtaacagtgaagttaaaagatatctagaaggtgaaagagatgctataagatatccaagagaatctaacaaattaataaaccttccagaggattacagcagcctcattaatcaagcatccaatttctcgtgcccgaaatcaggtggtgataagagcagagccccaactctgtgccttgtgtgcggatctctgctgtgctcccagagttactgctgccagactgaactggaaggggaggatgtaggagcctgcacagctcacacctactcctgtggctctggagtgggcatcttcctgagagtacgggaatgtcaggtgctatttttagctggcaaaaccaaaggctgtttttattctcctccttaccttgatgactatggggagaccgaccagggactcagacggggaaatcctttacatttatgcaaagagcgattcaagaagattcagaagctctggcaccaacacagtgtcacagaggaaattggacatgcacaggaagccaatcagacactggttggcattgactggcaacatttataattattgcaccaccaaaaaacacaaacttggatttttttaacccagttggctttttaagaaagaaagaagttctgctgaatttggaaataaattctttatttaaactttccttcccagttttatagtttctggttctgaggactgatgaaaatcatcttccatcagcagattttcttgcactgtttgctgtgcccctcaaatataatgtcttgggttttaagatcgagcaaggagcttctcttcctagattggatcccagcccctttgtgggggtctgactgcatagtcccagccattatgtgatatttcacgttattgatgatagtgaaccgtgggtccgaagctgactcaacggaggcagggaacaaagtctctgtggtctgttgggtcatacttcctggttccactgagtggcccaacactgggactgggttggtgtcccctctgctgacaggaccctactcctaggagcaaagtggttgattttgaaggcagtgttcccttctctccattgactatgagagagttgggggacacacatgcagaagaagcccgtggggagaaggtggattcctggtgtgctggctggtttttcagggctgttagaggttttttttttttctttttttttttatggcaagacttttggctttgagaaaactcacttagagggctttccaaaaacttaggatggtctaaaaaattaggatattcttttagaattaggaagaaaaattaggatattctaaaagaatatggattaaaaatttaggatattcttttagatatcctaatatctagatgagaggccttccttcataagatctggttgtttgggctgtggttggcataagtgatatttattttggcctctgtcacatccagtttcttgagcttttaaggtaagcttcttttggctttttttcagatgttcaccaagcttaagtttaaaataataggtattctaaaagagtatcctaattttcttatctgtattcttttagaataccctaatgtttcagacagtgatattctcttgttatttctaaggctaaattggcagagtatatcatctaaagccaaacactgaagaaggtgagaacccactcccacccagccagcatttcctggaacagacaagctgctgcttccttgctggctcacttagtgcattcctgggatggtctggcacccaggctttttattctttttgatcattgttcttactgaggtgccttcctagaacaagagccacttacaaaatagcttataattattatgtaccacacaactactattgtttgatgtatgactgctgagagcttgaatacatgcagagagtgactgaagacttagtagaggaataaattctgagcctgtctaaggtggggctaaggaacagatgagtaataagaggctcttggatttttttaaccaatgcaactgaccctttcaatcagttttctttgaattacatctacaagttttgttccactcagctaccagtcaactaggcatgctccacagtatcacaggaagaaggtcagaaatctggaactgaagctaaaagaagtgaggatgtagaagccacattcctctccaaggtagtgtgtgaaagaaccgccccctcttgacaggaggatgaccgtcgccattcttgcgtgggactgactcacccagctgagaggaggaccaatagaaagaaaattcacatttgagtccacctctctccccctttttctggccttcattcataagatctggttgtttgggctgtaggtggcataattcatgtttattttggcctctgtcacatccagtttctttagcttttaaggtaagcttcttttggctttttttcatatgttcaccaagctaaaatttaaaataataagaccaggtttctctctgtacaagtggattataaacattttcaccaaatcataacaatactccagctttccggtccgacttcctaggagcctggagttagcaaaggttgtctctggatttcattctctgagaatatcacagagcctgggagaagatgaatttacatgaaattgcaacatacacacctttttattttctggtgttaagctagttgtctttcctaccttacaaatcatgttagttttatgatttgttccgcatgttttatgtttattgtagaaatgtttatataacatacgctttccatatcagggaaaatcatatctgtttaataaattggctataactttaatatctgtggacaacttgtaaaatttggaatgtatcatatgtaaaaagtttaaagatatccaaataaatgctttaggtgttggcatt

SEQ ID NO: 197072 - DNA, 7857 bp, Homo sapiens
  Payload ID: 18867
  Gene Name: ubiquitin protein ligase E3 component n-recognin 2
  Uniprot ID: Q8IWV8
  ENST ID: ENST00000372901
  CDS Start-End: 259-5526
ttctgtgtccttccctgggtcagggacgagccagtgacttgactcttgggcgctaagcttgggagggagcgcaggaggccgctgtccttcctttccggttcacgtcacccttctctccctctgttgctccacctgcagccacttggacggctccgggactgattgcctggggcaggggtggcagtcgaggccgccggggccgaggtgaggctgcagctctccgggcggcggtagcgctggggaggaggaggagagaagatggcgtcggagctagagccagaggtgcaggccatcgaccggagcttgctggaatgttcggccgaggagattgcggggaaatggctgcaagcaactgacctcactagagaagtgtaccagcatttagcccactatgtacccaaaatctactgcaggggtcccaacccttttccacagaaagaagacatgctggcacagcatgttttgttgggaccaatggaatggtacctttgtggtgaagatcctgcatttggatttccaaaacttgagcaagcaaacaaaccttctcatctttgtggtcgtgtttttaaagtaggagagcctacatattcttgcagagactgtgcagttgatccaacttgtgttttgtgcatggagtgctttttgggaagtattcacagagatcatcgatataggatgacaacatcaggaggtggaggtttctgtgactgtggtgatactgaagcctggaaagagggtccttactgtcaaaaacatgaacttaacacctctgaaattgaggaagaagaggatcctcttgttcatttatcagaagatgtgatagcaagaacttataacatttttgctattacgtttcggtatgcagtagaaatattaacctgggaaaaagaaagtgaattgccagcagatttagagatggtagagaagagtgacacctactattgcatgctgtttaatgatgaggttcacacctatgaacaagttatttatactcttcagaaagctgttaactgtacacaaaaagaagctattggttttgcaactacagtagatcgagatgggcgtaggtctgttcgatatggagattttcagtattgtgagcaagcaaaatcagtaattgtgagaaataccagtagacagacaaagccactcaaagttcaagttatgcattcgtctattgtcgcacatcagaattttggtttgaaacttttgtcttggctgggaagtattattggatattcagatggccttcgccggattttatgtcaagttggtttacaagaagggccagatggtgaaaactcttctctagtggacagactgatgcttagtgattccaaattatggaaaggtgctaggagtgtatatcatcagttgttcatgagcagtctgcttatggatttgaaatacaagaaactatttgctgttcgatttgcaaaaaactatgagcgtttgcagagtgattatgtgacagatgaccacgacagagagttttcagtcgcagacctctcggttcagatattcacggttccttcacttgctcgaatgctcatcacagaagaaaacttaatgagcattatcattaagacttttatggatcatttgagacatcgagatgcccagggcagatttcagtttgaacgatacactgctttacaagccttcaaatttaggagagtacagagccttattttagatctcaagtatgtgttaattagcaaaccaactgaatggtcagatgagctgaggcagaagttcctagaagggtttgatgcctttttggaattactaaaatgtatgcagggaatggatccaattacacgtcaagtaggacaacatattgaaatggaaccagagtgggaagcagccttcacactacaaatgaaattaacacatgtcatttcaatgatgcaggactggtgtgcttcagatgaaaaagtgttaatcgaagcttacaagaaatgtctcgctgtactgatgcagtgtcatggtggttatactgatggtgaacagccaatcacactaagcatttgtggacattcagtggaaactatcagatactgtgtttcccaagaaaaagttagcattcacctcccagtttctcgcttacttgcaggtttacatgtattattaagcaaaagtgaagtggcatataaatttccagagctcctacctctaagtgaacttagcccacccatgttgatagaacaccctcttagatgtcttgttctgtgtgcccaagtacatgccggaatgtggagaagaaatgggttctctctagtaaaccagatttattactaccataatgtgaaatgcagacgtgagatgtttgacaaggatgtagtaatgcttcagacaggtgtctccatgatggatccaaatcatttcctgatgatcatgctcagccgctttgaactttatcagattttcagtactccagactatggaaaaagatttagttctgagattacccataaggatgttgttcagcagaacaatactctaatagaagaaatgctatacctcattataatgcttgttggagagagatttagtcctggagttggacaggtaaatgctacagatgaaatcaagcgagagattatccatcagttgagtatcaagcctatggctcatagtgaattggtaaagtctttacctgaagatgagaacaaggagactggcatggagagtgtaatcgaagcagttgcccatttcaagaaacctggattaacaggacgaggcatgtatgaactgaaaccagaatgtgccaaagagttcaacttgtatttctatcacttttcaagggcagaacagtccaaggcagaagaagcgcaacggaaattgaaaagacaaaatagagaagatacagcactcccacctccggtgttgcctccattctgccctctgtttgcaagcctggttaacattttgcagtcagatgtcatgttgtgcatcatgggaacaattctgcaatgggctgtggaacataatggatatgcctggtcagagtccatgctgcaaagggtgttacatttaattggcatggcactacaagaagaaaaacaacatttagagaatgtcacggaagagcatgtagtaacatttaccttcactcagaagatatcaaaacctggtgaagcgccaaaaaattctcctagcatactagctatgctggaaacactacaaaatgctccctacctagaagtccacaaagacatgattcggtggatattgaagacttttaatgctgttaaaaagatgagggagagttcacctaccagtcccgtggcagagacagaaggaaccataatggaagagagttcaagggacaaagacaaagctgagaggaagagaaaagcagagattgccagactgcgcagagaaaagatcatggctcagatgtctgaaatgcagcggcattttattgatgaaaacaaagaactctttcagcagacattagaactggatgcctcaacctctgctgttcttgatcatagccctgtggcttcagatatgacacttacagcactgggccccgcacaaactcaggttcctgaacaaagacaattcgttacatgtatattgtgtcaagaggagcaagaagttaaagtggaaagcagggcaatggtcttggcagcatttgttcagagatcaactgtattatcaaaaaacagaagtaaatttattcaagatccagaaaaatatgatccattattcatgcaccctgatctgtcttgtggaacacacactagtagctgtgggcacattatgcatgcccattgttggcaaaggtattttgattccgttcaagctaaagaacagcgaaggcaacagagattacgcttacatacgagctatgatgtagaaaacggagaattcctttgccccctttgtgaatgcttgagtaatactgttattcctctgctgcttcctccaagaaatatttttaacaacaggttaaatttttcagaccaaccaaatctgactcagtggattagaacaatatctcagcaaataaaagcattacagtttcttaggaaagaagaaagtactcctaataatgcctctacaaagaattcagaaaatgtggatgaattacagctccctgaagggttcaggcctgattttcgtcctaagatcccttattctgagagcataaaagaaatgctaacgacatttggaactgctacctacaaggtgggactaaaggttcatcccaatgaagaggatcctcgtgttcccataatgtgttggggtagctgcgcgtacaccatccaaagcatagaaagaattttgagtgatgaagataaaccattgtttggtcctttaccttgcagactggatgactgtcttaggtcattgacgagatttgccgcagcacactggacagtggcatcagtttcagtggtgcaaggacatttttgtaaactttttgcatcactggtgcctaatgacagccatgaggaacttccatgcatattagatattgacatgtttcatttattggtgggcttggtgcttgcatttcctgcgttgcagtgtcaggatttttcagggatcagccttggcactggagaccttcacattttccatctggttactatggcacacatcatacagatcttacttacctcatgtacagaagagaatggcatggatcaagaaaatcccccttgtgaagaagaatcagcagttcttgctttgtataaaacacttcaccagtatacgggaagtgccttgaaagaaataccatccggctggcatctgtggaggagtgtcagagctggaatcatgcctttcctgaagtgttctgctttattttttcattacttaaatggagttccttccccacccgacattcaagttcctggaacaagccattttgaacatttatgtagctatctttccctaccaaacaacctcatttgcctttttcaagaaaatagtgagataatgaattcactgattgaaagttggtgccgtaacagtgaagttaaaagatatctagaaggtgaaagagatgctataagatatccaagagaatctaacaaattaataaaccttccagaggattacagcagcctcattaatcaagcatccaatttctcgtgcccgaaatcaggtggtgataagagcagagccccaactctgtgccttgtgtgcggatctctgctgtgctcccagagttactgctgccagactgaactggaaggggaggatgtaggagcctgcacagctcacacctactcctgtggctctggagtgggcatcttcctgagagtacgggaatgtcaggtgctatttttagctggcaaaaccaaaggctgtttttattctcctccttaccttgatgactatggggagaccgaccagggactcagacggggaaatcctttacatttatgcaaagagcgattcaagaagattcagaagctctggcaccaacacagtgtcacagaggaaattggacatgcacaggaagccaatcagacactggttggcattgactggcaacatttataattattgcaccaccaaaaaacacaaacttggatttttttaacccagttggctttttaagaaagaaagaagttctgctgaatttggaaataaattctttatttaaactttccttcccagttttatagtttctggttctgaggactgatgaaaatcatcttccatcagcagattttcttgcactgtttgctgtgcccctcaaatataatgtcttgggttttaagatcgagcaaggagcttctcttcctagattggatcccagcccctttgtgggggtctgactgcatagtcccagccattatgtgatatttcacgttattgatgatagtgaaccgtgggtccgaagctgactcaacggaggcagggaacaaagtctctgtggtctgttgggtcatacttcctggttccactgagtggcccaacactgggactgggttggtgtcccctctgctgacaggaccctactcctaggagcaaagtggttgattttgaaggcagtgttcccttctctccattgactatgagagagttgggggacacacatgcagaagaagcccgtggggagaaggtggattcctggtgtgctggctggtttttcagggctgttagaggttttttttttttctttttttttttatggcaagacttttggctttgagaaaactcacttagagggctttccaaaaacttaggatggtctaaaaaattaggatattcttttagaattaggaagaaaaattaggatattctaaaagaatatggattaaaaatttaggatattcttttagatatcctaatatctagatgagaggccttccttcataagatctggttgtttgggctgtggttggcataagtgatatttattttggcctctgtcacatccagtttcttgagcttttaaggtaagcttcttttggctttttttcagatgttcaccaagcttaagtttaaaataataggtattctaaaagagtatcctaattttcttatctgtattcttttagaataccctaatgtttcagacagtgatattctcttgttatttctaaggctaaattggcagagtatatcatctaaagccaaacactgaagaaggtgagaacccactcccacccagccagcatttcctggaacagacaagctgctgcttccttgctggctcacttagtgcattcctgggatggtctggcacccaggctttttattctttttgatcattgttcttactgaggtgccttcctagaacaagagccacttacaaaatagcttataattattatgtaccacacaactactattgtttgatgtatgactgctgagagcttgaatacatgcagagagtgactgaagacttagtagaggaataaattctgagcctgtctaaggtggggctaaggaacagatgagtaataagaggctcttggatttttttaaccaatgcaactgaccctttcaatcagttttctttgaattacatctacaagttttgttccactcagctaccagtcaactaggcatgctccacagtatcacaggaagaaggtcagaaatctggaactgaagctaaaagaagtgaggatgtagaagccacattcctctccaaggtagtgtgtgaaagaaccgccccctcttgacaggaggatgaccgtcgccattcttgcgtgggactgactcacccagctgagaggaggaccaatagaaagaaaattcacatttgagtccacctctctccccctttttctggccttcattcataagatctggttgtttgggctgtaggtggcataattcatgtttattttggcctctgtcacatccagtttctttagcttttaaggtaagcttcttttggctttttttcatatgttcaccaagctaaaatttaaaataataagaccaggtttctctctgtacaagtggattataaacattttcaccaaatcataacaatactccagctttccggtccgacttcctaggagcctggagttagcaaaggttgtctctggatttcattctctgagaatatcacagagcctgggagaagatgaatttacatgaaattgcaacatacacacctttttattttctggtgttaagctagttgtctttcctaccttacaaatcatgttagttttatgatttgttccgcatgttttatgtttattgtagaaatgtttatataacatacgctttccatatcagggaaaatcatatctgtttaataaattggctataactttaatatctgtggacaacttgtaaaatttggaatgtatcatatgtaaaaagtttaaagatatccaaataaatgctttaggtgttggcatt

SEQ ID NO: 197073 - DNA, 2423 bp, Homo sapiens
  Payload ID: 18867
  Gene Name: ubiquitin protein ligase E3 component n-recognin 2
  Uniprot ID: Q8IWV8
  ENST ID: ENST00000372903
  CDS Start-End: 259-1578
ttctgtgtccttccctgggtcagggacgagccagtgacttgactcttgggcgctaagcttgggagggagcgcaggaggccgctgtccttcctttccggttcacgtcacccttctctccctctgttgctccacctgcagccacttggacggctccgggactgattgcctggggcaggggtggcagtcgaggccgccggggccgaggtgaggctgcagctctccgggcggcggtagcgctggggaggaggaggagagaagatggcgtcggagctagagccagaggtgcaggccatcgaccggagcttgctggaatgttcggccgaggagattgcggggaaatggctgcaagcaactgacctcactagagaagtgtaccagcatttagcccactatgtacccaaaatctactgcaggggtcccaacccttttccacagaaagaagacatgctggcacagcatgttttgttgggaccaatggaatggtacctttgtggtgaagatcctgcatttggatttccaaaacttgagcaagcaaacaaaccttctcatctttgtggtcgtgtttttaaagtaggagagcctacatattcttgcagagactgtgcagttgatccaacttgtgttttgtgcatggagtgctttttgggaagtattcacagagatcatcgatataggatgacaacatcaggaggtggaggtttctgtgactgtggtgatactgaagcctggaaagagggtccttactgtcaaaaacatgaacttaacacctctgaaattgaggaagaagaggatcctcttgttcatttatcagaagatgtgatagcaagaacttataacatttttgctattacgtttcggtatgcagtagaaatattaacctgggaaaaagaaagtgaattgccagcagatttagagatggtagagaagagtgacacctactattgcatgctgtttaatgatgaggttcacacctatgaacaagttatttatactcttcagaaagctgttaactgtacacaaaaagaagctattggttttgcaactacagtagatcgagatgggcgtaggtctgttcgatatggagattttcagtattgtgagcaagcaaaatcagtaattgtgagaaataccagtagacagacaaagccactcaaagttcaagttatgcattcgtctattgtcgcacatcagaattttggtttgaaacttttgtcttggctgggaagtattattggatattcagatggccttcgccggattttatgtcaagttggtttacaagaagggccagatggtgaaaactcttctctagtggacagactgatgcttagtgattccaaattatggaaaggtgctaggagtgtatatcatcagttgttcatgagcagtctgcttatggatttgaaatacaagaaactatttgctgttcgatttgcaaaaaactatgagcgtttgcagagtgattatgtgacagatgaccacgacagagagttttcagtcgcagacctctcggttcagatattcacggttccttcacttttctctatctctgctgggcgcagtggctcacctctgtaatcctagccaaggcaggtggatcacctgagcttaggagtctgagaccagcctggccaacatggtgaaaccccatctctactaaaaatagaaaaattagccaggcgtggtggcgcacgcctgaggctgaggcagaagaatcacttgaacccaagaggcggaggttgcagtgagctgagatcaagccattgcactccagcctgggcgacagagcgagattcggtatccaaaaaaaaaaagttcttgctctgtcactcaggctggagtgaggtggcacgatcacagctcactgcagctttgaccacctgggcttaggcaatcctcctgtctcagcctcccaagtagctgggaccacagatgcatgccaccacacccagctagtcttaacatttttaaattaagcttatatggtttatatttttgatgctgtagtaaactttttatatttttgatgctgtagtaaactttttatatttttaaacaggctatggtagtatttaggaaaactactgatttttatatgtccatcttatatctgtctggtctatctggatatgtatgtattcagattaaataggttctaccagactcttttccataatggttaaaccaattcatgcttctgttaataacgtatgaaagtgatagttgctccacatcctcaccaacacttggttttaccagtcttttaagattttatctattctagtgggacatagtggtttctcattatggttttaatttgcattcttctgatgatgatgaagctgaattcctttttatatgtttattggcatttggatatactcctttgtgaatccctgttaaagttgtcctttgattatcta

SEQ ID NO: 197074 - DNA, 8005 bp, Homo sapiens
  Payload ID: 18868
  Gene Name: ubiquitin protein ligase E3 component n-recognin 3 (putative)
  Uniprot ID: Q6ZT12
  ENST ID: ENST00000272793
  CDS Start-End: 51-5717
tccctggaggagccgctggccctggactctccaaattctgagctctcatcatggcggcggcggccgcggcggccgtcgggggccagcagccgtcacagcccgagctgcccgcgccggggctggccctagacaaggcggccaccgccgcgcacctcaaggcggccctcagccggccggacaaccgcgcaggtgctgaggagctgcaggcgctgctggagcgggtgctgagcgccgagcggccgctggccgcggctgccggcggcgaggacgcggcggcggccggaggcgggggcggtccgggggcggccgaggaggaggccctggagtggtgtaagtgccttctggcgggcggcggcggctacgacgagttctgcgcggcggtgcgggcctacgatcccgcggcgctctgcggcctggtctggacagccaacttcgtggcctaccgctgccggacgtgcggcatctcgccctgcatgtcgctgtgcgccgagtgcttccaccagggcgaccacaccggacacgacttcaacatgttccgcagccaggccgggggcgcctgcgactgcggggacagcaacgtgatgcgggagagcgggttttgcaaaaggcatcaaattaaatcaagttcaaatattccctgtgtccctaaagacttactgatgatgtctgaatttgttcttccaagatttatattttgtcttattcagtacttaagagaaggctataatgaaccagcagctgatggaccatcagaaaaggaccttaacaaagtccttcagcttttggaacctcaaatttcctttttagaagacctgactaaaatgggaggagcaatgcggtctgttcttactcaggttttgacaaaccaacaaaactacaaagatctgacttctggtcttggagaaaatgcttgtgtaaagaaaagtcatgaaaagtaccttatagctttaaagagctctggacttacatatcctgaggataagcttgtatatggtgtgcaggagccatctgctggtactagttctctggctgttcaaggtttcataggcgcaacaggaactttgggacaagtggattcttcagatgaggatgatcaggatggtagtcaaggtctgggcaagagaaaaagggtaaaactaagcagtggcaccaaagatcaatccataatggatgttttgaagcataaaagcttcctagaagaactattattttggactataaaatatgaattccctcaaaagatggtaactttcttactcaacatgcttccagatcaagagtataaggttgcttttacaaaaacttttgttcagcattatgctttcattatgaaaacactgaagaaaagtcatgaatcagacacaatgtctaacagaattgtgcatattagtgttcagttgttcagcaatgaggagctagccagacaggtaacagaagaatgtcagctgctggatattatggtcactgtgctattatacatgatggaaagttgccttattaaaagtgagctacaagatgaagaaaatagtttacatgtggtagtgaactgtggagaagcattactgaagaataacacttactggcctcttgttagtgattttattaatattctttctcatcaaagtgtggccaagagatttttggaggatcacggtttgttagttacatggatgaactttgtatctttctttcaaggtatgaacttaaacaagcgagaactaaacgagcatgtggaatttgagtctcagacctactatgctgcctttgctgctgaacttgaggcctgtgcacagccaatgtgggggcttttatcacattgtaaagttagggaaactcaagagtatacccgaaatgttgttagatattgccttgaagctcttcaagactggtttgatgctattaacttcgtagacgagccagcacctaaccaagtcacttttcatctgccactacatcgttactatgctatgtttttgagtaaggctgtgaaatgtcaagaactagatttggattctgttttaccagatcaggaaatgttaatgaaactaatgattcacccactccaaattcaagcaagtcttgcagaaatccacagcaatatgtgggtaagaaatggtctgcaaatcaaaggacaagccatgacgtatgtccagtctcatttctgtaattccatgattgatcctgacatttacctgttacaggtttgtgcttctagacttgacccagattattttatttcatccgtctttgaaagatttaaggtagtggatttgttgacaatggcatcacaacatcaaaatacagtacttgatgcagagcatgagaggtcgatgttagaaggcgctcttacatttcttgtgattcttttgagtcttcgtttacatttaggaatgtctgatgatgagattctcagggccgagatggtagcccagctgtgtatgaatgacaggacacacagttcattgctggacctcattccagaaaatcctaatcccaaaagtggcattattccaggcagttacagctttgaatcagttttatcagctgtagctgattttaaggctcctgtttttgaacctggaggttctatgcaacaaggcatgtatactcccaaagctgaagtctgggatcaagagtttgaccccgtcatggtcattcttcgaacagtttaccgtagagatgtgcagtctgcaatggacagatatactgcatttttaaaacagagtggaaaatttcctggaaatccctggcctccatataagaaaaggacatcactccatcctagctataaaggtcttatgagacttttgcactgtaaaactttacacattgtgctattcactctgctttacaagattttgatggatcatcaaaatctgtcagaacatgtactctgcatggttttatatctgattgaattaggacttgaaaattctgctgaagaagaatcagatgaagaggcatcagtgggtggaccagaacgttgtcatgacagttggtttcctggcagtaacttagtgtcaaacatgcgacactttataaactatgttagagtaagagttccagagactgctcctgaagtaaagagagactcacctgcaagtactagctctgataacttgggttctttacaaaattctggtacagctcaagttttcagtttagtagcagaacgtagaaagaaatttcaggaaatcatcaatcgcagtagcagtgaagcaaatcaggtggttcgtcccaaaacttcaagtaaatggtctgctcctggttcagctccacagttaactacagccattttggaaattaaagaaagcatattgtctttgctaattaaacttcaccacaaactctcaggaaaacaaaactcctactatcctccttggcttgatgacatagaaattttaatccaaccagaaattcctaaatacagtcatggagatggtataactgccgtggaaagaattttactaaaagctgcatcgcaaagtagaatgaacaaacgcatcattgaagagatatgtagaaaagtgacccctcctgtaccacctaaaaaagtcactgcagcagagaagaaaacattggacaaagaagaaaggcgacagaaggctagagagaggcagcagaaattgcttgcggagtttgcttcacgacagaaaagctttatggaaactgcaatggatgttgattctcctgagaatgatattcctatggagatcaccacggcagaaccacaggtttccgaggcagtatatgactgtgttatttgtggacagagtggcccctcctctgaagatcgacctactggattagttgtactgttacaagcatcctcagttttggggcagtgccgtgacaatgttgagccaaaaaagttgccgatcagtgaagaggagcagatttacccttgggatacctgtgcagccgttcatgatgtgaggctttcattattacagcgttattttaaggatagttcatgtctcttggcagtatcaattggctgggaaggaggtgtttatgtacaaacctgtggtcacacattacatatagattgtcataaatcttacatggaatcattacggaatgaccaggttcttcagggcttctcggtggacaaaggagaattcacgtgtccactctgtaggcagtttgctaacagtgttcttccatgttatcctggaagcaatgtggaaaataacccttggcaacgtcctagcaacaaaagcatacaagatctcataaaggaagtggaggagctgcagggacgaccgggagctttcccatcagaaacaaatttaagtaaagaaatggaatctgtaatgaaagatataaaaaataccactcagaagaaatatagagactatagcaagaccccgggctcaccagacaatgattttctctttatgtactctgttgctagaaccaatttagaacttgaattgattcatcgaggaggcaatttgtgttcaggtggtgcaagcacagctggcaaaaggtcttgtttaaatcagctgtttcatgtattagccttgcacatgcggctttatagcattgactctgagtataatccctggagaaagctcacccagttagaagagatgaatccacagctgggatatgaagaacaacagcctgaggttccaattctttatcatgatgtaacatcccttttgctcatccagatcttaatgatgccacaacccttacgcaaagaccactttacctgcattgtgaaggtactttttaccctactgtacacacaggctcttgcagcactctcagttaaatgcagcgaagaagataggtcagcctggaaacacgcgggagctctcaaaaagagtacatgtgatgcagaaaagtcttacgaagtattactgagctttgtgataagtgaactatttaaaggaaagttataccatgaagaaggaactcaggaatgtgcaatggttaaccctattgcttggtctcctgaatccatggaaaaatgcttacaggacttctgcttaccttttctcagaatcaccagccttcttcagcaccacctttttggggaagatttacctagctgccaggaagaagaagaattttcagttcttgccagctgcctgggacttctgccaacgttttaccaaacagaacatccattcatcagtgcctcctgtctggattggccagttccagcatttgatattataactcagtggtgttttgagataaaatcatttactgaaagacatgcagaacaaggaaaggccttgcttatccaagagtcaaaatggaaattaccacacctactacagttgcctgagaattataacaccatttttcagtactaccacagaaaaacctgtagtgtctgcaccaaggttcctaaagatcctgctgtttgccttgtgtgtggtacttttgtatgcctgaaaggactttgctgcaagcaacaaagttactgtgaatgtgtactgcactctcagaactgtggtgcaggaacaggtattttccttttgatcaatgcatcggtaattatcatcattcgaggtcaccgcttctgcctctggggttccgtgtatttggatgctcatggagaggaagaccgggatcttaggcgaggcaaacctctctacatttgtaaggaaagatacaaagttcttgagcaacagtggatttctcatacttttgatcacatcaataaaagatggggtccacattacaatgggctgtgactctccacctcagcattgcatcgtatcatcattttcgctacgaatttatttttcaacaataagctttaacttaatttgggggattaacacttttgctgagggagaaaaagaaaacatacattatgaagcctttccaaaattaggtgcttggtaatcacgttaatggtataattttttttttttaatatctggagaacattaataacaagttaaattattctttagtggtcattttttaagtgcacaattaataagaagcacaacttgttcacaaactcattcagaaatgattctcccaacaatgcgtatcagctattcattgatacttagagtgggtgtgatttatttgacattttactgcttctttctgtctgtgtgttttaatttgcatctgccaagcataatgcatcttttttcctctgccattcttgtgttgattggagaatttttctgtatgtaattagaaaaaaatgtaaaacatgatttatgtgaaatactgtatagtaaaagttggtctaatagtagaactttaaaattttttcttattgtgaggaatctgttaaaagtttaaagctttgctgaaaactgaattcattctcaggaatttcataaatcttctccccaggtaaataattgaaatagctgtaaaataagtagatagctgctgttaatataatacagtacattttggggggcatatgtgtggttggggggtccttaaaaatcaaaatttgccatttcagttggatgaattactagaggtaataacaaatcttactatgaaatcaagaggtttaagaacatacactgggcagatgttgattccgtgcatgcccaccttttattaccaaacaaggttttgtttatatgattgtattagaaatgctcagacttccccagaaatgaaccataaattttggaacttcctttcagctcaagaggttcagctatattgtatttgtgcagtgtaatcactactatttctgctcggtttcctaaaaggaaaaaaaaggcgcagtggtgatgaccctcatgaatgagccacgcttctgcattcttcttagaaactgctgtgaaaaacaatttatgtttgcagggtttaaaaatcagtaaaaatgggaatgattgagctaaaacccactctatgagaaggaagattactgaaaagcatgtgacatattgctacaaagattttttttcctaaatgattcagtaattgaatgattatttaatatatagtgctatcaagcaatccctggtactttggacttccatggcttgttatataaaattacatttttacatgtaaaaataaactaaacaaatctaatgataaaatatgtcagatccatgttctaaaaaatttttgtaatgacatgacattacaagagtataaaaatggacattaaatcatggccttgcattaaaatatggaaagcagagcagtacatattcaaatgtattcagaaagtcaaaagattacctatcgttctacaataaaatacatggaaatagcttgctatttttatatacatttccaaaatattaagataactttctgtaagagtcaatgattctgttcgactaaatagctgtcctttccaacacattgctacttttttaaatactgtatcataagttcagcctgtcatactttttgcattgatcgttatgaataccagaccatttgtaagtgtggttgaagagcaaaatgctaattgacatctctagtaaatactgttacaggattcatgaacttgaataattctacagtttgaaactctgatgctatatatacatggtataatgtattcagactttgattactacttatttaaaatggaatgttttatggttgtgcatatggatgtgaagtgaaaatattagccttaactttaaaatttgggtgtttgatagtgtttattttgatattggtgaattagtcaccagtaaattttaaaaaagcacttggttgaaaattgtacttgaatacatacatgcatgctgctaaactagaactttaatttttccccataacttttataagtcccatttataaacccacttttaaaaataacaggtccaagttagagtgatgtgtgtatattattcaaaaaaatgtactggtgtgatatcttgtatgaatgatcatttaaatacagtacattactgtagaagctaaattgatctttataattaagcagaaattacaaaactaggaataatcaacattgtaagatatgttaataaaaacctgctgtcatttggtttgtgaaaggtccttaaaa

SEQ ID NO: 197075 - DNA, 5129 bp, Homo sapiens
  Payload ID: 18868
  Gene Name: ubiquitin protein ligase E3 component n-recognin 3 (putative)
  ENST ID: ENST00000392632
  CDS Start-End: 1-2852
tgtcagaacatgtactctgcatggttttatatctgattgaattaggacttgaaaattctgctgaagaagaatcagatgaagaggcatcagtgggtggaccagaacgttgtcatgacagttggtttcctggcagtaacttagtgtcaaacatgcgacactttataaactatgttagagtaagagttccagagactgctcctgaagtaaagagagactcacctgcaagtactagctctgataacttgggttctttacaaaattctggtacagctcaagttttcagtttagtagcagaacgtagaaagaaatttcaggaaatcatcaatcgcagtagcagtgaagcaaatcaggtggttcgtcccaaaacttcaagtaaatggtctgctcctggttcagctccacagttaactacagccattttggaaattaaagaaagcatattgtctttgctaattaaacttcaccacaaactctcaggaaaacaaaactcctactatcctccttggcttgatgacatagaaattttaatccaaccagaaattcctaaatacagtcatggagatggtataactgccgtggaaagaattttactaaaagctgcatcgcaaagtagaatgaacaaacgcatcattgaagagatatgtagaaaagtgacccctcctgtaccacctaaaaaagtcactgcagcagagaagaaaacattggacaaagaagaaaggcgacagaaggctagagagaggcagcagaaattgcttgcggagtttgcttcacgacagaaaagctttatggaaactgcaatggatgttgattctcctgagaatgatattcctatggagatcaccacggcagaaccacaggtttccgaggcagtatatgactgtgttatttgtggacagagtggcccctcctctgaagatcgacctactggattagttgtactgttacaagcatcctcagttttggggcagtgccgtgacaatgttgagccaaaaaagttgccgatcagtgaagaggagcagatttacccttgggatacctgtgcagccgttcatgatgtgaggctttcattattacagcgttattttaaggatagttcatgtctcttggcagtatcaattggctgggaaggaggtgtttatgtacaaacctgtggtcacacattacatatagattgtcataaatcttacatggaatcattacggaatgaccaggttcttcagggcttctcggtggacaaaggagaattcacgtgtccactctgtaggcagtttgctaacagtgttcttccatgttatcctggaagcaatgtggaaaataacccttggcaacgtcctagcaacaaaagcatacaagatctcataaaggaagtggaggagctgcagggacgaccgggagctttcccagtaagcatcagttcagaaacaaatttaagtaaagaaatggaatctgtaatgaaagatataaaaaataccactcagaagaaatatagagactatagcaagaccccgggctcaccagacaatgattttctctttatgtactctgttgctagaaccaatttagaacttgaattgattcatcgaggaggcaatttgtgttcaggtggtgcaagcacagctggcaaaaggtcttgtttaaatcagctgtttcatgtattagccttgcacatgcggctttatagcattgactctgagtataatccctggagaaagctcacccagttagaagagatgaatccacagctgggatatgaagaacaacagcctgaggttccaattctttatcatgatgtaacatcccttttgctcatccagatcttaatgatgccacaacccttacgcaaagaccactttacctgcattgtgaaggtactttttaccctactgtacacacaggctcttgcagcactctcagttaaatgcagcgaagaagataggtcagcctggaaacacgcgggagctctcaaaaagagtacatgtgatgcagaaaagtcttacgaagtattactgagctttgtgataagtgaactatttaaaggaaagttataccatgaagaaggaactcaggaatgtgcaatggttaaccctattgcttggtctcctgaatccatggaaaaatgcttacaggacttctgcttaccttttctcagaatcaccagccttcttcagcaccacctttttggggaagatttacctagctgccaggaagaagaagaattttcagttcttgccagctgcctgggacttctgccaacgttttaccaaacagaacatccattcatcagtgcctcctgtctggattggccagttccagcatttgatattataactcagtggtgttttgagataaaatcatttactgaaagacatgcagaacaaggaaaggccttgcttatccaagagtcaaaatggaaattaccacacctactacagttgcctgagaattataacaccatttttcagtactaccacagaaaaacctgtagtgtctgcaccaaggttcctaaagatcctgctgtttgccttgtgtgtggtacttttgtatgcctgaaaggactttgctgcaagcaacaaagttactgtgaatgtgtactgcactctcagaactgtggtgcaggaacaggtattttccttttgatcaatgcatcggtaattatcatcattcgaggtcaccgcttctgcctctggggttccgtgtatttggatgctcatggagaggaagaccgggatcttaggcgaggcaaacctctctacatttgtaaggaaagatacaaagttcttgagcaacagtggatttctcatacttttgatcacatcaataaaagatggggtccacattacaatgggctgtgactctccacctcagcattgcatcgtatcatcattttcgctacgaatttatttttcaacaataagctttaacttaatttgggggattaacacttttgctgagggagaaaaagaaaacatacattatgaagcctttccaaaattaggtgcttggtaatcacgttaatggtataattttttttttttaatatctggagaacattaataacaagttaaattattctttagtggtcattttttaagtgcacaattaataagaagcacaacttgttcacaaactcattcagaaatgattctcccaacaatgcgtatcagctattcattgatacttagagtgggtgtgatttatttgacattttactgcttctttctgtctgtgtgttttaatttgcatctgccaagcataatgcatcttttttcctctgccattcttgtgttgattggagaatttttctgtatgtaattagaaaaaaatgtaaaacatgatttatgtgaaatactgtatagtaaaagttggtctaatagtagaactttaaaattttttcttattgtgaggaatctgttaaaagtttaaagctttgctgaaaactgaattcattctcaggaatttcataaatcttctccccaggtaaataattgaaatagctgtaaaataagtagatagctgctgttaatataatacagtacattttggggggcatatgtgtggttggggggtccttaaaaatcaaaatttgccatttcagttggatgaattactagaggtaataacaaatcttactatgaaatcaagaggtttaagaacatacactgggcagatgttgattccgtgcatgcccaccttttattaccaaacaaggttttgtttatatgattgtattagaaatgctcagacttccccagaaatgaaccataaattttggaacttcctttcagctcaagaggttcagctatattgtatttgtgcagtgtaatcactactatttctgctcggtttcctaaaaggaaaaaaaaggcgcagtggtgatgaccctcatgaatgagccacgcttctgcattcttcttagaaactgctgtgaaaaacaatttatgtttgcagggtttaaaaatcagtaaaaatgggaatgattgagctaaaacccactctatgagaaggaagattactgaaaagcatgtgacatattgctacaaagattttttttcctaaatgattcagtaattgaatgattatttaatatatagtgctatcaagcaatccctggtactttggacttccatggcttgttatataaaattacatttttacatgtaaaaataaactaaacaaatctaatgataaaatatgtcagatccatgttctaaaaaatttttgtaatgacatgacattacaagagtataaaaatggacattaaatcatggccttgcattaaaatatggaaagcagagcagtacatattcaaatgtattcagaaagtcaaaagattacctatcgttctacaataaaatacatggaaatagcttgctatttttatatacatttccaaaatattaagataactttctgtaagagtcaatgattctgttcgactaaatagctgtcctttccaacacattgctacttttttaaatactgtatcataagttcagcctgtcatactttttgcattgatcgttatgaataccagaccatttgtaagtgtggttgaagagcaaaatgctaattgacatctctagtaaatactgttacaggattcatgaacttgaataattctacagtttgaaactctgatgctatatatacatggtataatgtattcagactttgattactacttatttaaaatggaatgttttatggttgtgcatatggatgtgaagtgaaaatattagccttaactttaaaatttgggtgtttgatagtgtttattttgatattggtgaattagtcaccagtaaattttaaaaaagcacttggttgaaaattgtacttgaatacatacatgcatgctgctaaactagaactttaatttttccccataacttttataagtcccatttataaacccacttttaaaaataacaggtccaagttagagtgatgtgtgtatattattcaaaaaaatgtactggtgtgatatcttgtatgaatgatcatttaaatacagtacattactgtagaagctaaattgatctttataattaagcagaaattacaaaactaggaataatcaacattgtaagatatgttaataaaaacctgctgtcatttggtttgtgaaa

SEQ ID NO: 197076 - DNA, 2183 bp, Homo sapiens
  Payload ID: 18868
  Gene Name: ubiquitin protein ligase E3 component n-recognin 3 (putative)
  ENST ID: ENST00000439681
  CDS Start-End: 1-1767
ttacatatagattgtcataaatcttacatggaatcattacggaatgaccaggttcttcagggcttctcggtggacaaaggagaattcacgtgtccactctgtaggcagtttgctaacagtgttcttccatgttatcctggaagcaatgtggaaaataacccttggcaacgtcctagcaacaaaagcatacaagatctcataaaggaagtggaggagctgcagggacgaccgggagctttcccatcagaaacaaatttaagtaaagaaatggaatctgtaatgaaagatataaaaaataccactcagaagaaatatagagactatagcaagaccccgggctcaccagacaatgattttctctttatgtactctgttgctagaaccaatttagaacttgaattgattcatcgaggaggcaatttgtgttcaggtggtgcaagcacagctggcaaaaggtcttgtttaaacttttgcttcattatttttccctttactaaatcagaaattatactgtgccaatatagaaaaagtcatgataaagtttatcctaaatatcagctgtttcatgtattagccttgcacatgcggctttatagcattgactctgagtataatccctggagaaagctcacccagttagaagagatgaatccacagctgggatatgaagaacaacagcctgaggttccaattctttatcatgatgtaacatcccttttgctcatccagatcttaatgatgccacaacccttacgcaaagaccactttacctgcattgtgaaggtactttttaccctactgtacacacaggctcttgcagcactctcagttaaatgcagcgaagaagataggtcagcctggaaacacgcgggagctctcaaaaagagtacatgtgatgcagaaaagtcttacgaagtattactgagctttgtgataagtgaactatttaaaggaaagttataccatgaagaaggaactcaggaatgtgcaatggttaaccctattgcttggtctcctgaatccatggaaaaatgcttacaggacttctgcttaccttttctcagaatcaccagccttcttcagcaccacctttttggggaagatttacctagctgccaggaagaagaagaattttcagttcttgccagctgcctgggacttctgccaacgttttaccaaacagaacatccattcatcagtgcctcctgtctggattggccagttccagcatttgatattataactcagtggtgttttgagataaaatcatttactgaaagacatgcagaacaaggaaaggccttgcttatccaagagtcaaaatggaaattaccacacctactacagttgcctgagaattataacaccatttttcagtactaccacagaaaaacctgtagtgtctgcaccaaggttcctaaagatcctgctgtttgccttgtgtgtggtacttttgtatgcctgaaaggactttgctgcaagcaacaaagttactgtgaatgtgtactgcactctcagaactgtggtgcaggaacaggtattttccttttgatcaatgcatcggtaattatcatcattcgaggtcaccgcttctgcctctggggttccgtgtatttggatgctcatggagaggaagaccgggatcttaggcgaggcaaacctctctacatttgtaaggaaagatacaaagttcttgagcaacagtggatttctcatacttttgatcacatcaataaaagatggggtccacattacaatgggctgtgactctccacctcagcattgcatcgtatcatcattttcgctacgaatttatttttcaacaataagctttaacttaatttgggggattaacacttttgctgagggagaaaaagaaaacatacattatgaagcctttccaaaattaggtgcttggtaatcacgttaatggtataattttttttttttaatatctggagaacattaataacaagttaaattattctttagtggtcattttttaagtgcacaattaataagaagcacaacttgttcacaaactcattcagaaatgattctcccaacaatgcgtatcagctattcattgatacttagagtgggtgtgatttatttgacattttactgcttctttctgtctgtgtgttttaatttgcatctgccaagcataatgcatctttttt

SEQ ID NO: 197077 - DNA, 7951 bp, Homo sapiens
  Payload ID: 18868
  Gene Name: ubiquitin protein ligase E3 component n-recognin 3 (putative)
  Uniprot ID: Q6ZT12
  ENST ID: ENST00000418381
  CDS Start-End: 1-5667
atggcggcggcggccgcggcggccgtcgggggccagcagccgtcacagcccgagctgcccgcgccggggctggccctagacaaggcggccaccgccgcgcacctcaaggcggccctcagccggccggacaaccgcgcaggtgctgaggagctgcaggcgctgctggagcgggtgctgagcgccgagcggccgctggccgcggctgccggcggcgaggacgcggcggcggccggaggcgggggcggtccgggggcggccgaggaggaggccctggagtggtgtaagtgccttctggcgggcggcggcggctacgacgagttctgcgcggcggtgcgggcctacgatcccgcggcgctctgcggcctggtctggacagccaacttcgtggcctaccgctgccggacgtgcggcatctcgccctgcatgtcgctgtgcgccgagtgcttccaccagggcgaccacaccggacacgacttcaacatgttccgcagccaggccgggggcgcctgcgactgcggggacagcaacgtgatgcgggagagcgggttttgcaaaaggcatcaaattaaatcaagttcaaatattccctgtgtccctaaagacttactgatgatgtctgaatttgttcttccaagatttatattttgtcttattcagtacttaagagaaggctataatgaaccagcagctgatggaccatcagaaaaggaccttaacaaagtccttcagcttttggaacctcaaatttcctttttagaagacctgactaaaatgggaggagcaatgcggtctgttcttactcaggttttgacaaaccaacaaaactacaaagatctgacttctggtcttggagaaaatgcttgtgtaaagaaaagtcatgaaaagtaccttatagctttaaagagctctggacttacatatcctgaggataagcttgtatatggtgtgcaggagccatctgctggtactagttctctggctgttcaaggtttcataggcgcaacaggaactttgggacaagtggattcttcagatgaggatgatcaggatggtagtcaaggtctgggcaagagaaaaagggtaaaactaagcagtggcaccaaagatcaatccataatggatgttttgaagcataaaagcttcctagaagaactattattttggactataaaatatgaattccctcaaaagatggtaactttcttactcaacatgcttccagatcaagagtataaggttgcttttacaaaaacttttgttcagcattatgctttcattatgaaaacactgaagaaaagtcatgaatcagacacaatgtctaacagaattgtgcatattagtgttcagttgttcagcaatgaggagctagccagacaggtaacagaagaatgtcagctgctggatattatggtcactgtgctattatacatgatggaaagttgccttattaaaagtgagctacaagatgaagaaaatagtttacatgtggtagtgaactgtggagaagcattactgaagaataacacttactggcctcttgttagtgattttattaatattctttctcatcaaagtgtggccaagagatttttggaggatcacggtttgttagttacatggatgaactttgtatctttctttcaaggtatgaacttaaacaagcgagaactaaacgagcatgtggaatttgagtctcagacctactatgctgcctttgctgctgaacttgaggcctgtgcacagccaatgtgggggcttttatcacattgtaaagttagggaaactcaagagtatacccgaaatgttgttagatattgccttgaagctcttcaagactggtttgatgctattaacttcgtagacgagccagcacctaaccaagtcacttttcatctgccactacatcgttactatgctatgtttttgagtaaggctgtgaaatgtcaagaactagatttggattctgttttaccagatcaggaaatgttaatgaaactaatgattcacccactccaaattcaagcaagtcttgcagaaatccacagcaatatgtgggtaagaaatggtctgcaaatcaaaggacaagccatgacgtatgtccagtctcatttctgtaattccatgattgatcctgacatttacctgttacaggtttgtgcttctagacttgacccagattattttatttcatccgtctttgaaagatttaaggtagtggatttgttgacaatggcatcacaacatcaaaatacagtacttgatgcagagcatgagaggtcgatgttagaaggcgctcttacatttcttgtgattcttttgagtcttcgtttacatttaggaatgtctgatgatgagattctcagggccgagatggtagcccagctgtgtatgaatgacaggacacacagttcattgctggacctcattccagaaaatcctaatcccaaaagtggcattattccaggcagttacagctttgaatcagttttatcagctgtagctgattttaaggctcctgtttttgaacctggaggttctatgcaacaaggcatgtatactcccaaagctgaagtctgggatcaagagtttgaccccgtcatggtcattcttcgaacagtttaccgtagagatgtgcagtctgcaatggacagatatactgcatttttaaaacagagtggaaaatttcctggaaatccctggcctccatataagaaaaggacatcactccatcctagctataaaggtcttatgagacttttgcactgtaaaactttacacattgtgctattcactctgctttacaagattttgatggatcatcaaaatctgtcagaacatgtactctgcatggttttatatctgattgaattaggacttgaaaattctgctgaagaagaatcagatgaagaggcatcagtgggtggaccagaacgttgtcatgacagttggtttcctggcagtaacttagtgtcaaacatgcgacactttataaactatgttagagtaagagttccagagactgctcctgaagtaaagagagactcacctgcaagtactagctctgataacttgggttctttacaaaattctggtacagctcaagttttcagtttagtagcagaacgtagaaagaaatttcaggaaatcatcaatcgcagtagcagtgaagcaaatcaggtggttcgtcccaaaacttcaagtaaatggtctgctcctggttcagctccacagttaactacagccattttggaaattaaagaaagcatattgtctttgctaattaaacttcaccacaaactctcaggaaaacaaaactcctactatcctccttggcttgatgacatagaaattttaatccaaccagaaattcctaaatacagtcatggagatggtataactgccgtggaaagaattttactaaaagctgcatcgcaaagtagaatgaacaaacgcatcattgaagagatatgtagaaaagtgacccctcctgtaccacctaaaaaagtcactgcagcagagaagaaaacattggacaaagaagaaaggcgacagaaggctagagagaggcagcagaaattgcttgcggagtttgcttcacgacagaaaagctttatggaaactgcaatggatgttgattctcctgagaatgatattcctatggagatcaccacggcagaaccacaggtttccgaggcagtatatgactgtgttatttgtggacagagtggcccctcctctgaagatcgacctactggattagttgtactgttacaagcatcctcagttttggggcagtgccgtgacaatgttgagccaaaaaagttgccgatcagtgaagaggagcagatttacccttgggatacctgtgcagccgttcatgatgtgaggctttcattattacagcgttattttaaggatagttcatgtctcttggcagtatcaattggctgggaaggaggtgtttatgtacaaacctgtggtcacacattacatatagattgtcataaatcttacatggaatcattacggaatgaccaggttcttcagggcttctcggtggacaaaggagaattcacgtgtccactctgtaggcagtttgctaacagtgttcttccatgttatcctggaagcaatgtggaaaataacccttggcaacgtcctagcaacaaaagcatacaagatctcataaaggaagtggaggagctgcagggacgaccgggagctttcccatcagaaacaaatttaagtaaagaaatggaatctgtaatgaaagatataaaaaataccactcagaagaaatatagagactatagcaagaccccgggctcaccagacaatgattttctctttatgtactctgttgctagaaccaatttagaacttgaattgattcatcgaggaggcaatttgtgttcaggtggtgcaagcacagctggcaaaaggtcttgtttaaatcagctgtttcatgtattagccttgcacatgcggctttatagcattgactctgagtataatccctggagaaagctcacccagttagaagagatgaatccacagctgggatatgaagaacaacagcctgaggttccaattctttatcatgatgtaacatcccttttgctcatccagatcttaatgatgccacaacccttacgcaaagaccactttacctgcattgtgaaggtactttttaccctactgtacacacaggctcttgcagcactctcagttaaatgcagcgaagaagataggtcagcctggaaacacgcgggagctctcaaaaagagtacatgtgatgcagaaaagtcttacgaagtattactgagctttgtgataagtgaactatttaaaggaaagttataccatgaagaaggaactcaggaatgtgcaatggttaaccctattgcttggtctcctgaatccatggaaaaatgcttacaggacttctgcttaccttttctcagaatcaccagccttcttcagcaccacctttttggggaagatttacctagctgccaggaagaagaagaattttcagttcttgccagctgcctgggacttctgccaacgttttaccaaacagaacatccattcatcagtgcctcctgtctggattggccagttccagcatttgatattataactcagtggtgttttgagataaaatcatttactgaaagacatgcagaacaaggaaaggccttgcttatccaagagtcaaaatggaaattaccacacctactacagttgcctgagaattataacaccatttttcagtactaccacagaaaaacctgtagtgtctgcaccaaggttcctaaagatcctgctgtttgccttgtgtgtggtacttttgtatgcctgaaaggactttgctgcaagcaacaaagttactgtgaatgtgtactgcactctcagaactgtggtgcaggaacaggtattttccttttgatcaatgcatcggtaattatcatcattcgaggtcaccgcttctgcctctggggttccgtgtatttggatgctcatggagaggaagaccgggatcttaggcgaggcaaacctctctacatttgtaaggaaagatacaaagttcttgagcaacagtggatttctcatacttttgatcacatcaataaaagatggggtccacattacaatgggctgtgactctccacctcagcattgcatcgtatcatcattttcgctacgaatttatttttcaacaataagctttaacttaatttgggggattaacacttttgctgagggagaaaaagaaaacatacattatgaagcctttccaaaattaggtgcttggtaatcacgttaatggtataattttttttttttaatatctggagaacattaataacaagttaaattattctttagtggtcattttttaagtgcacaattaataagaagcacaacttgttcacaaactcattcagaaatgattctcccaacaatgcgtatcagctattcattgatacttagagtgggtgtgatttatttgacattttactgcttctttctgtctgtgtgttttaatttgcatctgccaagcataatgcatcttttttcctctgccattcttgtgttgattggagaatttttctgtatgtaattagaaaaaaatgtaaaacatgatttatgtgaaatactgtatagtaaaagttggtctaatagtagaactttaaaattttttcttattgtgaggaatctgttaaaagtttaaagctttgctgaaaactgaattcattctcaggaatttcataaatcttctccccaggtaaataattgaaatagctgtaaaataagtagatagctgctgttaatataatacagtacattttggggggcatatgtgtggttggggggtccttaaaaatcaaaatttgccatttcagttggatgaattactagaggtaataacaaatcttactatgaaatcaagaggtttaagaacatacactgggcagatgttgattccgtgcatgcccaccttttattaccaaacaaggttttgtttatatgattgtattagaaatgctcagacttccccagaaatgaaccataaattttggaacttcctttcagctcaagaggttcagctatattgtatttgtgcagtgtaatcactactatttctgctcggtttcctaaaaggaaaaaaaaggcgcagtggtgatgaccctcatgaatgagccacgcttctgcattcttcttagaaactgctgtgaaaaacaatttatgtttgcagggtttaaaaatcagtaaaaatgggaatgattgagctaaaacccactctatgagaaggaagattactgaaaagcatgtgacatattgctacaaagattttttttcctaaatgattcagtaattgaatgattatttaatatatagtgctatcaagcaatccctggtactttggacttccatggcttgttatataaaattacatttttacatgtaaaaataaactaaacaaatctaatgataaaatatgtcagatccatgttctaaaaaatttttgtaatgacatgacattacaagagtataaaaatggacattaaatcatggccttgcattaaaatatggaaagcagagcagtacatattcaaatgtattcagaaagtcaaaagattacctatcgttctacaataaaatacatggaaatagcttgctatttttatatacatttccaaaatattaagataactttctgtaagagtcaatgattctgttcgactaaatagctgtcctttccaacacattgctacttttttaaatactgtatcataagttcagcctgtcatactttttgcattgatcgttatgaataccagaccatttgtaagtgtggttgaagagcaaaatgctaattgacatctctagtaaatactgttacaggattcatgaacttgaataattctacagtttgaaactctgatgctatatatacatggtataatgtattcagactttgattactacttatttaaaatggaatgttttatggttgtgcatatggatgtgaagtgaaaatattagccttaactttaaaatttgggtgtttgatagtgtttattttgatattggtgaattagtcaccagtaaattttaaaaaagcacttggttgaaaattgtacttgaatacatacatgcatgctgctaaactagaactttaatttttccccataacttttataagtcccatttataaacccacttttaaaaataacaggtccaagttagagtgatgtgtgtatattattcaaaaaaatgtactggtgtgatatcttgtatgaatgatcatttaaatacagtacattactgtagaagctaaattgatctttataattaagcagaaattacaaaactaggaataatcaacattgtaagatatgttaataaaaacctgctgtcatttggtttgtgaaaggtcctt

SEQ ID NO: 197078 - DNA, 3821 bp, Homo sapiens
  Payload ID: 18868
  Gene Name: ubiquitin protein ligase E3 component n-recognin 3 (putative)
  ENST ID: ENST00000444475
  CDS Start-End: 1-234
atgaaagatataaaaaataccactcagaagaaatatagagactatagcaagaccccgggctcaccagacaatgattttctctttatgtactctgttgctagattaggcaacagaagatttgtgaaaacaaaatgtattgatctcatttatattcccttgatgaaggaacacatgctggtctccgctcgctttctgtccactagtatgaaatccttgtccctgcttccttgctgaaccaatttagaacttgaattgattcatcgaggaggcaatttgtgttcaggtggtgcaagcacagctggcaaaaggtcttgtttaaatcagctgtttcatgtattagccttgcacatgcggctttatagcattgactctgagtataatccctggagaaagctcacccagttagaagagatgaatccacagctgggatatgaagaacaacagcctgaggttccaattctttatcatgatgtaacatcccttttgctcatccagatcttaatgatgccacaacccttacgcaaagaccactttacctgcattgtgaaggtactttttaccctactgtacacacaggctcttgcagcactctcagttaaatgcagcgaagaagataggtcagcctggaaacacgcgggagctctcaaaaagagtacatgtgatgcagaaaagtcttacgaagtattactgagctttgtgataagtgaactatttaaaggaaagttataccatgaagaaggaactcaggaatgtgcaatggttaaccctattgcttggtctcctgaatccatggaaaaatgcttacaggacttctgcttaccttttctcagaatcaccagccttcttcagcaccacctttttggggaagatttacctagctgccaggaagaagaagaattttcagttcttgccagctgcctgggacttctgccaacgttttaccaaacagaacatccattcatcagtgcctcctgtctggattggccagttccagcatttgatattataactcagtggtgttttgagataaaatcatttactgaaagacatgcagaacaaggaaaggccttgcttatccaagagtcaaaatggaaattaccacacctactacagttgcctgagaattataacaccatttttcagtactaccacagaaaaacctgtagtgtctgcaccaaggttcctaaagatcctgctgtttgccttgtgtgtggtacttttgtatgcctgaaaggactttgctgcaagcaacaaagttactgtgaatgtgtactgcactctcagaactgtggtgcaggaacaggtattttccttttgatcaatgcatcggtaattatcatcattcgaggtcaccgcttctgcctctggggttccgtgtatttggatgctcatggagaggaagaccgggatcttaggcgaggcaaacctctctacatttgtaaggaaagatacaaagttcttgagcaacagtggatttctcatacttttgatcacatcaataaaagatggggtccacattacaatgggctgtgactctccacctcagcattgcatcgtatcatcattttcgctacgaatttatttttcaacaataagctttaacttaatttgggggattaacacttttgctgagggagaaaaagaaaacatacattatgaagcctttccaaaattaggtgcttggtaatcacgttaatggtataattttttttttttaatatctggagaacattaataacaagttaaattattctttagtggtcattttttaagtgcacaattaataagaagcacaacttgttcacaaactcattcagaaatgattctcccaacaatgcgtatcagctattcattgatacttagagtgggtgtgatttatttgacattttactgcttctttctgtctgtgtgttttaatttgcatctgccaagcataatgcatcttttttcctctgccattcttgtgttgattggagaatttttctgtatgtaattagaaaaaaatgtaaaacatgatttatgtgaaatactgtatagtaaaagttggtctaatagtagaactttaaaattttttcttattgtgaggaatctgttaaaagtttaaagctttgctgaaaactgaattcattctcaggaatttcataaatcttctccccaggtaaataattgaaatagctgtaaaataagtagatagctgctgttaatataatacagtacattttggggggcatatgtgtggttggggggtccttaaaaatcaaaatttgccatttcagttggatgaattactagaggtaataacaaatcttactatgaaatcaagaggtttaagaacatacactgggcagatgttgattccgtgcatgcccaccttttattaccaaacaaggttttgtttatatgattgtattagaaatgctcagacttccccagaaatgaaccataaattttggaacttcctttcagctcaagaggttcagctatattgtatttgtgcagtgtaatcactactatttctgctcggtttcctaaaaggaaaaaaaaggcgcagtggtgatgaccctcatgaatgagccacgcttctgcattcttcttagaaactgctgtgaaaaacaatttatgtttgcagggtttaaaaatcagtaaaaatgggaatgattgagctaaaacccactctatgagaaggaagattactgaaaagcatgtgacatattgctacaaagattttttttcctaaatgattcagtaattgaatgattatttaatatatagtgctatcaagcaatccctggtactttggacttccatggcttgttatataaaattacatttttacatgtaaaaataaactaaacaaatctaatgataaaatatgtcagatccatgttctaaaaaatttttgtaatgacatgacattacaagagtataaaaatggacattaaatcatggccttgcattaaaatatggaaagcagagcagtacatattcaaatgtattcagaaagtcaaaagattacctatcgttctacaataaaatacatggaaatagcttgctatttttatatacatttccaaaatattaagataactttctgtaagagtcaatgattctgttcgactaaatagctgtcctttccaacacattgctacttttttaaatactgtatcataagttcagcctgtcatactttttgcattgatcgttatgaataccagaccatttgtaagtgtggttgaagagcaaaatgctaattgacatctctagtaaatactgttacaggattcatgaacttgaataattctacagtttgaaactctgatgctatatatacatggtataatgtattcagactttgattactacttatttaaaatggaatgttttatggttgtgcatatggatgtgaagtgaaaatattagccttaactttaaaatttgggtgtttgatagtgtttattttgatattggtgaattagtcaccagtaaattttaaaaaagcacttggttgaaaattgtacttgaatacatacatgcatgctgctaaactagaactttaatttttccccataacttttataagtcccatttataaacccacttttaaaaataacaggtccaagttagagtgatgtgtgtatattattcaaaaaaatgtactggtgtgatatcttgtatgaatgatcatttaaatacagtacattactgtagaagctaaattgatctttataattaagcagaaattacaaaactaggaataatcaacattgtaagatatgttaataaaaacctgctgtcatttggtttgtgaaaggtccttaaaa

SEQ ID NO: 197079 - DNA, 5411 bp, Homo sapiens
  Payload ID: 18868
  Gene Name: ubiquitin protein ligase E3 component n-recognin 3 (putative)
  ENST ID: ENST00000430321
  CDS Start-End: 1-1153
tcccaaagctgaagtctgggatcaagagtttgaccccgtcatggtcattcttcgaacagtttaccgtagagatgtgcagtctgcaatggacagatatactgcatttttaaaacagagtggaaaatttcctggaaatccctggcctccatataagaaaaggacatcactccatcctagctataaaggtcttatgagacttttgcactgtaaaactttacacattgtgctattcactctgctttacaagattttgatggatcatcaaaatctgtcagaacatgtactctgcatggttttatatctgattgaattaggacttgaaaattctgctgaagaagaatcagatgaagaggcatcagtgggtggaccagaacgttgtcatgacagttggtttcctggcagtaacttagtgtcaaacatgcgacactttataaactatgttagagtaagagttccagagactgctcctgaagtaaagagagactcacctgcaagtactagctctgataacttgggttctttacaaaattctggtacagctcaagttttcagtttagtagcagaacgtagaaagaaatttcaggaaatcatcaatcgcagtagcagtgaagcaaatcaggtggttcgtcccaaaacttcaagtaaatggtctgctcctggttcagctccacagttaactacagccattttggaaattaaagaaagcatattgtctttgctaattaaacttcaccacaaactctcaggaaaacaaaactcctactatcctccttggcttgatgacatagaaattttaatccaaccagaaattcctaaatacagtcatggagatggtataactgccgtggaaagaattttactaaaagctgcatcgcaaagtagaatgaacaaacgcatcattgaagagatatgtagaaaagtgacccctcctgtaccacctaaaaaagtcactgcagcagagaagaaaacattggacaaagaagaaaggcgacagaaggctagagagaggcagcagaaattgcttgcggagtttgcttcacgacagaaaagctttatggaaactgcaatggatgttgtgagacaaaacaaaaacaattttctgaggaatcaattaagcaacgtacccagagcagattgggtggtattgccttgaataagagaatggtcaccttatcctctgaggaaactggagggaaggaggaaagaatggatggagatagagagtggcccctcctctgaagatcgacctactggattagttgtactgttacaagcatcctcagttttggggcagtgccgtgacaatgttgagccaaaaaagttgccgatcagtgaagaggagcagatttacccttgggatacctgtgcagccgttcatgatgtgaggctttcattattacagcgttattttaaggatagttcatgtctcttggcagtatcaattggctgggaaggaggtgtttatgtacaaacctgtggtcacacattacatatagattgtcataaatcttacatggaatcattacggaatgaccaggttcttcagggcttctcggtggacaaaggagaattcacgtgtccactctgtaggcagtttgctaacagtgttcttccatgttatcctggaagcaatgtggaaaataacccttggcaacgtcctagcaacaaaagcatacaagatctcataaaggaagtggaggagctgcagggacgaccgggagctttcccagtaagcatcagttcagaaacaaatttaagtaaagaaatggaatctgtaatgaaagatataaaaaataccactcagaagaaatatagagactatagcaagaccccgggctcaccagacaatgattttctctttatgtactctgttgctagataccatctaacctccaatgaatgataaccatttctctgatagaaaaattgaaccaatttagaacttgaattgattcatcgaggaggcaatttgtgttcaggtggtgcaagcacagctggcaaaaggtcttgtttaactgtttcatgtattagccttgcacatgcggctttatagcattgactctgagtataatccctggagaaagctcacccagttagaagagatgaatccacagctgggatatgaagaacaacagcctgaggttccaattctttatcatgatgtaacatcccttttgctcatccagatcttaatgatgccacaacccttacgcaaagagtacatgtgatgcagaaaagtcttacgaagtattactgagctttgtgataagtgaactatttaaaggaaagttataccatgaagaaggaactcaggaatgtgcaatggttaaccctattgcttggtctcctgaatccatggaaaaatgcttacaggacttctgcttaccttttctcagaatcaccagccttcttcagcaccacctttttggggaagatttacctagctgccagaatttcctatttcatgtctaaaaggaagaagaagaattttcagttcttgccagctgcctgggacttctgccaacgttttaccaaacagaacatccattcatcagtgcctcctgtctggattggccagttccagcatttgatattataactcagtggtgttttgagataaaatcatttactgaaagacatgcagaacaaggaaaggccttgcttatccaagagtcaaaatggaaattaccacacctactacagttgcctgagaattataacaccatttttcagtactaccacagaaaaacctgtagtgtctgcaccaaggttcctaaagatcctgctgtttgccttgtgtgtggtacttttgtatgcctgaaaggactttgctgcaagcaacaaagttactgtgaatgtgtactgcactctcagaactgtggtgcaggaacaggtattttccttttgatcaatgcatcggtaattatcatcattcgaggtcaccgcttctgcctctggggttccgtgtatttggatgctcatggagaggaagaccgggatcttaggcgaggcaaacctctctacatttgtaaggaaagatacaaagttcttgagcaacagtggatttctcatacttttgatcacatcaataaaagatggggtccacattacaatgggctgtgactctccacctcagcattgcatcgtatcatcattttcgctacgaatttatttttcaacaataagctttaacttaatttgggggattaacacttttgctgagggagaaaaagaaaacatacattatgaagcctttccaaaattaggtgcttggtaatcacgttaatggtataattttttttttttaatatctggagaacattaataacaagttaaattattctttagtggtcattttttaagtgcacaattaataagaagcacaacttgttcacaaactcattcagaaatgattctcccaacaatgcgtatcagctattcattgatacttagagtgggtgtgatttatttgacattttactgcttctttctgtctgtgtgttttaatttgcatctgccaagcataatgcatcttttttcctctgccattcttgtgttgattggagaatttttctgtatgtaattagaaaaaaatgtaaaacatgatttatgtgaaatactgtatagtaaaagttggtctaatagtagaactttaaaattttttcttattgtgaggaatctgttaaaagtttaaagctttgctgaaaactgaattcattctcaggaatttcataaatcttctccccaggtaaataattgaaatagctgtaaaataagtagatagctgctgttaatataatacagtacattttggggggcatatgtgtggttggggggtccttaaaaatcaaaatttgccatttcagttggatgaattactagaggtaataacaaatcttactatgaaatcaagaggtttaagaacatacactgggcagatgttgattccgtgcatgcccaccttttattaccaaacaaggttttgtttatatgattgtattagaaatgctcagacttccccagaaatgaaccataaattttggaacttcctttcagctcaagaggttcagctatattgtatttgtgcagtgtaatcactactatttctgctcggtttcctaaaaggaaaaaaaaggcgcagtggtgatgaccctcatgaatgagccacgcttctgcattcttcttagaaactgctgtgaaaaacaatttatgtttgcagggtttaaaaatcagtaaaaatgggaatgattgagctaaaacccactctatgagaaggaagattactgaaaagcatgtgacatattgctacaaagattttttttcctaaatgattcagtaattgaatgattatttaatatatagtgctatcaagcaatccctggtactttggacttccatggcttgttatataaaattacatttttacatgtaaaaataaactaaacaaatctaatgataaaatatgtcagatccatgttctaaaaaatttttgtaatgacatgacattacaagagtataaaaatggacattaaatcatggccttgcattaaaatatggaaagcagagcagtacatattcaaatgtattcagaaagtcaaaagattacctatcgttctacaataaaatacatggaaatagcttgctatttttatatacatttccaaaatattaagataactttctgtaagagtcaatgattctgttcgactaaatagctgtcctttccaacacattgctacttttttaaatactgtatcataagttcagcctgtcatactttttgcattgatcgttatgaataccagaccatttgtaagtgtggttgaagagcaaaatgctaattgacatctctagtaaatactgttacaggattcatgaacttgaataattctacagtttgaaactctgatgctatatatacatggtataatgtattcagactttgattactacttatttaaaatggaatgttttatggttgtgcatatggatgtgaagtgaaaatattagccttaactttaaaatttgggtgtttgatagtgtttattttgatattggtgaattagtcaccagtaaattttaaaaaagcacttggttgaaaattgtacttgaatacatacatgcatgctgctaaactagaactttaatttttccccataacttttataagtcccatttataaacccacttttaaaaataacaggtccaagttagagtgatgtgtgtatattattcaaaaaaatgtactggtgtgatatcttgtatgaatgatcatttaaatacagtacattactgtagaagctaaattgatctttataattaagcagaaattacaaaactaggaataatcaacattgtaagatatgttaataaaaacctgctgtcatttggtttgtgaaaggtccttaaaa

SEQ ID NO: 197080 - DNA, 4031 bp, Homo sapiens
  Payload ID: 18869
  Gene Name: ubiquitin protein ligase E3 component n-recognin 4
  Uniprot ID: Q5T4S7
  ENST ID: ENST00000375218
  CDS Start-End: 1154-1792
cctgtgggaagctcagtcagcattctgaggagttatttgcatggtgataggctcttacataggaattgacaagcgcctgagagaagagcgaatctgcctagttgagattccaatcccctccatgtaggccagggtcttgcaaatagaaggtactcaaaatgtcattgctgagttcagggtttggtgagtagtaatgtagaaaggtctgtatagcctgggcaacatagtgagacttcatctcttaaaaaaaaatttaaaaaagttagccaggcgtggtggcgtgtacctgtggtcccagctgctggggaggctgaggcaggaggatggcttggggccagaagttcgagggtgcaatgaactgtgatccacgccactgcactccagcctgggtgacagagtgagaccctgtctcaaaaaaaaaaaaaaaaaaaggtctttagtttcaagggtttaagttaaataaggtgaaacaaatttaaagaaaatgtcttcctttttttaaaaaaacttctaaaagaggatattggttaaattgacagtttattatttctctggtttagtagtgactgttctttaaaaaaaatttaaaaaaactttattgagataatttatgtattaacctattttaaatgtacagttcaatgatttttagtaaatttaattgtgactcttgagtcaaattttactactttttagaattcctctgaaggatagatcaaagattaggaaacatctaaggtcagttagttgaaatttctttcctgtggcttcgtaaccctattgggatttctcctgtgtccttgagttctcactagggtggggctcactttgggctcactttggctcacattgagccatggctttgtcatgatttttttgtgaaactcagtgcttcctaagatgaaaatgtgttcatgctaagactggtttcttccttagcactttgtctggcttagtggagtttgatggctattacctggagagcgatccctgcctggtgtgtaataacccggaagtaccgttctgttatatcaagctgtcttccattaaagtggacacgcggtacaccaccacccagcaggttgtgaagctcattggcagtcacaccatcagcaaagtgacagtgaaaatcggggatctgaaacggaccaagatggtgcggaccatcaacctgtattataacaaccgaaccgtgcaggccatcgtggagttgaaaaacaagccagctcgctggcacaaagccaagaaggttcagctgacccctggacagacagaggtgaagattgacctgccgttgcccattgtggcctccaatctgatgattgagtttgcagacttctatgaaaactaccaggcctccacagagaccctgcagtgccctcgctgtagtgcctcggtccctgccaacccaggagtctgtggcaactgtggagagaatgtgtaccagtgtcacaaatgcagatccatcaactacgatgaaaaggatcccttcctctgcaatgcctgtggcttctgtaaatatgcccgcttcgacttcatgctctatgccaagccttgctgtgcagtggatcccattgagaatgaagaagaccggaagaaggctgtatccaacatcaatacacttttggacaaagctgatcgagtgtatcatcagctgatgggacaccggccacagctggagaacctgctctgcaaagtgaatgaggcagctccagaaaagccacaggtagtcccacgctgcaaagggcatttggataagggcttgggtcttgatcagaagactgcctcctaggtgagatcaccttaggtggggagcctgacagcttacctcttggggttgcaggatgactcaggaacagcagggggcatcagctccacttctgccagtgtgaatcgttacatcctgcagttggctcaggagtattgtggagactgcaagaactcttttgatgaactctccaaaatcatccaggtagagagcggggagcagcttttgggtgtgttttgtccaagtgttactggtgttgttttcacagcagtcctgctgctctctcatctagcagtccaggtcttggtgttgtccctgcccaatctagctgaaaaggcaggcagatggctgcaccaaacggcatctcccccaccgtgatttatggcgctggtcagaatgctgagttcatgctagataactgaacatactggtgatgggaaggtaacacagataagggttttttttagccattaacaacccatctcttagtagaggggttactggtcttaaaaaatttgatgccaagattctgttccctcttctgataacgccgtgtttgcaggctgtagggtaagggcataccaactgcaatcaaccagggtgggccttgtgtcagttgcaatgtcacagacctaatctccatgagatgggaggctggccatagacagaggtacctcatataaggagagcatccagtttaccttccccctcaaccccaaattgctggagtgccatctttgctacacgtgtattagcttctgacctttgtctttgttacatgggagttaagagcataagcctgccatctgagtctgagttctgactctgccacttatcttggtcaagccactttctccaagcttcagtttccttctctgtaaaatggagataaagcatctaaccagttgggttattgagaagattaagttatataatgcatgtaaagttttttctaaagcaaaactaattttctaattaacatcctcttcttattttaattgctaattcccattattgttgcctttttgttcttagaaagtctttgcttcgcgcaaagagttgttggaatatgacctacagcagagggaagcagccactaaatcatcccggacctccgtgcagcccacattcactgccagccagtaccgtgccttatccgtcctgggctgtggccacacatcctccaccaagtgctatggctgcgcctcggctgtcacagaacattgtatcacactacttcgggccctggccaccaacccagccttgaggcacatccttgtctcccagggccttatccgggagctctttgattataatcttcgccgaggggctgcggccatgcgggaggaggtccgccagctcatgtgcctcctaactcggtcagtacctacaccatggttatgggcctagtggttcctactgacactggcagccatgccaggagcgttagagagtgcacagaatagtgcttctgaccacccagcaagttaggtagcttataacaaaggaaagatggaaagagacacagggtgtaggtgagcgagcttggggagcattgaaacccaggtttccttgtaaatggcatgattggcttgtgcttttttggttccagtacagtgtcttgaggaaactctccctgaggccttgtgagggaagggaagggagacacttgaactcgagaaagactcacatgaaagaagcagagcagtggggcctggagattaagagcttggactctggattggaaaggctcagtttcagtatctgataccttgtactatacgccttggacagattccttaatttctctgagtctgtgttttcctcatctgaaaaatactgacagtaggctgggcacagtggctcttgcccgtaatcccagcactttggcacctgaggctggcagatcacttgaggtcaggagttcaagaccagcctggccaacatggtaaaacctcgtctccattaaaaatacaaaaatagggccaggtgctgtggctcatgcctgtaatcccagcactttggcaggccaaggcgggtggatcacctgaggtcgggagttcaagaccagcctgaccaacatggagaaaccccatctccactgaaaatacaaaattagacaggtgtagtggtgcatgcctgtaatctcagctacttgggaggctgagacaggagaatcgcttgaacctgggaggcggagattgtggtgagtcgaaatcgtgccattgcactccagcctgggcaacaagcgagactccgtctc

SEQ ID NO: 197081 - DNA, 3475 bp, Homo sapiens
  Payload ID: 18869
  Gene Name: ubiquitin protein ligase E3 component n-recognin 4
  ENST ID: ENST00000375224
  CDS Start-End: 485-3157
ttttatgacttcattgtatttattatgtagctgtagcaaactcttgggagcatttggactgtttacagtttttaagcaatcccttaccagcgctgtgactgttggcttcctggaaaggagttctgcaagggttcgattaagaagatgtaactacagagtgtctggtgctgcaagctcctgggacagtggtggaggtaactggtatccttggcagtgatatcacactgactgcacttgtcatcctgtttaggaaatagctcgtctgctggccctggaggaggctaccctgagtaccgatctgcagcagggttatgcccttaaaagtctcacaggccttctctcctcctttgttgaggtggaatccatcaaaagacattttaaaagtcgcttggtgggtactgtgctgaatggatacctgtgcttgcggaagctggtggtgcagaggaccaagctgatcgatgagacgcaggacatgctgctggagatgctggaggacatgaccacaggtacagaatcagaaaccaaggccttcatggctgtgtgcattgagacagccaagcgctacaatctggatgactaccggaccccggtgttcatcttcgagaggctctgcagcatcatttatcctgaggagaatgaagtcactgagttctttgtgaccctggagaaggatccccaacaagaagacttcttacagggcaggatgcctgggaacccgtatagcagcaatgagccaggcatcgggccgctgatgagggatataaagaacaagatttgccaggactgtgacttagtggccctcctggaagatgacagtggcatggagcttctagtgaacaataaaatcattagtttggaccttcctgtggctgaagtttacaagaaagtctggtgtaccacgaatgagggagagcccatgaggattgtttatcgtatgcgggggctgctgggcgatgccacagaggagttcattgagtccctggactctactacagatgaagaagaagatgaagaagaagtgtataaaatggctggtgtgatggcccagtgtgggggcctggaatgcatgcttaacagactcgcagggatcagagatttcaagcagggacgccaccttctaacagtgctactgaaattgttcagttactgcgtgaaggtgaaagtcaaccggcagcaactggtcaaactggaaatgaacaccttgaacgtcatgctggggaccctaaacctggcccttgtagctgaacaagaaagcaaggacagtgggggtgcagctgtggctgagcaggtgcttagcatcatggagatcattctagatgagtccaatgctgagcccctgagtgaggacaagggcaacctcctcctgacaggtgacaaggatcaactggtgatgctcttggaccagatcaacagcacctttgttcgctccaaccccagtgtgctccagggcctgcttcgcatcatcccgtacctttcctttggagaggtggagaaaatgcagatcttggtggagcgattcaaaccatactgcaactttgataaatatgatgaagatcacagtggtgatgataaagtcttcctggactgcttctgtaaaatagctgctggcatcaagaacaacagcaatgggcaccagctgaaggatctgattctccagaaggggatcacccagaatgcacttgactacatgaaaaagcacatccctagcgccaagaatttggatgccgacatctggaaaaagtttttgtctcgcccagccttgccatttatcctaaggctgcttcggggcctggccatccagcaccctggcacccaggttctgattggaactgattccatcccgaacctgcataagctggagcaggtgtccagtgatgagggcattgggaccttggcagagaacctgctggaagccctgcgggaacaccctgacgtaaacaagaagattgacgcagcccgcagggagacccgggcagagaagaagcgcatggccatggcaatgaggcagaaggccctgggcaccctgggcatgacgacaaatgaaaagggccaggtcgtgaccaagacagcactcctgaagcagatggaagagctgatcgaggagcctggcctcacgtgctgcatctgcagggagggatacaagttccagcccacaaaggtcctgggcatttataccttcacgaagcgggtagccttggaggagatggagaataagccccggaaacagcagggctacagcaccgtgtcccacttcaacattgtgcactacgactgccatctggctgccgtcaggttggctcgaggccgggaagagtgggagagtgccgccctgcagaatgccaacaccaagtgcaacgggctccttccggtctggggacctcatgtccctgaatcagcttttgccacttgcttggcaagacacaacacttacctccaggaatgtacaggccagcgggagcccacgtatcagctcaacatccatgacatcaaactgctcttcctgcgcttcgccatggagcagtcgttcagcgcagacactggcgggggcggccgggagagcaacatccacctgatcccgtacatcattcacactgtgctttacgtcctgaacacaacccgagcaacttcccgagaagagaagaacctccaaggctttctggaacagcccaaggagaagtgggtggagagtgcctttgaagtggacgggccctactatttcacagtcttggcccttcacatcctgccccctgagcagtggagagccacacgtgtggaaatcttgcggaggctgttggtgacctcgcaggctcgggcagtggctccaggtggagccaccaggctgacagataaggcagtgaaggactattccgcttaccgttcttcccttctcttttgggccctcgtcgatctcatttacaacatgtttaagaaggtgcctaccagtaacacagagggaggctggtcctgctctctcgctgagtacatccgccacaacgacatgcccatctacgaagctgccgacaaagccctgaaaaccttccaggaggagttcatgccagtggagaccttctcagagttcctcgatgtggccggtcttttatcagaaatcaccgatccagagagcttcctgaaggacctgttgaactcagtcccctgaccaccacacagcagctgcggcggcgaagacgaagctggcttgccttccaccctctgttctccctccttgtgcattaagttccctccgcgggatgctgcattgttaccccgccctcccctctctcatttttcttggtgtggcttggggtttttaggcttcctgttttatctcgtgtgtgtggtgcaccagctatgaggttgtctgtaacccaagccatcaaagggcctgtacatacctaggagccatgagttgtcccggccagcttcatacttgagtgtgcacatcttgagaaataaacaagtgacttaacacacattg

SEQ ID NO: 197082 - DNA, 1533 bp, Homo sapiens
  Payload ID: 18869
  Gene Name: ubiquitin protein ligase E3 component n-recognin 4
  ENST ID: ENST00000375225
  CDS Start-End: 435-1211
cactgagtctggtgtggtcatcatcatcatcatcattgcaacttaggacgcatgaggacaagaagcagcgctcatctggaagaggctgttctaacgaaggcgggaggatcctagatcagaagaagacaaaccggaagagggagcctaggaaaggaaccacatgcacatttagtgcaaaccatgtaaacataacataacaagactatgtggagcaagggggagtcaggctgtggacccaccagggaatcttgattcatgtttttggccccatcactcactagcttgctgactttgggcaagtcacttcacttttctgggcctctggagttactagcacagttccatgttggggagattgtgaacgtccctgatatatggtgctcaggaaccagtagttgcttggaattgtattagagctggggtaggagctagacatggggccagggaagaagggaagatgccgcgaagaagggcctggaaggggacgaagggcgtggattatcagaggaagtgggagtagtcggcaaggatgggtggggagtgttgagtcatccaagcgttcagcaaatgtcacaagacaacgacaaattgagcaaattcttcctgctcttgctgccgggtcctgcttccaccctgcttttattttatcatgccgcttttcttctagaacccgagcaacttcccgagaagagaagaacctccaaggctttctggaacagcccaaggagaagtgggtggagagtgcctttgaagtggacgggccctactatttcacagtcttggcccttcacatcctgccccctgagcagtggagagccacacgtgtggaaatcttgcggaggctgttggtgacctcgcaggctcgggcagtggctccaggtggagccaccaggctgacagataaggcagtgaaggactattccgcttaccgttcttcccttctcttttgggccctcgtcgatctcatttacaacatgtttaagaaggtgcctaccagtaacacagagggaggctggtcctgctctctcgctgagtacatccgccacaacgacatgcccatctacgaagctgccgacaaagccctgaaaaccttccaggaggagttcatgccagtggagaccttctcagagttcctcgatgtggccggtcttttatcagaaatcaccgatccagagagcttcctgaaggacctgttgaactcagtcccctgaccaccacacagcagctgcggcggcgaagacgaagctggcttgccttccaccctctgttctccctccttgtgcattaagttccctccgcgggatgctgcattgttaccccgccctcccctctctcatttttcttggtgtggcttggggtttttaggcttcctgttttatctcgtgtgtgtggtgcaccagctatgaggttgtctgtaacccaagccatcaaagggcctgtacatacctaggagccatgagttgtcccggccagcttcatacttgagtgtgcacatcttgagaaataaacaagtgacttaacacacattgaaaa

SEQ ID NO: 197083 - DNA, 15906 bp, Homo sapiens
  Payload ID: 18869
  Gene Name: ubiquitin protein ligase E3 component n-recognin 4
  Uniprot ID: Q5T4S7
  ENST ID: ENST00000375254
  CDS Start-End: 29-15580
ggagggagccgcagtagtacgacggaagatggcgacgagcggcggcgaagaggcggcggcagcggctccggcgccggggaccccggcaacgggggcggacacgaccccgggctgggaggtggctgtgcggcccctgctgtccgcgtcctactccgccttcgagatgaaggagttgccgcagctggtggcctcagtcatcgagagtgaatcagaaatcctgcaccatgagaagcagtacgagccattctactcatcttttgttgcactttccacacactatattacaacagtttgcagtctcattccccggaaccaacttcagtcagtggcagcagcctgtaaagttctaattgagttttctctcctgcgtctggagaatccagatgaggcttgtgctgtgtcccagaaacacttgattctcctaatcaagggcctgtgcactggctgtagccgactagatagaactgaaattatcacatttacagcaatgatgaaatccgccaagctgccccaaacagtgaagacactttcagacgtggaagatcagaaagagctggcctcaccagtaagccctgagttgaggcaaaaggaggtacagatgaattttttgaaccagctgacctcagtttttaaccctagaactgtagcatcacaacctatcagtacacagactctggtggaaggagaaaatgatgagcagtcatctacagatcaagcctcagctatcaaaaccaagaatgtgttcatagctcagaacgtggctagtcttcaagagcttggtggctcggagaagctactgcgtgtatgtttgaacctgccatatttcctacgctatatcaatcggttccaagatgcagttttagctaattccttcttcataatgcctgcaacagtagcagatgccactgctgttcgtaatggctttcattcattggtgattgatgtaactatggcattggataccctttctctacctgtgttggaacctctcaatccttctcgtctacaagatgtgacagtcctcagcctaagttgtctgtatgcaggtgtgagtgtggcaacgtgcatggccatcctccatgtgggtagtgcccagcaagtgcggacagggtccacgagctccaaagaagatgactatgaaagtgacgcagctacaattgtccagaaatgtctcgaaatctatgacatgattggacaagcaatcagcagttctcgccgggctggtggtgagcactatcagaatttccaattgctgggtgcttggtgcttgttaaacagccttttcctcatactgaacctcagtcctactgcgttggctgataaggggaaagagaaggacccactggctgccctccgagtcagagacatcctttctcgtactaaagagggagtgggctcccctaaactggggcctggaaaagggcatcagggatttggggtactctcagtaatattggcaaaccatgccatcaaactgctaacgtctctctttcaagacctacaagtggaggcccttcacaagggttgggagacagatggcccccctgcagccttgagcattatggcccagagcacctccatacagaggattcaacggctgattgactctgtcccactgatgaacctgctcttgacgttactttcaacttcctacagaaaggcatgtgtcctgcagcggcagaggaagggctccatgagcagcgatgccagcgcctccaccgactccaatacttactatgaggacgatttcagtagcacggaggaggacagcagccaagacgatgacagtgagcctattttggggcaatggtttgaggagactatttctcccagtaaagagaaagcagcacctccgcctcctcccccacctcctccactggaaagctctcctcgggttaaaagccccagtaagcaggcccctggtgagaagggcaacattctggcgagtcgcaaagatcctgagttgttcttaggtctggcttccaacattttgaacttcatcacctcttccatgctgaactctcggaacaattttatccgaaactatctgagtgtatctctttcagaacaccatatggccaccctagccagtatcatcaaggaggtggacaaagatggactcaagggttcatcagatgaagagtttgctgcagctctctatcacttcaaccactcactggtaacctctgaccttcagtcacctaacctgcagaacacactgttgcagcagctaggagtggctcctttttctgagggcccttggcccttgtacattcaccctcaaagcctctctgtgctttcacgcctcctgctcatctggcaacataaagccagtgctcaaggtgaccctgacgtcccagaatgccttaaagtttgggacaggtttttgtctacaatgaagcagaatgccctgcaaggtgtggtgcccagtgagacagaggatctgaatgtagaacacctgcagatgctcctcctcattttccacaatttcaccgagacaggccggcgggccatattgtcgctttttgtccagatcatccaggagttgagcgtcaacatggatgctcagatgcgcttcgtgccgcttatcttggctcgcctccttctcatctttgattatctgcttcatcagtactccaaagcccctgtgtatctatttgagcaggtacagcataacctgctaagtcctccctttgggtgggcaagtggatcccaggacagcaacagccgccgggcaaccactcctctctatcatggattcaaagaagtagaagaaaactggtctaagcatttctcatcagatgctgtcccacaccccagattctactgtgtcctgtccccagaagcctcagaggatgatttgaaccgacttgattctgtggcatgtgacgtccttttctccaagcttgtcaagtatgatgagctttatgctgcactgacagccctgcttgcagctgggtcccagcttgatacagttaggagaaaggaaaacaagaatgtaacagccttggaggcctgtgcccttcaatattacttcttgatactgtggaggatcctaggaattttaccaccatcaaagacttacattaaccagctatccatgaactcacctgagatgagcgaatgtgacatcttgcacactctgcgatggtcttctcggctccggatcagctcctatgtcaactggataaaggatcaccttatcaaacagggaatgaaggctgagcatgctagctcgcttctagaactggcatccaccactaagtgtagctcagtgaaatatgatgttgaaatagtagaggaatacttcgctcgacagatctcatccttctgtagtatcgactgtaccaccatcttgcagctgcatgaaattcccagtctgcagtccatctacacccttgatgccgcgatctcaaaggtccaggtctctttggatgagcatttttctaagatggctgctgagactgatcctcataagtcgtctgagattaccaagaacctacttccagccacgctgcaactcattgacacctatgcatcgttcaccagagcctatttgctgcaaaactttaatgaagagggaacaactgagaaaccttccaaggagaaactgcaaggctttgctgctgttttggctattggctctagcaggtgcaaggcaaatactctgggtccgacactggttcagaatttgccatcgtcagtgcagactgtgtgtgagtcctggaacaacatcaataccaatgaatttcccaatattggatcctggcgcaatgcctttgccaatgacaccatcccttcagagagttatattagtgcagtgcaggctgcacacctggggactctctgtagccaaagtctgcccctggctgcttccctgaagcataccctcctctcactggtcaggttgactggagatcttattgtttggtcagatgagatgaacccaccacaggtaattcggacactgctacctcttcttttggaatcaagcactgagagtgttgccgagatcagtagcaactccctggaacgcatcttgggccctgctgagtctgatgagttcttggctcgtgtttatgagaagctgatcactggttgttacaacattctggccaatcatgcagatcctaacagtggactggatgaatccatcctggaggaatgtctccagtacttggaaaagcagctggaaagtagccaggctcgtaaagctatggaggagtttttctctgacagtggagaacttgtacagatcatgatggcaacagccaatgagaacctctctgctaaattctgtaaccgagttttgaaattcttcaccaaactcttccagctgactgagaagagccctaacccgagcctgttgcatctctgtggctccctggcacaactggcctgtgtggaacctgtgcgcctgcaggcctggctcacccgcatgactacatcgcccccaaaagattctgatcagctggatgtaattcaggagaaccggcagctgctgcagttactgaccacatacattgttcgggaaaacagccaagttggggaaggtgtgtgtgctgttcttctgggcaccctgactcccatggcaacagagatgctggccaacggtgatgggactggcttccctgaacttatggttgtgatggccactctggccagtgcaggtcaaggtgctggtcaccttcagcttcataatgctgctgtggattggctgagcagatgcaagaaatacctgtcacagaagaatgtagttgaaaaactgaatgccaatgtaatgcatggaaagcatgtgatgatcttggagtgcacatgccatatcatgtcttacttggctgatgtcacgaatgccctgagccagagtaatggtcaaggcccaagtcatctctcagtggatggggaagagcgggccattgaagtagactcagactgggtggaggagttggcggtggaagaggaagattcccaggctgaggattcagatgaagattctctttgcaataaactctgcacttttacgatcacacagaaagaattcatgaaccagcattggtaccactgtcacacctgtaaaatggtggatggcgtgggtgtctgcacagtgtgtgctaaggtgtgccacaaggatcatgagatttcctatgccaagtatggatccttcttctgtgactgtggagccaaggaagatggcagctgtttggctctggtgaagagaactcctagcagtggcatgagctctaccatgaaggagtcggcatttcagagtgaacccaggatttcagagagtctagtgcgtcatgccagcacctcctcgccagctgacaaagccaaggttaccatcagtgatggaaaggttgctgacgaagagaagcccaagaagagcagcctctgccgcacagtagagggctgccgggaggaattacagaaccaggccaatttctccttcgctcctctcgtgttagacatgcttaatttccttatggatgccattcagaccaacttccagcaagcttcagccgtcgggagcagcagccgtgctcagcaagccctcagtgagctacacactgtggagaaggcagtggagatgacagaccagctgatggttcccaccttagggtcccaggaaggtgcctttgagaatgtgcggatgaattacagtggagaccagggccagaccatccggcagctgatcagtgctcatgtgctcaggcgggtggctatgtgtgtgctctcctctccccatgggcgccgccaacatttggctgtcagccatgagaagggcaagatcaccgttctgcagctctctgcactcctgaagcaagcagattccagcaaaaggaagttaactctgacccgcttggcttctgccccagttccttttactgtgttgagcctcacaggaaatccctgcaaggaagactacttggcggtttgtgggctaaaggactgtcatgtgctcacctttagtagctcaggctctgtttcggatcacttggttttgcaccctcagttggcaacggggaacttcatcatcaaagccgtgtggttacctggttcacagaccgagttagcaattgtcaccgcagactttgttaagatttatgacctgtgtgttgatgccttgagtccaaccttctattttctcctgccaagctcaaagataagagatgttaccttccttttcaatgaggagggaaagaacatcattgttataatgtcttcggctgggtacatctatactcagcttatggaagaggccagcagtgcccagcagggacccttctatgtcactaatgtgttggaaatcaatcatgaggacctgaaggacagtaacagccaggtggcgggcggtggtgtgtccgtgtactactcccacgtgttgcagatgttgttcttcagctattgtcaaggcaaatcattcgcagccaccatcagcaggacaaccctggaggtgttgcaactcttccccatcaacatcaaaagttccaatggtggcagtaagacttctcctgctctttgccagtggtctgaggtgatgaaccaccctggcttggtgtgctgtgtccagcaaactacaggggtgccgctggtagttatggtgaaaccagacacttttcttatccaggagattaagactcttcctgctaaagcgaagatccaagacatggttgctattaggcacacggcctgcaatgagcagcagcggacaacaatgattctgctgtgtgaggatggcagcctgcgcatttacatggccaacgtggagaacacctcctactggctgcagccatccctgcagcccagcagtgtcatcagcatcatgaagcctgttcgaaagcgcaaaacagctacaatcacaacccgcacgtctagccaggtgactttccccattgacttttttgaacacaaccagcagctgacagatgtggagtttggtggtaacgacctcctacaggtctataatgcacaacagataaaacaccggctgaattccactggcatgtatgtggccaacaccaagcccggaggcttcaccattgagattagtaacaacaatagcactatggtgatgacaggcatgcggatccagattgggactcaagcaatagaacgggccccgtcatatatcgagatcttcggcagaactatgcagctcaacctgagtcgctcacgctggtttgacttccccttcaccagagaagaagccctgcaggctgataagaagctgaacctcttcattggggcctcggtggatccagcaggtgtcaccatgatagatgctgtaaaaatttatggcaagactaaggagcagtttggctggcctgatgagcccccagaagaattcccttctgcctctgtcagcaacatctgcccttcaaatctgaaccagagcaacggcactggagatagcgactcagctgcccccactacgaccagtggaactgtcctggagaggctggttgtgagttctttagaagccctggaaagctgctttgccgttggcccaatcatcgagaaggagagaaacaagaatgctgctcaggagctggccactttgctgttgtccctgccagcacctgccagtgtccagcagcagtccaagagccttctggccagcctgcacaccagccgctcggcctaccacagccacaaggatcaggccttgctgagcaaagctgtgcagtgtctcaacacatctagcaaagagggcaaggatttggaccctgaggtgttccagaggctagtgatcacagctcgctccattgccatcatgcgccccaacaaccttgtccactttacggagtcaaagctgccccagatggaaacagaaggaatggatgaagggaaggaaccgcagaagcagttggaaggagattgctgtagtttcatcacccagcttgtgaaccacttctggaaactccatgcatccaaacccaagaatgccttcttggcacctgcctgccttccaggactaactcatattgaagctactgtcaatgctctggtggacatcatccatggctactgtacctgtgagctggattgtattaacacagcatccaagatctacatgcagatgctcttgtgtcctgatcctgctgtgagcttctcttgtaaacaagctctaattcgagtcctaaggcccaggaacaaacggagacatgtgactttaccctcttcccctcgaagcaacactccaatgggagacaaggatgatgatgacgatgatgatgcagatgagaaaatgcagtcatcagggatcccgaatggtggtcacatccgtcaggaaagccaggaacagagtgaggtggaccatggagattttgagatggtgtctgagtcgatggtcctggagacagctgaaaatgtcaacaatggcaacccctctcccctggaggccctgctggcaggcgcagagggcttcccccccatgctggacatcccacctgatgcagatgacgagaccatggttgaactagccattgccctgagcctgcagcaggaccaacaaggcagcagcagcagtgccctgggcctgcagagcctgggactgtccggccaggcacccagctcttcctctctggacgcaggaaccctctctgacaccacagcatcagctccagcctcagacgacgagggcagtacagcagcgacagatggttctacccttcggacctctcctgctgaccacggtggtagtgtgggctcggagagcgggggcagtgcagtggactcagtggctggcgagcacagtgtatctggccggagcagtgcttatggcgatgctacagctgaggggcatccggctggaccaggaagtgtcagctcaagcactggagccatcagcaccaccactgggcaccaggagggagatggctccgagggagaaggagaaggagaaactgaaggagatgtccacactagcaacaggctgcacatggtccgtctaatgctgttggagagattactgcagaccctgcctcaattacgaaacgttggcggtgtccgggccatcccatacatgcaggtcattctaatgctcactacagatctggatggagaagatgagaaagacaagggggccctagacaacctgctctcccagcttattgctgagttgggtatggataaaaaggatgtctccaagaagaatgagcgcagcgccctgaatgaagtccatctggtagtaatgagactcctgagtgtcttcatgtcccgcaccaaatctggatccaagtcttccatatgtgagtcatcttccctcatctccagtgccacagcagcagctctactgagctctggggctgtggactactgcctgcacgtgctcaaatcactgctggaatattggaagagccaacagaatgacgaggagcctgtggctaccagccagttgctgaaaccacatactacctcctccccacctgacatgagcccattctttctccgccagtatgtgaagggtcatgctgctgatgtgtttgaggcctatactcagcttctaacagaaatggtactgaggcttccttaccaaatcaaaaagattactgacaccaattctcgaatcccacctcctgtctttgaccactcgtggttttactttctctccgagtacctcatgatccagcagactccatttgtgcgccgtcaagtccgcaaacttctgctcttcatctgtggatccaaagagaagtaccgccagctccgggatttgcacaccctggactctcacgtgcgtgggatcaagaagctgctagaagagcaggggatattcctccgggcaagtgtggttacagccagctcaggctccgccttgcaatatgacacactcatcagcctgatggagcacctgaaagcctgtgcagagattgccgcccagcgaaccatcaactggcagaaattctgcatcaaagatgactccgtcctgtacttcctcctccaagtcagtttccttgtggatgagggcgtgtccccagtgctgctgcaactgctctcctgtgctctgtgcggcagcaaggtgctcgctgcactggcagcctcttcgggatcctccagtgcttcttcctcctcagcccctgtggctgccagttctggacaagccacaacacagtccaagtcttccactaaaaagagcaagaaagaagaaaaagaaaaggagaaagatggtgagacctctggcagccaggaggaccagctgtgcacagctctggtgaaccagctgaacaaatttgccgataaggaaaccctgatccagttcctgcgttgtttcctgttagagtccaattcttcctcggtgcgctggcaggcccactgtctgacactgcacatctacagaaattccagcaaatctcaacaggagctcctgctagatctgatgtggtccatctggccagaactcccagcctatggtcgtaaggctgcccagtttgtggacctactaggatatttctccctgaaaactccacaaacagagaagaagttgaaggagtattcacagaaggctgtggagattctgcggactcaaaaccatattcttaccaaccaccccaactcgaacatttataacactttgtctggcttagtggagtttgatggctattacctggagagcgatccctgcctggtgtgtaataacccggaagtaccgttctgttatatcaagctgtcttccattaaagtggacacgcggtacaccaccacccagcaggttgtgaagctcattggcagtcacaccatcagcaaagtgacagtgaaaatcggggatctgaaacggaccaagatggtgcggaccatcaacctgtattataacaaccgaaccgtgcaggccatcgtggagttgaaaaacaagccagctcgctggcacaaagccaagaaggttcagctgacccctggacagacagaggtgaagattgacctgccgttgcccattgtggcctccaatctgatgattgagtttgcagacttctatgaaaactaccaggcctccacagagaccctgcagtgccctcgctgtagtgcctcggtccctgccaacccaggagtctgtggcaactgtggagagaatgtgtaccagtgtcacaaatgcagatccatcaactacgatgaaaaggatcccttcctctgcaatgcctgtggcttctgtaaatatgcccgcttcgacttcatgctctatgccaagccttgctgtgcagtggatcccattgagaatgaagaagaccggaagaaggctgtatccaacatcaatacacttttggacaaagctgatcgagtgtatcatcagctgatgggacaccggccacagctggagaacctgctctgcaaagtgaatgaggcagctccagaaaagccacaggatgactcaggaacagcagggggcatcagctccacttctgccagtgtgaatcgttacatcctgcagttggctcaggagtattgtggagactgcaagaactcttttgatgaactctccaaaatcatccagaaagtctttgcttcgcgcaaagagttgttggaatatgacctacagcagagggaagcagccactaaatcatcccggacctccgtgcagcccacattcactgccagccagtaccgtgccttatccgtcctgggctgtggccacacatcctccaccaagtgctatggctgcgcctcggctgtcacagaacattgtatcacactacttcgggccctggccaccaacccagccttgaggcacatccttgtctcccagggccttatccgggagctctttgattataatcttcgccgaggggctgcggccatgcgggaggaggtccgccagctcatgtgcctcctaactcgagacaacccagaagccacccaacagatgaatgacctgattattggcaaggtctccacagccctgaagggccactgggccaaccccgatctggcaagtagcctgcagtatgaaatgctgctgctgacggattctatctccaaggaggacagctgctgggagctccggttacgctgtgctctcagccttttcctcatggctgtgaacattaagactcctgtggtggttgaaaacattaccctcatgtgcctgaggatcttgcagaagctgataaaaccacctgctcccactagcaagaagaacaaggatgtccccgttgaggccctcaccacggtgaagccatactgcaatgagatccatgcccaggctcaactgtggctcaagagagaccccaaggcatcctatgatgcctggaagaagtgtcttcctatcagagggatagatggcaatgggaaagcccccagcaaatcagagctccgccatctctatttgactgagaagtatgtgtggaggtggaaacagttcctgagtcgtcgggggaagaggacctcccccttggatctcaaactggggcataacaactggctgcgacaagtgcttttcactccagcaacgcaggccgcacggcaggcagcctgtaccattgtggaagctctagccaccattcccagccgcaagcagcaggtcctggacctgcttaccagttacctggatgagctgagcatagctggggagtgtgcagctgagtacctggctctctaccagaagctcatcacttctgcgcactggaaagtctacttggcagctcggggagtcctaccctatgtgggcaacctcatcaccaaggaaatagctcgtctgctggccctggaggaggctaccctgagtaccgatctgcagcagggttatgcccttaaaagtctcacaggccttctctcctcctttgttgaggtggaatccatcaaaagacattttaaaagtcgcttggtgggtactgtgctgaatggatacctgtgcttgcggaagctggtggtgcagaggaccaagctgatcgatgagacgcaggacatgctgctggagatgctggaggacatgaccacaggtacagaatcagaaaccaaggccttcatggctgtgtgcattgagacagccaagcgctacaatctggatgactaccggaccccggtgttcatcttcgagaggctctgcagcatcatttatcctgaggagaatgaagtcactgagttctttgtgaccctggagaaggatccccaacaagaagacttcttacagggcaggatgcctgggaacccgtatagcagcaatgagccaggcatcgggccgctgatgagggatataaagaacaagatttgccaggactgtgacttagtggccctcctggaagatgacagtggcatggagcttctagtgaacaataaaatcattagtttggaccttcctgtggctgaagtttacaagaaagtctggtgtaccacgaatgagggagagcccatgaggattgtttatcgtatgcgggggctgctgggcgatgccacagaggagttcattgagtccctggactctactacagatgaagaagaagatgaagaagaagtgtataaaatggctggtgtgatggcccagtgtgggggcctggaatgcatgcttaacagactcgcagggatcagagatttcaagcagggacgccaccttctaacagtgctactgaaattgttcagttactgcgtgaaggtgaaagtcaaccggcagcaactggtcaaactggaaatgaacaccttgaacgtcatgctggggaccctaaacctggcccttgtagctgaacaagaaagcaaggacagtgggggtgcagctgtggctgagcaggtgcttagcatcatggagatcattctagatgagtccaatgctgagcccctgagtgaggacaagggcaacctcctcctgacaggtgacaaggatcaactggtgatgctcttggaccagatcaacagcacctttgttcgctccaaccccagtgtgctccagggcctgcttcgcatcatcccgtacctttcctttggagaggtggagaaaatgcagatcttggtggagcgattcaaaccatactgcaactttgataaatatgatgaagatcacagtggtgatgataaagtcttcctggactgcttctgtaaaatagctgctggcatcaagaacaacagcaatgggcaccagctgaaggatctgattctccagaaggggatcacccagaatgcacttgactacatgaaaaagcacatccctagcgccaagaatttggatgccgacatctggaaaaagtttttgtctcgcccagccttgccatttatcctaaggctgcttcggggcctggccatccagcaccctggcacccaggttctgattggaactgattccatcccgaacctgcataagctggagcaggtgtccagtgatgagggcattgggaccttggcagagaacctgctggaagccctgcgggaacaccctgacgtaaacaagaagattgacgcagcccgcagggagacccgggcagagaagaagcgcatggccatggcaatgaggcagaaggccctgggcaccctgggcatgacgacaaatgaaaagggccaggtcgtgaccaagacagcactcctgaagcagatggaagagctgatcgaggagcctggcctcacgtgctgcatctgcagggagggatacaagttccagcccacaaaggtcctgggcatttataccttcacgaagcgggtagccttggaggagatggagaataagccccggaaacagcagggctacagcaccgtgtcccacttcaacattgtgcactacgactgccatctggctgccgtcaggttggctcgaggccgggaagagtgggagagtgccgccctgcagaatgccaacaccaagtgcaacgggctccttccggtctggggacctcatgtccctgaatcagcttttgccacttgcttggcaagacacaacacttacctccaggaatgtacaggccagcgggagcccacgtatcagctcaacatccatgacatcaaactgctcttcctgcgcttcgccatggagcagtcgttcagcgcagacactggcgggggcggccgggagagcaacatccacctgatcccgtacatcattcacactgtgctttacgtcctgaacacaacccgagcaacttcccgagaagagaagaacctccaaggctttctggaacagcccaaggagaagtgggtggagagtgcctttgaagtggacgggccctactatttcacagtcttggcccttcacatcctgccccctgagcagtggagagccacacgtgtggaaatcttgcggaggctgttggtgacctcgcaggctcgggcagtggctccaggtggagccaccaggctgacagataaggcagtgaaggactattccgcttaccgttcttcccttctcttttgggccctcgtcgatctcatttacaacatgtttaagaaggtgcctaccagtaacacagagggaggctggtcctgctctctcgctgagtacatccgccacaacgacatgcccatctacgaagctgccgacaaagccctgaaaaccttccaggaggagttcatgccagtggagaccttctcagagttcctcgatgtggccggtcttttatcagaaatcaccgatccagagagcttcctgaaggacctgttgaactcagtcccctgaccaccacacagcagctgcggcggcgaagacgaagctggcttgccttccaccctctgttctccctccttgtgcattaagttccctccgcgggatgctgcattgttaccccgccctcccctctctcatttttcttggtgtggcttggggtttttaggcttcctgttttatctcgtgtgtgtggtgcaccagctatgaggttgtctgtaacccaagccatcaaagggcctgtacatacctaggagccatgagttgtcccggccagcttcatacttgagtgtgcacatcttgagaaataaacaagtgacttaacacacattgaaaaggaa

SEQ ID NO: 197084 - DNA, 2954 bp, Homo sapiens
  Payload ID: 18869
  Gene Name: ubiquitin protein ligase E3 component n-recognin 4
  ENST ID: ENST00000425413
  CDS Start-End: 1-2954
gacttccccttcaccagagaagaagccctgcaggctgataagaagctgaacctcttcattggggcctcggtggatccagcaggtgtcaccatgatagatgctgtaaaaatttatggcaagactaaggagcagtttggctggcctgatgagcccccagaagaattcccttctgcctctgtcagcaacatctgcccttcaaatctgaaccagagcaacggcactggagatagcgactcagctgcccccactacgaccagtggaactgtcctggagaggctggttgtgagttctttagaagccctggaaagctgctttgccgttggcccaatcatcgagaaggagagaaacaagaatgctgctcaggagctggccactttgctgttgtccctgccagcacctgccagtgtccagcagcagtccaagagccttctggccagcctgcacaccagccgctcggcctaccacagccacaaggatcaggccttgctgagcaaagctgtgcagtgtctcaacacatctagcaaagagggcaaggatttggaccctgaggtgttccagaggctagtgatcacagctcgctccattgccatcatgcgccccaacaaccttgtccactttacggagtcaaagctgccccagatggaaacagactgtttttttcctagatgtgcctgctggagtctagggatagttggcatattgattggggccccacttgaaactccctccccagaaggaatggatgaagggaaggaaccgcagaagcagttggaaggagattgctgtagtttcatcacccagcttgtgaaccacttctggaaactccatgcatccaaacccaagaatgccttcttggcacctgcctgccttccaggactaactcatattgaagctactgtcaatgctctggtggacatcatccatggctactgtacctgtgagctggattgtattaacacagcatccaagatctacatgcagatgctcttgtgtcctgatcctgctgtgagcttctcttgtaaacaagctctaattcgagtcctaaggcccaggaacaaacggagacatgtgactttaccctcttcccctcgaagcaacactccaatgggagacaaggatgatgatgacgatgatgatgcagatgagaaaatgcagtcatcagggatcccgaatggtggtcacatccgtcaggaaagccaggaacagagtgaggtggaccatggagattttgagatggtgtctgagtcgatggtcctggagacagctgaaaatgtcaacaatggcaacccctctcccctggaggccctgctggcaggcgcagagggcttcccccccatgctggacatcccacctgatgcagatgacgagaccatggttgaactagccattgccctgagcctgcagcaggaccaacaagctccagcctcagacgacgagggcagtacagcagcgacagatggttctacccttcggacctctcctgctgaccacggtggtagtgtgggctcggagagcgggggcagtgcagtggactcagtggctggcgagcacagtgtatctggccggagcagtgcttatggcgatgctacagctgaggggcatccggctggaccaggaagtgtcagctcaagcactggagccatcagcaccaccactgggcaccaggagggagatggctccgagggagaaggagaaggagaaactgaaggagatgtccacactagcaacaggctgcacatggtccgtctaatgctgttggagagattactgcagaccctgcctcaattacgaaacgttggcggtgtccgggccatcccatacatgcaggtcattctaatgctcactacagatctggatggagaagatgagaaagacaagggggccctagacaacctgctctcccagcttattgctgagttgggtatggataaaaaggatgtctccaagaagaatgagcgcagcgccctgaatgaagtccatctggtagtaatgagactcctgagtgtcttcatgtcccgcaccaaatctggatccaagtcttccatatgtgagtcatcttccctcatctccagtgccacagcagcagctctactgagctctggggctgtggactactgcctgcacgtgctcaaatcactgctggaatattggaagagccaacagaatgacgaggagcctgtggctaccagccagttgctgaaaccacatactacctcctccccacctgacatgagcccattctttctccgccagtatgtgaagggtcatgctgctgatgtgtttgaggcctatactcagcttctaacagaaatggtactgaggcttccttaccaaatcaaaaagattactgacaccaattctcgaatcccacctcctgtctttgaccactcgtggttttactttctctccgagtacctcatgatccagcagactccatttgtgcgccgtcaagtccgcaaacttctgctcttcatctgtggatccaaagagaagtaccgccagctccgggatttgcacaccctggactctcacgtgcgtgggatcaagaagctgctagaagagcaggggatattcctccgggcaagtgtggttacagccagctcaggctccgccttgcaatatgacacactcatcagcctgatggagcacctgaaagcctgtgcagagattgccgcccagcgaaccatcaactggcagaaattctgcatcaaagatgactccgtcctgtacttcctcctccaagtcagtttccttgtggatgagggcgtgtccccagtgctgctgcaactgctctcctgtgctctgtgcggcagcaaggtgctcgctgcactggcagcctcttcgggatcctccagtgcttcttcctcctcagcccctgtggctgccagttctggacaagccacaacacagtccaagtcttccactaaaaagagcaagaaagaagaaaaagaaaa

SEQ ID NO: 197085 - DNA, 6175 bp, Homo sapiens
  Payload ID: 18869
  Gene Name: ubiquitin protein ligase E3 component n-recognin 4
  ENST ID: ENST00000417040
  CDS Start-End: 1-6175
ctggtcaggttgactggagatcttattgtttggtcagatgagatgaacccaccacaggtaattcggacactgctacctcttcttttggaatcaagcactgagagtgttgccgagatcagtagcaactccctggaacgcatcttgggccctgctgagtctgatgagttcttggctcgtgtttatgagaagctgatcactggttgttacaacattctggccaatcatgcagatcctaacagtggactggatgaatccatcctggaggaatgtctccagtacttggaaaagcagctggaaagtagccaggctcgtaaagctatggaggagtttttctctgacagtggagaacttgtacagatcatgatggcaacagccaatgagaacctctctgctaaattctgtaaccgagttttgaaattcttcaccaaactcttccagctgactgagaagagccctaacccgagcctgttgcatctctgtggctccctggcacaactggcctgtgtggaacctgtgcgcctgcaggcctggctcacccgcatgactacatcgcccccaaaagattctgatcagctggatgtaattcaggagaaccggcagctgctgcagttactgaccacatacattgttcgggaaaacagccaagttggggaaggtgtgtgtgctgttcttctgggcaccctgactcccatggcaacagagatgctggccaacggtgatgggactggcttccctgaacttatggttgtgatggccactctggccagtgcaggtcaaggtgctggtcaccttcagcttcataatgctgctgtggattggctgagcagatgcaagaaatacctgtcacagaagaatgtagttgaaaaactgaatgccaatgtaatgcatggaaagcatgtgatgatcttggagtgcacatgccatatcatgtcttacttggctgatgtcacgaatgccctgagccagagtaatggtcaaggcccaagtcatctctcagtggatggggaagagcgggccattgaagtagactcagactgggtggaggagttggcggtggaagaggaagattcccaggctgaggattcagatgaagattctctttgcaataaactctgcacttttacgatcacacagaaagaattcatgaaccagcattggtaccactgtcacacctgtaaaatggtggatggcgtgggtgtctgcacagtgtgtgctaaggtgtgccacaaggatcatgagatttcctatgccaagtatggatccttcttctgtgactgtggagccaaggaagatggcagctgtttggctctggtgaagagaactcctagcagtggcatgagctctaccatgaaggagtcggcatttcagagtgaacccaggatttcagagagtctagtgcgtcatgccagcacctcctcgccagctgacaaagccaaggttaccatcagtgatggaaaggttgctgacgaagagaagcccaagaagagcagcctctgccgcacagtagagggctgccgggaggaattacagaaccaggccaatttctccttcgctcctctcgtgttagacatgcttaatttccttatggatgccattcagaccaacttccagcaagcttcagccgtcgggagcagcagccgtgctcagcaagccctcagtgagctacacactgtggagaaggcagtggagatgacagaccagctgatggttcccaccttagggtcccaggaaggtgcctttgagaatgtgcggatgaattacagtggagaccagggccagaccatccggcagctgatcagtgctcatgtgctcaggcgggtggctatgtgtgtgctctcctctccccatgggcgccgccaacatttggctgtcagccatgagaagggcaagatcaccgttctgcagctctctgcactcctgaagcaagcagattccagcaaaaggaagttaactctgacccgcttggcttctgccccagttccttttactgtgttgagcctcacaggaaatccctgcaaggaagactacttggcggtttgtgggctaaaggactgtcatgtgctcacctttagtagctcaggctctgtttcggatcacttggttttgcaccctcagttggcaacggggaacttcatcatcaaagccgtgtggttacctggttcacagaccgagttagcaattgtcaccgcagactttgttaagatttatgacctgtgtgttgatgccttgagtccaaccttctattttctcctgccaagctcaaagataagagatgttaccttccttttcaatgaggagggaaagaacatcattgttataatgtcttcggctgggtacatctatactcagcttatggaagaggccagcagtgcccagcagggacccttctatgtcactaatgtgttggaaatcaatcatgaggacctgaaggacagtaacagccaggtggcgggcggtggtgtgtccgtgtactactcccacgtgttgcagatgttgttcttcagctattgtcaaggcaaatcattcgcagccaccatcagcaggacaaccctggaggtgttgcaactcttccccatcaacatcaaaagttccaatggtggcagtaagacttctcctgctctttgccagtggtctgaggtgatgaaccaccctggcttggtgtgctgtgtccagcaaactacaggggtgccgctggtagttatggtgaaaccagacacttttcttatccaggagattaagactcttcctgctaaagcgaagatccaagacatggttgctattaggcacacggcctgcaatgagcagcagcggacaacaatgattctgctgtgtgaggatggcagcctgcgcatttacatggccaacgtggagaacacctcctactggctgcagccatccctgcagcccagcagtgtcatcagcatcatgaagcctgttcgaaagcgcaaaacagctacaatcacaacccgcacgtctagccaggtgactttccccattgacttttttgaacacaaccagcagctgacagatgtggagtttggtggtaacgacctcctacaggtctataatgcacaacagataaaacaccggctgaattccactggcatgtatgtggccaacaccaagcccggaggcttcaccattgagattagtaacaacaatagcactatggtgatgacaggcatgcggatccagattgggactcaagcaatagaacgggccccgtcatatatcgagatcttcggcagaactatgcagctcaacctgagtcgctcacgctggtttgacttccccttcaccagagaagaagccctgcaggctgataagaagctgaacctcttcattggggcctcggtggatccagcaggtgtcaccatgatagatgctgtaaaaatttatggcaagactaaggagcagtttggctggcctgatgagcccccagaagaattcccttctgcctctgtcagcaacatctgcccttcaaatctgaaccagagcaacggcactggagatagcgactcagctgcccccactacgaccagtggaactgtcctggagagttctgaaactgagtccctaaccaagctggaccggctggttgtgagttctttagaagccctggaaagctgctttgccgttggcccaatcatcgagaaggagagaaacaagaatgctgctcaggagctggccactttgctgttgtccctgccagcacctgccagtgtccagcagcagtccaagagccttctggccagcctgcacaccagccgctcggcctaccacagccacaaggatcaggccttgctgagcaaagctgtgcagtgtctcaacacatctagcaaagagggcaaggatttggaccctgaggtgttccagaggctagtgatcacagctcgctccattgccatcatgcgccccaacaaccttgtccactttacggagtcaaagctgccccagatggaaacagaaggaatggatgaagggaaggaaccgcagaagcagttggaaggagattgctgtagtttcatcacccagcttgtgaaccacttctggaaactccatgcatccaaacccaagaatgccttcttggcacctgcctgccttccaggactaactcatattgaagctactgtcaatgctctggtggacatcatccatggctactgtacctgtgagctggattgtattaacacagcatccaagatctacatgcagatgctcttgtgtcctgatcctgctgtgagcttctcttgtaaacaagctctaattcgagtcctaaggcccaggaacaaacggagacatgtgactttaccctcttcccctcgaagcaacactccaatgggagacaaggatgatgatgacgatgatgatgcagatgagaaaatgcagtcatcagggatcccgaatggtggtcacatccgtcaggaaagccaggaacagagtgaggtggaccatggagattttgagatggtgtctgagtcgatggtcctggagacagctgaaaatgtcaacaatggcaacccctctcccctggaggccctgctggcaggcgcagagggcttcccccccatgctggacatcccacctgatgcagatgacgagaccatggttgaactagccattgccctgagcctgcagcaggaccaacaagctccagcctcagacgacgagggcagtacagcagcgacagatggttctacccttcggacctctcctgctgaccacggtggtagtgtgggctcggagagcgggggcagtgcagtggactcagtggctggcgagcacagtgtatctggccggagcagtgcttatggcgatgctacagctgaggggcatccggctggaccaggaagtgtcagctcaagcactggagccatcagcaccaccactgggcaccaggagggagatggctccgagggagaaggagaaggagaaactgaaggagatgtccacactagcaacaggctgcacatggtccgtctaatgctgttggagagattactgcagaccctgcctcaattacgaaacgttggcggtgtccgggccatcccatacatgcaggtcattctaatgctcactacagatctggatggagaagatgagaaagacaagggggccctagacaacctgctctcccagcttattgctgagttgggtatggataaaaaggatgtctccaagaagaatgagcgcagcgccctgaatgaagtccatctggtagtaatgagactcctgagtgtcttcatgtcccgcaccaaatctggatccaagtcttccatatgtgagtcatcttccctcatctccagtgccacagcagcagctctactgagctctggggctgtggactactgcctgcacgtgctcaaatcactgctggaatattggaagagccaacagaatgacgaggagcctgtggctaccagccagttgctgaaaccacatactacctcctccccacctgacatgagcccattctttctccgccagtatgtgaagggtcatgctgctgatgtgtttgaggcctatactcagcttctaacagaaatggtactgaggcttccttaccaaatcaaaaagattactgacaccaattctcgaatcccacctcctgtctttgaccactcgtggttttactttctctccgagtacctcatgatccagcagactccatttgtgcgccgtcaagtccgcaaacttctgctcttcatctgtggatccaaagagaagtaccgccagctccgggatttgcacaccctggactctcacgtgcgtgggatcaagaagctgctagaagagcaggggatattcctccgggcaagtgtggttacagccagctcaggctccgccttgcaatatgacacactcatcagcctgatggagcacctgaaagcctgtgcagagattgccgcccagcgaaccatcaactggcagaaattctgcatcaaagatgactccgtcctgtacttcctcctccaagtcagtttccttgtggatgagggcgtgtccccagtgctgctgcaactgctctcctgtgctctgtgcggcagcaaggtgctcgctgcactggcagcctcttcgggatcctccagtgcttcttcctcctcagcccctgtggctgccagttctggacaagccacaacacagtccaagtcttccactaaaaagagcaagaaag

SEQ ID NO: 197086 - DNA, 9418 bp, Homo sapiens
  Payload ID: 18870
  Gene Name: ubiquitin protein ligase E3 component n-recognin 5
  Uniprot ID: O95071
  ENST ID: ENST00000220959
  CDS Start-End: 456-8852
tggcggcggcagcttctcgctagtgacgcgcggtgcgggctcatctccttcccctccttcctcacctcccctagtccggaccccgtccgccgccgggaccagaccgtccccgtagcccgcagccagcagccgcccctctcctcccccggccgcccctctcccaacgcccgtctgccgctggccggcggcgcgcccctggtcccggccgcctgcctcgcactccgcgctgtcgccgggggagcgggtggcgtgtggattcgccctcctgcccgcccctccgggccgcggacacacgcccggcagggaggcggcggcggcccctgcgtatttgcttccctccatttggggactgggaggcggcggcggctgtgggttttggggaggggtagagggctggggggcgggcgagagcgggagggggccgccctcgagtggaggacgagaaggaaagcaccatgacgtccatccatttcgtggttcacccgctgccgggcaccgaggaccagctcaatgacaggttacgagaagtttctgagaagctgaacaaatataatttaaacagccacccccctttgaatgtattggaacaggctactattaaacagtgtgtggtgggaccaaatcatgctgcctttcttcttgaggatggtagagtttgcaggattggtttttcagtacagccagacagattggaattgggtaaacctgataataatgatgggtcaaagttgaacagcaactcgggggcagggaggacgtcaaggcctggtaggacaagcgactctccatggtttctctcaggttctgagactctaggcaggctggcaggcaacaccttaggaagccgctggagttctggagtgggtggaagtggtggaggatcctctggtaggtcatcagctggagctcgagattcccgccggcagactcgagttattcggacaggacgggatcgagggtctgggcttttgggcagtcagccccagccagttattccagcatctgtcattccagaggagctgatttcacaggcccaagttgttttacaaggcaaatccagaagtgtcattattcgagaacttcagagaacaaatcttgatgtgaaccttgctgtaaataatttacttagccgggatgatgaagatggagatgatggggatgatacagccagcgaatcttatttgcctggagaggatcttatgtctctccttgatgccgacattcattctgcccacccaagtgtcattattgatgcagatgccatgttttctgaagacattagctattttggttacccttcttttcgtcgttcatcactttccaggctaggctcatctcgagttctccttcttcccttagagagagactctgagctgttgcgtgaacgtgaatccgttttacgtttacgtgaacgaaggtggcttgatggagcctcatttgataatgaaaggggttctaccagcaaggaaggagagccaaacttggataagaagaatacacctgttcaaagtccagtatctctaggagaagatttgcagtggtggcctgataaggatggaacaaaattcatctgtattggggctctgtattctgaacttctggctgtcagcagtaaaggagaactttatcagtggaaatggagtgaatctgagccttacagaaatgcccagaatccttcattacatcatccacgagcaacatttttggggttaaccaatgaaaagatagtcctcctgtctgcaaatagcataagagcaactgtagctacagaaaataacaaggttgctacatgggtggatgaaactttaagttctgtggcttctaaattagagcacactgctcagacttactctgaacttcaaggagagcggatagtttctttacattgctgtgccctttacacctgcgctcagctggaaaacagtttatattggtggggtgtagttccttttagtcaaaggaagaaaatgttagagaaagctagagcaaaaaataaaaagcctaaatccagtgctggtatttcttcaatgccgaacatcactgttggtacccaggtatgcttgagaaataatcctctttatcatgctggagcagttgcattttcaattagtgctgggattcctaaagttggtgtcttaatggagtcagtttggaatatgaatgacagctgtagatttcaacttagatctcctgaaagcttgaaaaacatggaaaaagctagcaaaactactgaagctaagcctgaaagtaagcaggagccagtgaaaacagaaatgggtcctccaccatctccagcatccacgtgtagtgatgcatcctcaattgccagcagtgcatcaatgccatacaaacgacgacggtcaacccctgcaccaaaagaagaggaaaaggtgaatgaagagcagtggtctcttcgggaagtggtttttgtggaagatgtcaagaatgttcctgttggcaaggtgctaaaagtagatggtgcctatgttgctgtaaaatttccaggaacctccagtaatactaactgtcagaacagctctggtccagatgctgacccttcttctctcctgcaggattgtaggttacttagaattgatgaattgcaggttgtcaaaactggtggaacaccgaaggttcccgactgtttccaaaggactcctaaaaagctttgtatacctgaaaaaacagaaatattagcagtgaatgtagattccaaaggtgttcatgctgttctgaagactggaaattgggtacgatactgtatctttgatcttgctacaggaaaagcagaacaggaaaataattttcctacaagcagcattgctttccttggtcagaatgagaggaatgtagccattttcactgctggacaggaatctcccattattcttcgagatggaaatggtaccatctacccaatggccaaagattgcatgggaggaataagggatcccgattggctggatcttccacctattagtagtcttggaatgggtgtgcattctttaataaatcttcctgccaattcaacaatcaaaaagaaagctgctgttatcatcatggctgtagagaaacaaaccttaatgcaacacattctgcgctgtgactatgaggcctgtcgacaatatctaatgaatcttgagcaagcggttgttttagagcagaatctacagatgctgcagacattcatcagccacagatgtgatggaaatcgaaatattttgcatgcttgtgtatcagtttgctttccaaccagcaataaagaaactaaagaagaagaggaagcggagcgttctgaaagaaatacatttgcagaaaggctttctgctgttgaggccattgcaaatgcaatatcagttgtttcaagtaatggcccaggtaatcgggctggatcatcaagtagccgaagtttgagattacgggaaatgatgagacgttcgttgagagcagctggtttgggtagacatgaagctggagcttcatccagtgaccaccaggatccagtttcaccccccatagctccccctagttgggttcctgaccctcctgcgatggatcctgatggtgacattgattttatcctggcccccgctgtgggatctcttaccacagcagcaaccggtactggtcaaggaccaagcacctccactattccaggtccttccacagagccatctgtagtagaatccaaggatcgaaaggcgaatgctcattttatattgaaattgttatgtgacagtgtggttctccagccctatctacgagaacttctttctgccaaggatgcaagagggatgaccccatttatgtcagctgtaagtggccgagcttatcctgctgcaattaccatcttagaaactgctcagaaaattgcaaaagctgaaatatcctcaagtgaaaaagaggaagatgtattcatgggaatggtttgcccatcaggtaccaaccctgatgactctcctttatatgttttatgttgtaatgacacttgcagttttacatggactggagcagagcacattaaccaggatatttttgagtgtcgaacttgtggcttgctggagtcactgtgttgttgtacggaatgtgcaagggtttgtcataaaggtcatgattgcaaactcaaacggacatcaccaacagcctactgtgattgttgggagaaatgtaaatgtaaaactcttattgctggacagaaatctgctcgtcttgatctactttatcgcctgctcactgctactaatctggttactctgccaaacagcaggggagagcacctcttactattcttagtacagacagtcgcaaggcagacggtggagcattgtcaatacaggccacctcgaatcagggaagatcgtaaccgaaaaacagccagtcctgaagattcagatatgccagatcatgatttagagcctccaagatttgcccagcttgcattggagcgtgttctacaggactggaatgccttgaaatctatgattatgtttgggtcgcaggagaataaagaccctcttagtgccagcagtagaataggccatcttttgccagaagagcaagtatacctcaatcagcaaagtggcacaattcggctggactgtttcactcattgccttatagttaagtgtacagcagatattttgcttttagatactctactaggtacactagtgaaagaactccaaaacaaatatacacctggacgtagagaagaagctattgctgtgacaatgaggtttctacgttcagtggcaagagtttttgttattctgagtgtggaaatggcttcatccaaaaagaaaaacaactttattccacagccaattggaaaatgcaagcgtgtattccaagcattgctaccttacgctgtggaagaattgtgcaacgtagcagagtcactgattgttcctgtcagaatggggattgctcgtccaactgcaccatttaccctggctagtactagcatagatgccatgcagggcagtgaagaattattttcagtggaaccactaccaccacgaccatcatctgatcagtctagcagctccagtcagtctcagtcatcctacatcatcaggaatccacagcagaggcgcatcagccagtcacagcccgttcggggcagagatgaagaacaggatgatattgtttcagcagatgtggaagaggttgaggtggtggagggtgtggctggagaagaggatcatcatgatgaacaggaagaacacggggaagaaaatgctgaggcagagggacaacatgatgagcatgatgaagacgggagtgatatggagctggacttgttagcagcagctgaaacagaaagtgatagtgaaagtaaccacagcaaccaagataatgctagtgggcgcagaagcgttgtcactgcagcaactgctggttcagaagcaggagcaagcagtgttcctgccttcttttctgaagatgattctcaatcgaatgactcaagtgattctgatagcagtagtagtcagagtgacgacatagaacaggagacctttatgcttgatgagccattagaaagaaccacaaatagctcccatgccaatggtgctgcccaagctccccgttcaatgcagtgggctgtccgcaacacccagcatcagcgagcagccagtacagccccttccagtacatctacaccagcagcaagttcagcgggtttgatttatattgatccttcaaacttacgccggagtggtaccatcagtacaagtgctgcagctgcagcagctgctttggaagctagcaacgccagcagttacctaacatctgcaagcagtttagccagggcttacagcattgtcattagacaaatctcggacttgatgggccttattcctaagtataatcacctagtatactctcagattccagcagctgtgaaattgacttaccaagatgcagtaaacttacagaactatgtagaagaaaagcttattcccacttggaactggatggtcagtattatggattctactgaagctcaattacgttatggttctgcattagcatctgctggtgatcctggacatccaaatcatcctcttcacgcttctcagaattcagcgagaagagagaggatgactgcgcgagaagaagctagcttacgaacacttgaaggcagacgacgtgccaccttgcttagcgcccgtcaaggaatgatgtctgcacgaggagacttcctaaattatgctctgtctctaatgcggtctcataatgatgagcattctgatgttcttccagttttggatgtttgctcattgaagcatgtggcatatgtttttcaagcacttatatactggattaaggcaatgaatcagcagacaacattggatacacctcaactagaacgcaaaaggacgcgagaactcttggaactgggtattgataatgaagattcagaacatgaaaatgatgatgacaccaatcaaagtgctactttgaatgataaggatgatgactctcttcctgcagaaactggccaaaaccatccatttttccgacgttcagactccatgacattccttgggtgtatacccccaaatccatttgaagtgcctctggctgaagccatccccttggctgatcagccacatctgttgcagccaaatgctagaaaggaggatctttttggccgtccaagtcagggtctttattcttcatctgccagtagtgggaaatgtttaatggaggttacagtggatagaaactgcctagaggttcttccaacaaaaatgtcttatgctgccaatctgaaaaatgtaatgaacatgcaaaaccggcaaaaaaaagaaggggaagaacagcccgtgctgccagaagaaactgagagttcaaaaccagggccatctgctcatgatcttgctgcacaattaaaaagtagcttactagcagaaataggacttactgaaagtgaagggccacctctcacatctttcaggccacagtgtagctttatgggaatggttatttcccatgatatgctgctaggacgttggcgcctttctttagaactgttcggcagggtattcatggaagatgttggagcagaacctggatcaatcctaactgaattgggtggttttgaggtaaaagaatcaaaattccgcagagaaatggaaaaactgagaaaccagcagtcaagagatttgtcactagaggttgatcgggatcgagatcttctcattcagcagactatgaggcagcttaacaatcactttggtcgaagatgtgctactacaccaatggctgtacacagagtaaaagtcacatttaaggatgagccaggagagggcagtggtgtagcacgaagtttttatacagccattgcacaagcatttttatcaaatgaaaaattgccaaatctagagtgtatccaaaatgccaacaaaggcacccacacaagtttaatgcagagattaaggaaccgaggagagagagaccgggaaagggagagagaaagggaaatgaggaggagtagtggtttgcgagcaggttctcggagggaccgggatagagactttagaagacagctttccatcgacactaggccctttagaccagcctctgaagggaatcctagcgatgatcctgagcctttgccagcacatcggcaggcacttggagagaggctttatcctcgtgtacaagcaatgcaaccagcatttgcaagtaaaatcactggcatgttgttggaattatccccagctcagctgcttctccttctagcaagtgaggattctctgagagcaagagtggatgaggccatggaactcattattgcacatggacgggaaaatggagctgatagtatcctggatcttggattagtagactcctcagaaaaggtacaggaaaaccgaaagcgccatggctctagtcgaagtgtagtagatatggatttagatgatacagatgatggtgatgacaatgcccctttgttttaccaacctgggaaaagaggattttatactccaaggcctggcaagaacacagaagcaaggttgaattgtttcagaaacattggcaggattcttggactatgtctgttacagaatgaactatgtcctatcacattgaatagacatgtaattaaagtattgcttggtagaaaagtcaattggcatgattttgctttttttgatcctgtaatgtatgagagtttgcggcaactaatcctcgcgtctcagagttcagatgctgatgctgttttctcagcaatggatttggcatttgcaattgacctgtgtaaagaagaaggtggaggacaggttgaactcattcctaatggtgtaaatataccagtcactccacagaatgtatatgagtatgtgcggaaatacgcagaacacagaatgttggtagttgcagaacagcccttacatgcaatgaggaaaggtctactagatgtgcttccaaaaaattcattagaagatttaacggcagaagattttaggcttttggtaaatggctgcggtgaagtcaatgtgcaaatgctgatcagttttacctctttcaatgatgaatcaggagaaaatgctgagaagcttctgcagttcaagcgttggttctggtcaatagtagagaagatgagcatgacagaacgacaagatcttgtttacttttggacatcaagcccatcactgccagccagtgaagaaggattccagcctatgccctcaatcacaataagaccaccagatgaccaacatcttcctactgcaaatacttgcatttctcgactttacgtcccactctattcctctaaacagattctcaaacagaaattgttactcgccattaagaccaagaattttggttttgtgtagagtataaaaagtgtgtattgctgtgtaatattactagcaaattttgtagatttttttccatttgtctataaaagtttatggaagttaatgctgtcatacccccctggtggtaccttaaagagataaaatgcagacattccttgctgagtttatagcttaaaggcctaaggagcactagcaacatttggctatattggtttgctagtcaccaacttctgggtctaaccccagccaaagatgacagcagaacaacataatttacactgtgatttatctttttgctgagggggaaaaaatgtaaatgttctgaaaattcactgctgcctttgtggaaactgtttcagcaaaggttcttgtatagagggaatagggaatttcaaaataaaaaattaagtatgttctgtgttttcattttaactttttttatggtgtttaatttgtggttggctgcaactgtgtatcatgtatatggaacttgtaaaaaagttctcgacattcagatcttaagagatgaaatcacttttacctataaaaaccacttttattgcggtttgactgcattgagc

SEQ ID NO: 197087 - DNA, 9008 bp, Homo sapiens
  Payload ID: 18870
  Gene Name: ubiquitin protein ligase E3 component n-recognin 5
  ENST ID: ENST00000521922
  CDS Start-End: 526-8904
cccgtttgcccctcccccgccgctccggagcggagcctgcgagacggagaaactggggcagaagtgaagatggcggcggcagcttctcgctagtgacgcgcggtgcgggctcatctccttcccctccttcctcacctcccctagtccggaccccgtccgccgccgggaccagaccgtccccgtagcccgcagccagcagccgcccctctcctcccccggccgcccctctcccaacgcccgtctgccgctggccggcggcgcgcccctggtcccggccgcctgcctcgcactccgcgctgtcgccgggggagcgggtggcgtgtggattcgccctcctgcccgcccctccgggccgcggacacacgcccggcagggaggcggcggcggcccctgcgtatttgcttccctccatttggggactgggaggcggcggcggctgtgggttttggggaggggtagagggctggggggcgggcgagagcgggagggggccgccctcgagtggaggacgagaaggaaagcaccatgacgtccatccatttcgtggttcacccgctgccgggcaccgaggaccagctcaatgacaggttacgagaagtttctgagaagctgaacaaatataatttaaacagccacccccctttgaatgtattggaacaggctactattaaacagtgtgtggtgggaccaaatcatgctgcctttcttcttgaggatggtagagtttgcaggattggtttttcagtacagccagacagattggaattgggtaaacctgataataatgatgggtcaaagttgaacagcaactcgggggcagggaggacgtcaaggcctggtaggacaagcgactctccatggtttctctcaggttctgagactctaggcaggctggcaggcaacaccttaggaagccgctggagttctggagtgggtggaagtggtggaggatcctctggtaggtcatcagctggagctcgagattcccgccggcagactcgagttattcggacaggacgggatcgagggtctgggcttttgggcagtcagccccagccagttattccagcatctgtcattccagaggagctgatttcacaggcccaagttgttttacaaggcaaatccagaagtgtcattattcgagaacttcagagaacaaatcttgatgtgaaccttgctgtaaataatttacttagccgggatgatgaagatggagatgatggggatgatacagccagcgaatcttatttgcctggagaggatcttatgtctctccttgatgccgacattcattctgcccacccaagtgtcattattgatgcagatgccatgttttctgaagacattagctattttggttacccttcttttcgtcgttcatcactttccaggctaggctcatctcgagagagagactctgagctgttgcgtgaacgtgaatccgttttacgtttacgtgaacgaaggtggcttgatggagcctcatttgataatgaaaggggttctaccagcaaggaaggagagccaaacttggataagaagaatacacctgttcaaagtccagtatctctaggagaagatttgcagtggtggcctgataaggatggaacaaaattcatctgtattggggctctgtattctgaacttctggctgtcagcagtaaaggagaactttatcagtggaaatggagtgaatctgagccttacagaaatgcccagaatccttcattacatcatccacgagcaacatttttggggttaaccaatgaaaagatagtcctcctgtctgcaaatagcataagagcaactgtagctacagaaaataacaaggttgctacatgggtggatgaaactttaagttctgtggcttctaaattagagcacactgctcagacttactctgaacttcaaggagagcggatagtttctttacattgctgtgccctttacacctgcgctcagctggaaaacagtttatattggtggggtgtagttccttttagtcaaaggaagaaaatgttagagaaagctagagcaaaaaataaaaagcctaaatccagtgctggtatttcttcaatgccgaacatcactgttggtacccaggtatgcttgagaaataatcctctttatcatgctggagcagttgcattttcaattagtgctgggattcctaaagttggtgtcttaatggagtcagtttggaatatgaatgacagctgtagatttcaacttagatctcctgaaagcttgaaaaacatggaaaaagctagcaaaactactgaagctaagcctgaaagtaagcaggagccagtgaaaacagaaatgggtcctccaccatctccagcatccacgtgtagtgatgcatcctcaattgccagcagtgcatcaatgccatacaaacgacgacggtcaacccctgcaccaaaagaagaggaaaaggtgaatgaagagcagtggtctcttcgggaagtggtttttgtggaagatgtcaagaatgttcctgttggcaaggtgctaaaagtagatggtgcctatgttgctgtaaaatttccaggaacctccagtaatactaactgtcagaacagctctggtccagatgctgacccttcttctctcctgcaggattgtaggttacttagaattgatgaattgcaggttgtcaaaactggtggaacaccgaaggttcccgactgtttccaaaggactcctaaaaagctttgtatacctgaaaaaacagaaatattagcagtgaatgtagattccaaaggtgttcatgctgttctgaagactggaaattgggtacgatactgtatctttgatcttgctacaggaaaagcagaacaggaaaataattttcctacaagcagcattgctttccttggtcagaatgagaggaatgtagccattttcactgctggacaggaatctcccattattcttcgagatggaaatggtaccatctacccaatggccaaagattgcatgggaggaataagggatcccgattggctggatcttccacctattagtagtcttggaatgggtgtgcattctttaataaatcttcctgccaattcaacaatcaaaaagaaagctgctgttatcatcatggctgtagagaaacaaaccttaatgcaacacattctgcgctgtgactatgaggcctgtcgacaatatctaatgaatcttgagcaagcggttgttttagagcagaatctacagatgctgcagacattcatcagccacagatgtgatggaaatcgaaatattttgcatgcttgtgtatcagtttgctttccaaccagcaataaagaaactaaagaagaagaggaagcggagcgttctgaaagaaatacatttgcagaaaggctttctgctgttgaggccattgcaaatgcaatatcagttgtttcaagtaatggcccaggtaatcgggctggatcatcaagtagccgaagtttgagattacgggaaatgatgagacgttcgttgagagcagctggtttgggtagacatgaagctggagcttcatccagtgaccaccaggatccagtttcaccccccatagctccccctagttgggttcctgaccctcctgcgatggatcctgatggtgacattgattttatcctggcccccgctgtgggatctcttaccacagcagcaaccggtactggtcaaggaccaagcacctccactattccaggtccttccacagagccatctgtagtagaatccaaggatcgaaaggcgaatgctcattttatattgaaattgttatgtgacagtgtggttctccagccctatctacgagaacttctttctgccaaggatgcaagagggatgaccccatttatgtcagctgtaagtggccgagcttatcctgctgcaattaccatcttagaaactgctcagaaaattgcaaaagctgaaatatcctcaagtgaaaaagaggaagatgtattcatgggaatggtttgcccatcaggtaccaaccctgatgactctcctttatatgttttatgttgtaatgacacttgcagttttacatggactggagcagagcacattaaccaggatatttttgagtgtcgaacttgtggcttgctggagtcactgtgttgttgtacggaatgtgcaagggtttgtcataaaggtcatgattgcaaactcaaacggacatcaccaacagcctactgtgattgttgggagaaatgtaaatgtaaaactcttattgctggacagaaatctgctcgtcttgatctactttatcgcctgctcactgctactaatctggttactctgccaaacagcaggggagagcacctcttactattcttagtacagacagtcgcaaggcagacggtggagcattgtcaatacaggccacctcgaatcagggaagatcgtaaccgaaaaacagccagtcctgaagattcagatatgccagatcatgatttagagcctccaagatttgcccagcttgcattggagcgtgttctacaggactggaatgccttgaaatctatgattatgtttgggtcgcaggagaataaagaccctcttagtgccagcagtagaataggccatcttttgccagaagagcaagtatacctcaatcagcaaagtggcacaattcggctggactgtttcactcattgccttatagttaagtgtacagcagatattttgcttttagatactctactaggtacactagtgaaagaactccaaaacaaatatacacctggacgtagagaagaagctattgctgtgacaatgaggtttctacgttcagtggcaagagtttttgttattctgagtgtggaaatggcttcatccaaaaagaaaaacaactttattccacagccaattggaaaatgcaagcgtgtattccaagcattgctaccttacgctgtggaagaattgtgcaacgtagcagagtcactgattgttcctgtcagaatggggattgctcgtccaactgcaccatttaccctggctagtactagcatagatgccatgcagggcagtgaagaattattttcagtggaaccactaccaccacgaccatcatctgatcagtctagcagctccagtcagtctcagtcatcctacatcatcaggaatccacagcagaggcgcatcagccagtcacagcccgttcggggcagagatgaagaacaggatgatattgtttcagcagatgtggaagaggttgaggtggtggagggtgtggctggagaagaggatcatcatgatgaacaggaagaacacggggaagaaaatgctgaggcagagggacaacatgatgagcatgatgaagacgggagtgatatggagctggacttgttagcagcagctgaaacagaaagtgatagtgaaagtaaccacagcaaccaagataatgctagtgggcgcagaagcgttgtcactgcagcaactgctggttcagaagcaggagcaagcagtgttcctgccttcttttctgaagatgattctcaatcgaatgactcaagtgattctgatagcagtagtagtcagagtgacgacatagaacaggagacctttatgcttgatgagccattagaaagaaccacaaatagctcccatgccaatggtgctgcccaagctccccgttcaatgcagtgggctgtccgcaacacccagcatcagcgagcagccagtacagccccttccagtacatctacaccagcagcaagttcagcgggtttgatttatattgatccttcaaacttacgccggagtggtaccatcagtacaagtgctgcagctgcagcagctgctttggaagctagcaacgccagcagttacctaacatctgcaagcagtttagccagggcttacagcattgtcattagacaaatctcggacttgatgggccttattcctaagtataatcacctagtatactctcagattccagcagctgtgaaattgacttaccaagatgcagtaaacttacagaactatgtagaagaaaagcttattcccacttggaactggatggtcagtattatggattctactgaagctcaattacgttatggttctgcattagcatctgctggtgatcctggacatccaaatcatcctcttcacgcttctcagaattcagcgagaagagagaggatgactgcgcgagaagaagctagcttacgaacacttgaaggcagacgacgtgccaccttgcttagcgcccgtcaaggaatgatgtctgcacgaggagacttcctaaattatgctctgtctctaatgcggtctcataatgatgagcattctgatgttcttccagttttggatgtttgctcattgaagcatgtggcatatgtttttcaagcacttatatactggattaaggcaatgaatcagcagacaacattggatacacctcaactagaacgcaaaaggacgcgagaactcttggaactgggtattgataatgaagattcagaacatgaaaatgatgatgacaccaatcaaagtgctactttgaatgataaggatgatgactctcttcctgcagaaactggccaaaaccatccatttttccgacgttcagactccatgacattccttgggtgtatacccccaaatccatttgaagtgcctctggctgaagccatccccttggctgatcagccacatctgttgcagccaaatgctagaaaggaggatctttttggccgtccaagtcagggtctttattcttcatctgccagtagtgggaaatgtttaatggaggttacagtggatagaaactgcctagaggttcttccaacaaaaatgtcttatgctgccaatctgaaaaatgtaatgaacatgcaaaaccggcaaaaaaaagaaggggaagaacagcccgtgctgccagaagaaactgagagttcaaaaccagggccatctgctcatgatcttgctgcacaattaaaaagtagcttactagcagaaataggacttactgaaagtgaagggccacctctcacatctttcaggccacagtgtagctttatgggaatggttatttcccatgatatgctgctaggacgttggcgcctttctttagaactgttcggcagggtattcatggaagatgttggagcagaacctggatcaatcctaactgaattgggtggttttgaggtaaaagaatcaaaattccgcagagaaatggaaaaactgagaaaccagcagtcaagagatttgtcactagaggttgatcgggatcgagatcttctcattcagcagactatgaggcagcttaacaatcactttggtcgaagatgtgctactacaccaatggctgtacacagagtaaaagtcacatttaaggatgagccaggagagggcagtggtgtagcacgaagtttttatacagccattgcacaagcatttttatcaaatgaaaaattgccaaatctagagtgtatccaaaatgccaacaaaggcacccacacaagtttaatgcagagattaaggaaccgaggagagagagaccgggaaagggagagagaaagggaaatgaggaggagtagtggtttgcgagcaggttctcggagggaccgggatagagactttagaagacagctttccatcgacactaggccctttagaccagcctctgaagggaatcctagcgatgatcctgagcctttgccagcacatcggcaggcacttggagagaggctttatcctcgtgtacaagcaatgcaaccagcatttgcaagtaaaatcactggcatgttgttggaattatccccagctcagctgcttctccttctagcaagtgaggattctctgagagcaagagtggatgaggccatggaactcattattgcacatggacgggaaaatggagctgatagtatcctggatcttggattagtagactcctcagaaaaggtacaggaaaaccgaaagcgccatggctctagtcgaagtgtagtagatatggatttagatgatacagatgatggtgatgacaatgcccctttgttttaccaacctgggaaaagaggattttatactccaaggcctggcaagaacacagaagcaaggttgaattgtttcagaaacattggcaggattcttggactatgtctgttacagaatgaactatgtcctatcacattgaatagacatgtaattaaagtattgcttggtagaaaagtcaattggcatgattttgctttttttgatcctgtaatgtatgagagtttgcggcaactaatcctcgcgtctcagagttcagatgctgatgctgttttctcagcaatggatttggcatttgcaattgacctgtgtaaagaagaaggtggaggacaggttgaactcattcctaatggtgtaaatataccagtcactccacagaatgtatatgagtatgtgcggaaatacgcagaacacagaatgttggtagttgcagaacagcccttacatgcaatgaggaaaggtctactagatgtgcttccaaaaaattcattagaagatttaacggcagaagattttaggcttttggtaaatggctgcggtgaagtcaatgtgcaaatgctgatcagttttacctctttcaatgatgaatcaggagaaaatgctgagaagcttctgcagttcaagcgttggttctggtcaatagtagagaagatgagcatgacagaacgacaagatcttgtttacttttggacatcaagcccatcactgccagccagtgaagaaggattccagcctatgccctcaatcacaataagaccaccagatgaccaacatcttcctactgcaaatacttgcatttctcgactttacgtcccactctattcctctaaacagattctcaaacagaaattgttactcgccattaagaccaagaattttggttttgtgtagagtataaaaagtgtgtattgctgtgtaatattactagcaaattttgtagatttttttccatttgtctataaaagtttatggaagttaatgctgtcatacccccc

SEQ ID NO: 197088 - DNA, 563 bp, Homo sapiens
  Payload ID: 18870
  Gene Name: ubiquitin protein ligase E3 component n-recognin 5
  ENST ID: ENST00000521566
  CDS Start-End: 64-563
acacttatctgtgctccttttccaagtttgtaattctcttacaagaggccacagtgtagctttatgggaatggttatttcccatgatatgctgctaggacgttggcgcctttctttagaactgttcggcagggtattcatggaagatgttggagcagaacctggatcaatcctaactgaattgggtggttttgaggtaaaagaatcaaaattccgcagagaaatggaaaaactgagaaaccagcagtcaagagatttgtcactagaggttgatcgggatcgagatcttctcattcagcagactatgaggcagcttaacaatcactttggtcgaagatgtgctactacaccaatggctgtacacagagtaaaagtcacatttaaggatgagccaggagagggcagtggtgtagcacgaagtttttatacagccattgcacaagcatttttatcaaatgaaaaattgccaaatctagagtgtatccaaaatgccaacaaaggcacccacacaagtttaatgcagagattaaggaaccgaggagagagagaccgggaaagggagag

SEQ ID NO: 197089 - DNA, 602 bp, Homo sapiens
  Payload ID: 18870
  Gene Name: ubiquitin protein ligase E3 component n-recognin 5
  ENST ID: ENST00000519365
  CDS Start-End: 1-602
tgaggcctgtcgacaatatctaatgaatcttgagcaagcggttgttttagagcagaatctacagatgctgcagacattcatcagccacagatgtgatggaaatcgaaatattttgcatgcttgtgtatcagtttgctttccaaccagcaataaagaaactaaagaagaagaggaagcggagcgttctgaaagaaatacatttgcagaaaggctttctgctgttgaggccattgcaaatgcaatatcagttgtttcaagtaatggcccaggtaatcgggctggatcatcaagtagccgaagtttgagattacgggaaatgatgagacgttcgttgagagcagctggtttgggtagacatgaagctggagcttcatccagtgaccaccaggatccagtttcaccccccatagctccccctagttgggttcctgaccctcctgcgatggatcctgcagcaaccggtactggtcaaggaccaagcacctccactattccaggtccttccacagagccatctgtagtagaatccaaggatcgaaaggcgaatgctcattttatattgaaattgttatgtgacagtgtggttctccagccctatctac

SEQ ID NO: 197090 - DNA, 1931 bp, Homo sapiens
  Payload ID: 18870
  Gene Name: ubiquitin protein ligase E3 component n-recognin 5
  ENST ID: ENST00000518205
  CDS Start-End: 244-1827
tttgtaatggataagcttctgagaactccaattactttgttgttttttaaactctcaaggaaaggctaaaactagattttcagattgtacatagaaaaattcaagctactttccaacattgaatttactactttttgacttcttgatgtgttttaataggttgatcgggatcgagatcttctcattcagcagactatgaggcagcttaacaatcactttggtcgaagatgtgctactacaccaatggctgtacacagagtaaaagtcacatttaaggatgagccaggagagggcagtggtgtagcacgaagtttttatacagccattgcacaagcatttttatcaaatgaaaaattgccaaatctagagtgtatccaaaatgccaacaaaggcacccacacaagtttaatgcagagattaaggaaccgaggagagagagaccgggaaagggagagagaaagggaaatgaggaggagtagtggtttgcgagcaggttctcggagggaccgggatagagactttagaagacagctttccatcgacactaggccctttagaccagcctctgaagggaatcctagcgatgatcctgagcctttgccagcacatcggcaggcacttggagagaggctttatcctcgtgtacaagcaatgcaaccagcatttgcaagtaaaatcactggcatgttgttggaattatccccagctcagctgcttctccttctagcaagtgaggattctctgagagcaagagtggatgaggccatggaactcattattgcacatggacgggaaaatggagctgatagtatcctggatcttggattagtagactcctcagaaaaggtacaggaaaaccgaaagcgccatggctctagtcgaagtgtagtagatatggatttagatgatacagatgatggtgatgacaatgcccctttgttttaccaacctgggaaaagaggattttatactccaaggcctggcaagaacacagaagcaaggttgaattgtttcagaaacattggcaggattcttggactatgtctgttacagaatgaactatgtcctatcacattgaatagacatgtaattaaagtattgcttggtagaaaagtcaattggcatgattttgctttttttgatcctgtaatgtatgagagtttgcggcaactaatcctcgcgtctcagagttcagatgctgatgctgttttctcagcaatggatttggcatttgcaattgacctgtgtaaagaagaaggtggaggacaggttgaactcattcctaatggtgtaaatataccagtcactccacagaatgtatatgagtatgtgcggaaatacgcagaacacagaatgttggtagttgcagaacagcccttacatgcaatgaggaaaggtctactagatgtgcttccaaaaaattcattagaagatttaacggcagaagattttaggcttttggtaaatggctgcggtgaagtcaatgtgcaaatgctgatcagttttacctctttcaatgatgaatcaggagaaaatgctgagaagcttctgcagttcaagcgttggttctggtcaatagtagagaagatgagcatgacagaacgacaagatcttgtttacttttggacatcaagcccatcactgccagccagtgaagaaggattccagcctatgccctcaatcacaataagaccaccagatgaccaacatcttcctactgcaaatacttgcatttctcgactttacgtcccactctattcctctaaacagattctcaaacagaaattgttactcgccattaagaccaagaattttggttttgtgtagagtataaaaagtgtgtattgctgtgtaatattactagcaaattttgtagatttttttccatttgtctataaaagtttatggaagttaatgctgtcatacccccc

SEQ ID NO: 197091 - DNA, 10297 bp, Homo sapiens
  Payload ID: 18870
  Gene Name: ubiquitin protein ligase E3 component n-recognin 5
  Uniprot ID: O95071
  ENST ID: ENST00000520539
  CDS Start-End: 608-9007
gagggggccttgccgcccgtttcccggagccccgcctctcgccgccgcgcccccgcccgccggtctcctccctcctcctcctcccgtttgcccctcccccgccgctccggagcggagcctgcgagacggagaaactggggcagaagtgaagatggcggcggcagcttctcgctagtgacgcgcggtgcgggctcatctccttcccctccttcctcacctcccctagtccggaccccgtccgccgccgggaccagaccgtccccgtagcccgcagccagcagccgcccctctcctcccccggccgcccctctcccaacgcccgtctgccgctggccggcggcgcgcccctggtcccggccgcctgcctcgcactccgcgctgtcgccgggggagcgggtggcgtgtggattcgccctcctgcccgcccctccgggccgcggacacacgcccggcagggaggcggcggcggcccctgcgtatttgcttccctccatttggggactgggaggcggcggcggctgtgggttttggggaggggtagagggctggggggcgggcgagagcgggagggggccgccctcgagtggaggacgagaaggaaagcaccatgacgtccatccatttcgtggttcacccgctgccgggcaccgaggaccagctcaatgacaggttacgagaagtttctgagaagctgaacaaatataatttaaacagccacccccctttgaatgtattggaacaggctactattaaacagtgtgtggtgggaccaaatcatgctgcctttcttcttgaggatggtagagtttgcaggattggtttttcagtacagccagacagattggaattgggtaaacctgataataatgatgggtcaaagttgaacagcaactcgggggcagggaggacgtcaaggcctggtaggacaagcgactctccatggtttctctcaggttctgagactctaggcaggctggcaggcaacaccttaggaagccgctggagttctggagtgggtggaagtggtggaggatcctctggtaggtcatcagctggagctcgagattcccgccggcagactcgagttattcggacaggacgggatcgagggtctgggcttttgggcagtcagccccagccagttattccagcatctgtcattccagaggagctgatttcacaggcccaagttgttttacaaggcaaatccagaagtgtcattattcgagaacttcagagaacaaatcttgatgtgaaccttgctgtaaataatttacttagccgggatgatgaagatggagatgatggggatgatacagccagcgaatcttatttgcctggagaggatcttatgtctctccttgatgccgacattcattctgcccacccaagtgtcattattgatgcagatgccatgttttctgaagacattagctattttggttacccttcttttcgtcgttcatcactttccaggctaggctcatctcgagttctccttcttcccttagagagagactctgagctgttgcgtgaacgtgaatccgttttacgtttacgtgaacgaaggtggcttgatggagcctcatttgataatgaaaggggttctaccagcaaggaaggagagccaaacttggataagaagaatacacctgttcaaagtccagtatctctaggagaagatttgcagtggtggcctgataaggatggaacaaaattcatctgtattggggctctgtattctgaacttctggctgtcagcagtaaaggagaactttatcagtggaaatggagtgaatctgagccttacagaaatgcccagaatccttcattacatcatccacgagcaacatttttggggttaaccaatgaaaagatagtcctcctgtctgcaaatagcataagagcaactgtagctacagaaaataacaaggttgctacatgggtggatgaaactttaagttctgtggcttctaaattagagcacactgctcagacttactctgaacttcaaggagagcggatagtttctttacattgctgtgccctttacacctgcgctcagctggaaaacagtttatattggtggggtgtagttccttttagtcaaaggaagaaaatgttagagaaagctagagcaaaaaataaaaagcctaaatccagtgctggtatttcttcaatgccgaacatcactgttggtacccaggtatgcttgagaaataatcctctttatcatgctggagcagttgcattttcaattagtgctgggattcctaaagttggtgtcttaatggagtcagtttggaatatgaatgacagctgtagatttcaacttagatctcctgaaagcttgaaaaacatggaaaaagctagcaaaactactgaagctaagcctgaaagtaagcaggagccagtgaaaacagaaatgggtcctccaccatctccagcatccacgtgtagtgatgcatcctcaattgccagcagtgcatcaatgccatacaaacgacgacggtcaacccctgcaccaaaagaagaggaaaaggtgaatgaagagcagtggtctcttcgggaagtggtttttgtggaagatgtcaagaatgttcctgttggcaaggtgctaaaagtagatggtgcctatgttgctgtaaaatttccaggaacctccagtaatactaactgtcagaacagctctggtccagatgctgacccttcttctctcctgcaggattgtaggttacttagaattgatgaattgcaggttgtcaaaactggtggaacaccgaaggttcccgactgtttccaaaggactcctaaaaagctttgtatacctgaaaaaacagaaatattagcagtgaatgtagattccaaaggtgttcatgctgttctgaagactggaaattgggtacgatactgtatctttgatcttgctacaggaaaagcagaacaggaaaataattttcctacaagcagcattgctttccttggtcagaatgagaggaatgtagccattttcactgctggacaggaatctcccattattcttcgagatggaaatggtaccatctacccaatggccaaagattgcatgggaggaataagggatcccgattggctggatcttccacctattagtagtcttggaatgggtgtgcattctttaataaatcttcctgccaattcaacaatcaaaaagaaagctgctgttatcatcatggctgtagagaaacaaaccttaatgcaacacattctgcgctgtgactatgaggcctgtcgacaatatctaatgaatcttgagcaagcggttgttttagagcagaatctacagatgctgcagacattcatcagccacagatgtgatggaaatcgaaatattttgcatgcttgtgtatcagtttgctttccaaccagcaataaagaaactaaagaagaagaggaagcggagcgttctgaaagaaatacatttgcagaaaggctttctgctgttgaggccattgcaaatgcaatatcagttgtttcaagtaatggcccaggtaatcgggctggatcatcaagtagccgaagtttgagattacgggaaatgatgagacgttcgttgagagcagctggtttgggtagacatgaagctggagcttcatccagtgaccaccaggatccagtttcaccccccatagctccccctagttgggttcctgaccctcctgcgatggatcctgatggtgacattgattttatcctggcccccgctgtgggatctcttaccacagcagcaaccggtactggtcaaggaccaagcacctccactattccaggtccttccacagagccatctgtagtagaatccaaggatcgaaaggcgaatgctcattttatattgaaattgttatgtgacagtgtggttctccagccctatctacgagaacttctttctgccaaggatgcaagagggatgaccccatttatgtcagctgtaagtggccgagcttatcctgctgcaattaccatcttagaaactgctcagaaaattgcaaaagctgaaatatcctcaagtgaaaaagaggaagatgtattcatgggaatggtttgcccatcaggtaccaaccctgatgactctcctttatatgttttatgttgtaatgacacttgcagttttacatggactggagcagagcacattaaccaggatatttttgagtgtcgaacttgtggcttgctggagtcactgtgttgttgtacggaatgtgcaagggtttgtcataaaggtcatgattgcaaactcaaacggacatcaccaacagcctactgtgattgttgggagaaatgtaaatgtaaaactcttattgctggacagaaatctgctcgtcttgatctactttatcgcctgctcactgctactaatctggttactctgccaaacagcaggggagagcacctcttactattcttagtacagacagtcgcaaggcagacggtggagcattgtcaatacaggccacctcgaatcagggaagatcgtaaccgaaaaacagccagtcctgaagattcagatatgccagatcatgatttagagcctccaagatttgcccagcttgcattggagcgtgttctacaggactggaatgccttgaaatctatgattatgtttgggtcgcaggagaataaagaccctcttagtgccagcagtagaataggccatcttttgccagaagagcaagtatacctcaatcagcaaagtggcacaattcggctggactgtttcactcattgccttatagttaagtgtacagcagatattttgcttttagatactctactaggtacactagtgaaagaactccaaaacaaatatacacctggacgtagagaagaagctattgctgtgacaatgaggtttctacgttcagtggcaagagtttttgttattctgagtgtggaaatggcttcatccaaaaagaaaaacaactttattccacagccaattggaaaatgcaagcgtgtattccaagcattgctaccttacgctgtggaagaattgtgcaacgtagcagagtcactgattgttcctgtcagaatggggattgctcgtccaactgcaccatttaccctggctagtactagcatagatgccatgcagggcagtgaagaattattttcagtggaaccactaccaccacgaccatcatctgatcagtctagcagctccagtcagtctcagtcatcctacatcatcaggaatccacagcagaggcgcatcagccagtcacagcccgttcggggcagagatgaagaacaggatgatattgtttcagcagatgtggaagaggttgaggtggtggagggtgtggctggagaagaggatcatcatgatgaacaggaagaacacggggaagaaaatgctgaggcagagggacaacatgatgagcatgatgaagacgggagtgatatggagctggacttgttagcagcagctgaaacagaaagtgatagtgaaagtaaccacagcaaccaagataatgctagtgggcgcagaagcgttgtcactgcagcaactgctggttcagaagcaggagcaagcagtgttcctgccttcttttctgaagatgattctcaatcgaatgactcaagtgattctgatagcagtagtagtcagagtgacgacatagaacaggagacctttatgcttgatgagccattagaaagaaccacaaatagctcccatgccaatggtgctgcccaagctccccgttcaatgcagtgggctgtccgcaacacccagcatcagcgagcagccagtacagccccttccagtacatctacaccagcagcaagttcagcgggtttgatttatattgatccttcaaacttacgccggagtggtaccatcagtacaagtgctgcagctgcagcagctgctttggaagctagcaacgccagcagttacctaacatctgcaagcagtttagccagggcttacagcattgtcattagacaaatctcggacttgatgggccttattcctaagtataatcacctagtatactctcagattccagcagctgtgaaattgacttaccaagatgcagtaaacttacagaactatgtagaagaaaagcttattcccacttggaactggatggtcagtattatggattctactgaagctcaattacgttatggttctgcattagcatctgctggtgatcctggacatccaaatcatcctcttcacgcttctcagaattcagcgagaagagagaggatgactgcgcgagaagaagctagcttacgaacacttgaaggcagacgacgtgccaccttgcttagcgcccgtcaaggaatgatgtctgcacgaggagacttcctaaattatgctctgtctctaatgcggtctcataatgatgagcattctgatgttcttccagttttggatgtttgctcattgaagcatgtggcatatgtttttcaagcacttatatactggattaaggcaatgaatcagcagacaacattggatacacctcaactagaacgcaaaaggacgcgagaactcttggaactgggtattgataatgaagattcagaacatgaaaatgatgatgacaccaatcaaagtgctactttgaatgataaggatgatgactctcttcctgcagaaactggccaaaaccatccatttttccgacgttcagactccatgacattccttgggtgtatacccccaaatccatttgaagtgcctctggctgaagccatccccttggctgatcagccacatctgttgcagccaaatgctagaaaggaggatctttttggccgtccaagtcagggtctttattcttcatctgccagtagtgggaaatgtttaatggaggttacagtggatagaaactgcctagaggttcttccaacaaaaatgtcttatgctgccaatctgaaaaatgtaatgaacatgcaaaaccggcaaaaaaaagaaggggaagaacagcccgtgctgccagaagaaactgagagttcaaaaccagggccatctgctcatgatcttgctgcacaattaaaaagtagcttactagcagaaataggacttactgaaagtgaagggccacctctcacatctttcaggccacagtgtagctttatgggaatggttatttcccatgatatgctgctaggacgttggcgcctttctttagaactgttcggcagggtattcatggaagatgttggagcagaacctggatcaatcctaactgaattgggtggttttgaggtaaaagaatcaaaattccgcagagaaatggaaaaactgagaaaccagcagtcaagagatttgtcactagaggttgatcgggatcgagatcttctcattcagcagactatgaggcagcttaacaatcactttggtcgaagatgtgctactacaccaatggctgtacacagagtaaaagtcacatttaaggatgagccaggagagggcagtggtgtagcacgaagtttttatacagccattgcacaagcatttttatcaaatgaaaaattgccaaatctagagtgtatccaaaatgccaacaaaggcacccacacaagtttaatgcagagattaaggaaccgaggagagagagaccgggaaagggagagagaaagggaaatgaggaggagtagtggtttgcgagcaggttctcggagggaccgggatagagactttagaagacagctttccatcgacactaggccctttagaccagcctctgaagggaatcctagcgatgatcctgagcctttgccagcacatcggcaggcacttggagagaggctttatcctcgtgtacaagcaatgcaaccagcatttgcaagtaaaatcactggcatgttgttggaattatccccagctcagctgcttctccttctagcaagtgaggattctctgagagcaagagtggatgaggccatggaactcattattgcacatggacgggaaaatggagctgatagtatcctggatcttggattagtagactcctcagaaaaggtacagcaggaaaaccgaaagcgccatggctctagtcgaagtgtagtagatatggatttagatgatacagatgatggtgatgacaatgcccctttgttttaccaacctgggaaaagaggattttatactccaaggcctggcaagaacacagaagcaaggttgaattgtttcagaaacattggcaggattcttggactatgtctgttacagaatgaactatgtcctatcacattgaatagacatgtaattaaagtattgcttggtagaaaagtcaattggcatgattttgctttttttgatcctgtaatgtatgagagtttgcggcaactaatcctcgcgtctcagagttcagatgctgatgctgttttctcagcaatggatttggcatttgcaattgacctgtgtaaagaagaaggtggaggacaggttgaactcattcctaatggtgtaaatataccagtcactccacagaatgtatatgagtatgtgcggaaatacgcagaacacagaatgttggtagttgcagaacagcccttacatgcaatgaggaaaggtctactagatgtgcttccaaaaaattcattagaagatttaacggcagaagattttaggcttttggtaaatggctgcggtgaagtcaatgtgcaaatgctgatcagttttacctctttcaatgatgaatcaggagaaaatgctgagaagcttctgcagttcaagcgttggttctggtcaatagtagagaagatgagcatgacagaacgacaagatcttgtttacttttggacatcaagcccatcactgccagccagtgaagaaggattccagcctatgccctcaatcacaataagaccaccagatgaccaacatcttcctactgcaaatacttgcatttctcgactttacgtcccactctattcctctaaacagattctcaaacagaaattgttactcgccattaagaccaagaattttggttttgtgtagagtataaaaagtgtgtattgctgtgtaatattactagcaaattttgtagatttttttccatttgtctataaaagtttatggaagttaatgctgtcatacccccctggtggtaccttaaagagataaaatgcagacattccttgctgagtttatagcttaaaggcctaaggagcactagcaacatttggctatattggtttgctagtcaccaacttctgggtctaaccccagccaaagatgacagcagaacaacataatttacactgtgatttatctttttgctgagggggaaaaaatgtaaatgttctgaaaattcactgctgcctttgtggaaactgtttcagcaaaggttcttgtatagagggaatagggaatttcaaaataaaaaattaagtatgttctgtgttttcattttaactttttttatggtgtttaatttgtggttggctgcaactgtgtatcatgtatatggaacttgtaaaaaagttctcgacattcagatcttaagagatgaaatcacttttacctataaaaaccacttttattgcggtttgactgcattgagctctaggatattaaatgatatcactaatattttgcatgtaatttgctcatttgagtgagggcactttttttgtacatatgatggggccaatgcacaatacttttatcacaatcaactttttctttgtatccctatttcaatgagcagtcagtctcaagaggttactgcacttcagttctaactagacatttgtactaaggtatttcagttatgtaaactcagcctgggcactttctgataactgtaaaatgttttataagatcatgattattgaagatacattttggaaaattttaaatgttcgtgagcagcttaactacttttgtatctagccttttttaagtatcttgttacatttacttttttaaataaagaaattacagaagaaatgtcaagtaatattgaagaaacaatagtttttatttatgtagttgtacatttttaaactaagggcaatacactgacatggttatgtgcataaaaattttgacttaaagaactggaagtttatatacacctggactataagaaacagaagaaaatcagtccacattttacagttagcagagaatcctaaatggcactggcctggccaccttttcattttacaaatgggggaagtgaagtgtgaccccttacttggcataggaagttaacttacacctaataactgacaggtttttgttttgatgacctattaattatgtagcctaggattaatatcc

SEQ ID NO: 197092 - DNA, 582 bp, Homo sapiens
  Payload ID: 18870
  Gene Name: ubiquitin protein ligase E3 component n-recognin 5
  ENST ID: ENST00000520898
  CDS Start-End: 1-582
attcatcagccacagatgtgatggaaatcgaaatattttgcatgcttgtgtatcagtttgctttccaaccagcaataaagaaactaaagaagaagaggcggagcgttctgaaagaaatacatttgcagaaaggctttctgctgttgaggccattgcaaatgcaatatcagttgtttcaagtaatggcccaggtaatcgggctggatcatcaagtagccgaagtttgagattacgggaaatgatgagacgttcgttgagagcagctggtttgggtagacatgaagctggagcttcatccagtgaccaccaggatccagtttcaccccccatagctccccctagttgggttcctgaccctcctgcgatggatcctgatggtgacattgattttatcctggcccccgctgtgggatctcttaccacagcagcaaccggtactggtcaaggaccaagcacctccactattccaggtccttccacagagccatctgtagtagaatccaaggatcgaaaggcgaatgctcattttatattgaaattgttatgtgacagtgtggttctccagccctatctacgagaact

SEQ ID NO: 197093 - DNA, 3694 bp, Homo sapiens
  Payload ID: 18871
  Gene Name: ubiquitin protein ligase E3 component n-recognin 7 (putative)
  Uniprot ID: Q8N806
  ENST ID: ENST00000013070
  CDS Start-End: 237-1514
agaacacgacaccgggaagcgccacccggaggcggaaatcagcccgcgtccggcgcaggcgggagaagggagaggagtgacatccgtttgtcggaagtcgctcctcccccttccttcgctttttttccttgtcattggttcctggcactcgggccccacctcctccggctacgcccctcacggccgcttttcccgcctccgccggggccgagccgctgttcggctgacagttgaggatggccggagccgagggcgccgctgggcggcagtcggagctggagcccgtggtatcgttggtcgacgtccttgaggaggacgaggagctggagaatgaggcgtgcgctgtcctgggcggcagcgactccgagaagtgctcctactctcagggctcagtaaagagacaagcactatatgcctgtagtacctgcaccccagagggagaagaaccagcaggaatttgtttagcttgcagttatgaatgtcatggaagtcacaaactatttgagctatacacaaaaagaaattttcgttgtgattgtggaaacagcaagtttaaaaatttggaatgcaaattacttcctgacaaagcaaaggtaaattctggcaataagtacaatgacaacttttttggattgtactgcatttgcaagagaccttatcctgatcctgaagacgagattccagatgagatgatccagtgcgtagtctgtgaagactggttccatggaaggcatcttggtgccattccccctgagagtggggattttcaggagatggtatgccaggcctgcatgaaacgttgttcttttttgtgggcttatgctgcacaattggcagtaaccaaaatatccactgaggatgatggattggtgcggaacattgatggaataggtgatcaggaagttatcaaacctgaaaatggagagcatcaagatagtaccctcaaagaggatgttccagaacagggaaaggatgatgtccgggaggttaaagtagagcagaacagtgaaccatgtgccggctctagttctgaatctgatctccagacagtgtttaagaatgaaagcctcaacgcagaatcaaaatctggctgcaaacttcaggagcttaaagctaagcagcttataaagaaagacactgccacctattggcccctgaactggcgtagcaagttgtgtacctgccaagactgtatgaaaatgtatggagatctagatgtcttattcctgacagatgaatacgacacagttctggcttatgaaaacaaagggaagattgcccaggccactgacaggagcgatcccctaatggatacccttagcagcatgaatagagtccagcaagtggaactcatttgtgaatacaatgatttgaagactgaacttaaagactatctcaagagatttgctgatgaaggcacggttgttaagagagaggacattcagcagttctttgaagagtttcagtcaaaaaagagaagaagagtggatgggatgcagtattactgcagctagagtggagtatgaagctttctcattcaagccaatgaaaatgcgcttcccattcttggaataaaagaggtgtggttcacatttggccccctttccgtcctcctctgtttggagaggcctcgcgctcccttcattctctttagctgcagtagccaccgtgtggatgctgacttcacagccagcgtcctctgtgactcagctgatgcagctcattccacagacttctccagtgtactcctactccagtgcacccagggttatttgcatagtttttaagtttgattttgttttgagaaagcaaattggtgtcttgtttaatgatctgttatttcactcccagatgtgtgtgttttgccacagagctgttgccttccagaacctcctccgcaggcatcacggaaggctctcttcccgtcacctagaacctctacaggtcccctcgcccctatgatcgtggtgccttgggtcaaagcttcctcaagcctggtctgctccttctttcacgtccctgttttctgaggtttggtcatagcttagaaaggatcttggggcttgttttctctaggcccaacctccagagtagccaggactgatggttttctggtctggatgtctgtcacaggcggagagattaacagatgacagggttgaggaagcaagcctttgttatgaattttactaatacagttcaagtgaaattttcgttcatgattctattggcactagaattagaatttcagtactgtagtgctcacagggcttcctggagaacatttgcccgtatactagtcccttctctgctgcctagaaaacagaccgggtctcacccctgtgaaatcttggtggtttacgaagtcctctggatttcttgatattatcagggatattcataagcatatatcaaaaatggacctattttgatattctgttatgaaaatgttattagaaccccaataaattattatttttcccccttgaatctgctaaagaaaacagatcctgacttagcttacttgaaataagcagggcagggagccctgttttggaagagacagactgtggaagagattacaaacaaggcccgaggctgcacgaatgatgagttttgtgtatataatgttaatgtccaccgccacttccctaacgactatgagatcttttttttgaagatcctcatggaaggttgtacagagccccacatttgaggggaagtcctttcagttgatatgagatctctttaacacccctcagtctatgtaggaaatgccttgtgatacatagagaaccctcagcttctctctgcctctggaggaccaaggtctttcctgacagtcggagacacaccttgatgtatgttaataaaagcatttcaggctgtggggccaccatgtatattaatactccttatgtgtccagcatctgtgtattcattcgagtgcccaatccctggatgagatgaactaggccttataaaaagtcaaagcctcaaagaaatggcacaaccatgttcttcggcactcaggctcctaattgcagatcctcacgaagggtggtatgtggagctggaaggtcttgtggccacaggacatgctggtgagccctgagctggccttgtgcagagggctccgttcaaaggctcggggtgtctttgaggttgtttatcaagctggggaactcttccaagtctgacaatgtttcgaaccctttttgcaaggttgcactattagtataccatcatgtccggaaaacttttaatcttctcaaatatctgatgtaactaccagaaagtcccttacttcctatgaccaatcaggaccaagtcttggaggtgatgtgttacattacgtgcagcacaatagtaccgatcagttaactcagcgctgaagggcttgttttatgaaaggtactattccttctttcacattaactggaaacctctttttttacctgttgttcacaactagttttcttattgactgtattggactgtctcttcttgtagagactgattttggccaacatattaatgcatgttttatgcaaaacacaaatatgatattagttgcttttaaggagttctggcattgtatgtgcatttttgtagaaattgttactggacttataattacatacttaactctgatcaggtttctgtaaaatttaaataaaaccaatacaaaata

SEQ ID NO: 197094 - DNA, 1413 bp, Homo sapiens
  Payload ID: 18871
  Gene Name: ubiquitin protein ligase E3 component n-recognin 7 (putative)
  ENST ID: ENST00000416753
  CDS Start-End: 331-1413
agaacacgacaccgggaagcgccacccggaggcggaaatcagcccgcgtccggcgcaggcgggagaagggagaggagtgacatccgtttgtcggaagtcgctcctcccccttccttcgctttttttccttgtcattggttcctggcactcgggccccacctcctccggctacgcccctcacggccgcttttcccgcctccgccggggccgagccgctgttcggctgacagttgaggatggccggagccgagggcgccgctgggcggcagtcggagctggagcccgtggtatcgttggtcgacgtccttgaggaggacgaggagctggagaatgaggcgtgcgctgtcctgggcggcagcgactccgagaagtgctcctactctcagaaattttcgttgtgattgtggaaacagcaagtttaaaaatttggaatgcaaattacttcctgacaaagcaaaggtaaattctggcaataagtacaatgacaacttttttggattgtactgcatttgcaagagaccttatcctgatcctgaagacgagattccagatgagatgatccagtgcgtagtctgtgaagactggttccatggaaggcatcttggtgccattccccctgagagtggggattttcaggagatggtatgccaggcctgcatgaaacgttgttcttttttgtgggcttatgctgcacaattggcagtaaccaaaatatccactgaggatgatggattggtgcggaacattgatggaataggtgatcaggaagttatcaaacctgaaaatggagagcatcaagatagtaccctcaaagaggatgttccagaacagggaaaggatgatgtccgggaggttaaagtagagcagaacagtgaaccatgtgccggctctagttctgaatctgatctccagacagtgtttaagaatgaaagcctcaacgcagaatcaaaatctggctgcaaacttcaggagcttaaagctaagcagcttataaagaaagacactgccacctattggcccctgaactggcgtagcaagttgtgtacctgccaagactgtatgaaaatgtatggagatctagatgtcttattcctgacagatgaatacgacacagttctggcttatgaaaacaaagggaagattgcccaggccactgacaggagcgatcccctaatggatacccttagcagcatgaatagagtccagcaagtggaactcatttgtgaatacaatgatttgaagactgaacttaaagactatctcaagagatttgctgatgaaggcacggttgttaagagagaggacattcagcagttctttgaagagtttcagaaaaaagagaagaagagtggatgggatgcagtattactgcagctagagtggagtatgaagctttctcattcaagccaatga

SEQ ID NO: 197095 - DNA, 1276 bp, Homo sapiens
  Payload ID: 18871
  Gene Name: ubiquitin protein ligase E3 component n-recognin 7 (putative)
  ENST ID: ENST00000553674
  CDS Start-End: 50-214
ttttcccgcctccgccggggccgagccgctgttcggctgacagttgaggatggccggagccgagggcgccgctgggcggcagtcggagctggagcccgtggtatcgttggtcgacgtccttgaggaggacgaggagctggagaatgaggcgtgcgctgtcctgggcggcagcgactccgagaagtgctcctactctcagaaattttcgttgtgattgtggaaacagcaagtttaaaaatttggaatgcaaattacttcctgacaaagcaaaggtaaattctggcaataagtacaatgacaacttttttggattgtactgcatttgcaagagaccttatcctgatcctgaagacgagattccagatgagatgatccagtgcgtagtctgtgaagactggttccatggaaggcatcttggtgccattccccctgagagtggggattttcaggagatggtatgccaggcctgcatgaaacgttgttcttttttgtgggcttatgctgcacaattggcagtaaccaaaatatccactgaggatgatggattggtgcggaacattgatggaataggtgatcaggaagttatcaaacctgaaaatggagagcatcaagatagtaccctcaaagaggatgttccagaacagggaaaggatgatgtccgggaggttaaagtagagcagaacagtgaaccatgtgccggctctagttctgaatctgatctccagacagtgtttaagaatgaaagcctcaacgcagaatcaaaatctggctgcaaacttcaggagcttaaagctaagcagcttataaagaaagacactgccacctattggcccctgaactggcgtagcaagttgtgtacctgccaagactgtatgaaaatgtatggagatctagatgtcttattcctgacagatgaatacgacacagttctggcttatgaaaacaaagggaagattgcccaggccactgacaggagcgatcccctaatggatacccttagcagcatgaatagagtccagcaagtggaactcatttgtgaatacaatgatttgaagactgaacttaaagactatctcaagagatttgctgatgaaggcacggttgttaagagagaggacattcagcagttctttgaagagtttcagtcaaaaaagagaagaagagtggatgggatgcagtattactgcagctagagtggagtatgaagctttctcattcaagccaatgaaaatgcgcttcccattcttggaataaaagaggtgtggttcacatttgg

SEQ ID NO: 197096 - DNA, 587 bp, Homo sapiens
  Payload ID: 18871
  Gene Name: ubiquitin protein ligase E3 component n-recognin 7 (putative)
  ENST ID: ENST00000554232
  CDS Start-End: 52-587
gcttttcccgcctccgccggggccgagccgctgttcggctgacagttgaggatggccggagccgagggcgccgctgggcggcagtcggagctggagcccgtggtatcgttggtcgacgtccttgaggaggacgaggagctggagaatgaggcgtgcgctgtcctgggcggcagcgactccgagaagtgctcctactctcagggctcagtaaagagacaagcactatatgcctgtagtacctgcaccccagagggagaagaaccagcaggaatttgtttagcttgcagttatgaatgtcatggaagtcacaaactatttgagctatacacaaaaagaaattttcgttgtgattgtggaaacagcaagtttaaaaatttggaatgcaaattacttcctattccagatgagatgatccagtgcgtagtctgtgaagactggttccatggaaggcatcttggtgccattccccctgagagtggggattttcaggagatggtatgccaggcctgcatgaaacgttgttcttttttgtgggcttatgctgcacaattggcagtaaccaaaatatccactgaggatgatggatt

SEQ ID NO: 197097 - DNA, 507 bp, Homo sapiens
  Payload ID: 18871
  Gene Name: ubiquitin protein ligase E3 component n-recognin 7 (putative)
  ENST ID: ENST00000556871
  CDS Start-End: 50-507
ttttcccgcctccgccggggccgagccgctgttcggctgacagttgaggatggccggagccgagggcgccgctgggcggcagtcggagctggagcccgtggtatcgttggtcgacgtccttgaggaggacgaggagctggagaatgaggcgtgcgctgtcctgggcggcagcgactccgagaagtgctcctactctcagattccagatgagatgatccagtgcgtagtctgtgaagactggttccatggaaggcatcttggtgccattccccctgagagtggggattttcaggagatggtatgccaggcctgcatgaaacgttgttcttttttgtgggcttatgctgcacaattggcagtaaccaaaatatccactgaggatgatggattggtgcggaacattgatggaataggtgatcaggaagttatcaaacctgaaaatggagagcatcaagatagtaccctcaaagaggatgttccagaacagggaaaggatgatgtccggga

SEQ ID NO: 197098 - DNA, 490 bp, Homo sapiens
  Payload ID: 18871
  Gene Name: ubiquitin protein ligase E3 component n-recognin 7 (putative)
  ENST ID: ENST00000555113
  CDS Start-End: 1-490
ggccggagccgagggcgccgctgggcggcagtcggagctggagcccgtggtatcgttggtcgacgtccttgaggaggacgaggagctggagaatgaggcgtgcgctgtcctgggcggcagcgactccgagaagtgctcctactctcagggctcagtaaagagacaagcactatatgcctgtagtacctgcaccccagagggagaagaaccagcaggaatttgtttagcttgcagttatgaatgtcatggaagtcacaaactatttgagctatacacaaaaagcaagtttaaaaatttggaatgcaaattacttcctgacaaagcaaaggtaaattctggcaataagtacaatgacaacttttttggattgtactgcatttgcaagagaccttatcctgatcctgaagacgagattccagatgagatgatccagtgcgtagtctgtgaagactggttccatggaaggcatcttggtgccattccccctgag

SEQ ID NO: 197099 - DNA, 522 bp, Homo sapiens
  Payload ID: 18871
  Gene Name: ubiquitin protein ligase E3 component n-recognin 7 (putative)
  ENST ID: ENST00000553857
  CDS Start-End: 1-522
gtttagcttgcagttatgaatgtcatggaagtcacaaactatttgagctatacacaaaaagaaattttcgttgtgattgtggaaacagcaagtttaaaaatttggaatgcaaattacttcctgacaaagcaaaggtaaattctggcaataagtacaatgacaacttttttggattgtactgcatttgcaagagaccttatcctgatcctgaagacgagattccagatgagatgatccagtgcgtagtctgtgaagactggttccatggaaggcatcttggtgccattccccctgagagtggggattttcaggagatggtatgccaggcctgcatgaaacgttgttcttttttgtgggcttatgctgcacaattggcagaatacaatgatttgaagactgaacttaaagactatctcaagagatttgctgatgaaggcacggttgttaagagagaggacattcagcagttctttgaagagtttcagtcaaaaaagagaagaagagtggatgggatgcagtatt

SEQ ID NO: 197100 - DNA, 563 bp, Homo sapiens
  Payload ID: 18871
  Gene Name: ubiquitin protein ligase E3 component n-recognin 7 (putative)
  ENST ID: ENST00000555329
  CDS Start-End: 1-373
agtagagcagaacagtgaaccatgtgccggctctagttctgaatctgatctccagaaaatgtatggagatctagatgtcttattcctgacagatgaatacgacacagttctggcttatgaaaacaaagggaagattgcccaggccactgacaggagcgatcccctaatggatacccttagcagcatgaatagagtccagcaagtggaactcatttgtgaatacaatgatttgaagactgaacttaaagactatctcaagagatttgctgatgaaggcacggttgttaagagagaggacattcagcagttctttgaagagtttcagtcaaaaaagagaagaagagtggatgggatgcagtattactgcagctagagtggagtatgaagctttctcattcaagccaatgaaaatgcgcttcccattcttggaataaaagaggtgtggttcacatttggccccctttccgtcctcctctgtttggagaggcctcgcgctcccttcattctctttagctgcagtagccaccgtgtggatgctgacttcacagccagcgtcctctgtg

SEQ ID NO: 197101 - DNA, 1413 bp, Homo sapiens; identical to SEQ ID NO: 197094
  Payload ID: 18871
  Gene Name: ubiquitin protein ligase E3 component n-recognin 7 (putative)
  ENST ID: ENST00000611035
  CDS Start-End: 331-1413

SEQ ID NO: 197102 - DNA, 3694 bp, Homo sapiens; identical to SEQ ID NO: 197093
  Payload ID: 18871
  Gene Name: ubiquitin protein ligase E3 component n-recognin 7 (putative)
  Uniprot ID: Q8N806
  ENST ID: ENST00000619583
  CDS Start-End: 237-1514

SEQ ID NO: 197103 - DNA, 490 bp, Homo sapiens; identical to SEQ ID NO: 197098
  Payload ID: 18871
  Gene Name: ubiquitin protein ligase E3 component n-recognin 7 (putative)
  ENST ID: ENST00000625851
  CDS Start-End: 1-490

SEQ ID NO: 197104 - DNA, 522 bp, Homo sapiens; identical to SEQ ID NO: 197099
  Payload ID: 18871
  Gene Name: ubiquitin protein ligase E3 component n-recognin 7 (putative)
  ENST ID: ENST00000627299
  CDS Start-End: 1-522

SEQ ID NO: 197105 - DNA, 563 bp, Homo sapiens; identical to SEQ ID NO: 197100
  Payload ID: 18871
  Gene Name: ubiquitin protein ligase E3 component n-recognin 7 (putative)
  ENST ID: ENST00000625902
  CDS Start-End: 1-373

SEQ ID NO: 197106 - DNA, 507 bp, Homo sapiens; identical to SEQ ID NO: 197097
  Payload ID: 18871
  Gene Name: ubiquitin protein ligase E3 component n-recognin 7 (putative)
  ENST ID: ENST00000630635
  CDS Start-End: 50-507

SEQ ID NO: 197107 - DNA, 587 bp, Homo sapiens; identical to SEQ ID NO: 197096
  Payload ID: 18871
  Gene Name: ubiquitin protein ligase E3 component n-recognin 7 (putative)
  ENST ID: ENST00000628088
  CDS Start-End: 52-587

SEQ ID NO: 197108 - DNA, 5051 bp, Homo sapiens
  Payload ID: 18872
  Gene Name: ubiquitin protein ligase E3A
  Uniprot ID: Q05086
  ENST ID: ENST00000232165
  CDS Start-End: 609-3167
gctgcctgccgggatactcggcccgcccagccagtcctcccgtcttgcgccgcggccgcgagatccgtgtgtctcccaagatggtggcgctgggctcggggtgactacaggagacgacggggccttttcccttcgccaggacccgacacaccaggcttcgctcgctcgcgcacccctccgccgcgtagccatccgccagcgcgggcgcccgccatccgccgcctacttacgcttcacctctgccgacccggcgcgctcggctgcgggcggcggcgcctccttcggctcctcctcggaatagctcgcggcctgtagcccctggcaggagggcccctcagccccccggtgtggacaggcagcggcggctggcgacgaacgccgggatttcggcggccccggcgctccctttcccggcctcgttttccggataaggaagcgcgggtcccgcatgagccccggcggtggcggcagcgaaagagaacgaggcggtggcgggcggaggcggcgggcgagggcgactacgaccagtgaggcggccgccgcagcccaggcgcgggggcgacgacagatcaggagaacctcagtctgacgacattgaagctagccgaatgaagcgagcagctgcaaagcatctaatagaacgctactaccaccagttaactgagggctgtggaaatgaagcctgcacgaatgagttttgtgcttcctgtccaacttttcttcgtatggataataatgcagcagctattaaagccctcgagctttataagattaatgcaaaactctgtgatcctcatccctccaagaaaggagcaagctcagcttaccttgagaactcgaaaggtgcccccaacaactcctgctctgagataaaaatgaacaagaaaggcgctagaattgattttaaagatgtgacttacttaacagaagagaaggtatatgaaattcttgaattatgtagagaaagagaggattattcccctttaatccgtgttattggaagagttttttctagtgctgaggcattggtacagagcttccggaaagttaaacaacacaccaaggaagaactgaaatctcttcaagcaaaagatgaagacaaagatgaagatgaaaaggaaaaagctgcatgttctgctgctgctatggaagaagactcagaagcatcttcctcaaggataggtgatagctcacagggagacaacaatttgcaaaaattaggccctgatgatgtgtctgtggatattgatgccattagaagggtctacaccagattgctctctaatgaaaaaattgaaactgcctttctcaatgcacttgtatatttgtcacctaacgtggaatgtgacttgacgtatcacaatgtatactctcgagatcctaattatctgaatttgttcattatcgtaatggagaatagaaatctccacagtcctgaatatctggaaatggctttgccattattttgcaaagcgatgagcaagctaccccttgcagcccaaggaaaactgatcagactgtggtctaaatacaatgcagaccagattcggagaatgatggagacatttcagcaacttattacttataaagtcataagcaatgaatttaacagtcgaaatctagtgaatgatgatgatgccattgttgctgcttcgaagtgcttgaaaatggtttactatgcaaatgtagtgggaggggaagtggacacaaatcacaatgaagaagatgatgaagagcccatccctgagtccagcgagctgacacttcaggaacttttgggagaagaaagaagaaacaagaaaggtcctcgagtggaccccctggaaactgaacttggtgttaaaaccctggattgtcgaaaaccacttatcccttttgaagagtttattaatgaaccactgaatgaggttctagaaatggataaagattatacttttttcaaagtagaaacagagaacaaattctcttttatgacatgtccctttatattgaatgctgtcacaaagaatttgggattatattatgacaatagaattcgcatgtacagtgaacgaagaatcactgttctctacagcttagttcaaggacagcagttgaatccatatttgagactcaaagttagacgtgaccatatcatagatgatgcacttgtccggctagagatgatcgctatggaaaatcctgcagacttgaagaagcagttgtatgtggaatttgaaggagaacaaggagttgatgagggaggtgtttccaaagaattttttcagctggttgtggaggaaatcttcaatccagatattggtatgttcacatacgatgaatctacaaaattgttttggtttaatccatcttcttttgaaactgagggtcagtttactctgattggcatagtactgggtctggctatttacaataactgtatactggatgtacattttcccatggttgtctacaggaagctaatggggaaaaaaggaacttttcgtgacttgggagactctcacccagttctatatcagagtttaaaagatttattggagtatgaagggaatgtggaagatgacatgatgatcactttccagatatcacagacagatctttttggtaacccaatgatgtatgatctaaaggaaaatggtgataaaattccaattacaaatgaaaacaggaaggaatttgtcaatctttattctgactacattctcaataaatcagtagaaaaacagttcaaggcttttcggagaggttttcatatggtgaccaatgaatctcccttaaagtacttattcagaccagaagaaattgaattgcttatatgtggaagccggaatctagatttccaagcactagaagaaactacagaatatgacggtggctataccagggactctgttctgattagggagttctgggaaatcgttcattcatttacagatgaacagaaaagactcttcttgcagtttacaacgggcacagacagagcacctgtgggaggactaggaaaattaaagatgattatagccaaaaatggcccagacacagaaaggttacctacatctcatacttgctttaatgtgcttttacttccggaatactcaagcaaagaaaaacttaaagagagattgttgaaggccatcacgtatgccaaaggatttggcatgctgtaaaacaaaacaaaacaaaataaaacaaaaaaaaggaaggaaaaaaaaagaaaaaatttaaaaaattttaaaaatataacgagggataaatttttggtggtgatagtgtcccagtacaaaaaggctgtaagatagtcaaccacagtagtcacctatgtctgtgcctcccttctttattggggacatgtgggctggaacagcagatttcagctacatatatgaacaaatcctttattattattataattatttttttgcgtgaaagtgttacatattctttcacttgtatgtacagagaggtttttctgaatatttattttaagggttaaatcacttttgcttgtgtttattactgcttgaggttgagccttttgagtatttaaaaaatatataccaacagaactactctcccaaggaaaatattgccaccatttgtagaccacgtaaccttcaagtatgtgctacttttttgtccctgtatctaactcaaatcaggaactgtattttttttaatgatttgcttttgaaacttgaagtcttgaaaacagtgtgatgcaattactgctgttctagcccccaaagagttttctgtgcaaaatcttgagaatcaatcaataaagaaagatggaaggaagggagaaattggaatgttttaactgcagccctcagaactttagtaacagcacaacaaattaaaaacaaaaacaactcatgccacagtatgtcgtcttcatgtgtcttgcaatgaactgtttcagtagccaatcctctttcttagtatatgaaaggacagggatttttgttcttgttgttctcgttgttgttttaagtttactggggaaagtgcatttggccaaatgaaatggtagtcaagcctattgcaacaaagttaggaagtttgttgtttgtttattataaacaaaaagcatgtgaaagtgcacttaagatagagtttttattaattacttacttattacctagattttaaatagacaatccaaagtctccccttcgtgttgccatcatcttgttgaatcagccattttatcgaggcacgtgatcagtgttgcaacataatgaaaaagatggctactgtgccttgtgttacttaatcatacagtaagctgacctggaaatgaatgaaactattactcctaagaattacattgtatagccccacagattaaatttaattaattaattcaaaacatgttaaacgttactttcatgtactatggaaaagtacaagtaggtttacattactgatttccagaagtaagtagtttcccctttcctagtcttctgtgtatgtgatgttgttaatttcttttattgcattataaaataaaaggattatgtatttttaactaaggtgagacattgatatatccttttgctacaagctatagctaatgtgctgagcttgtgccttggtgattgattgattgattgactgattgttttaactgattactgtagatcaacctgatgatttgtttgtttgaaattggcaggaaaaatgcagctttcaaatcattggggggagaaaaaggatgtctttcaggattattttaattaatttttttcataattgagacagaactgtttgttatgtaccataatgctaaataaaactgtggcacttttcaccataatttaatttagtggaaaaagaagacaatgctttccatattgtgataaggtaacatggggtttttctgggccagcctttagaacactgttagggtacatacgctaccttgatgaaagggaccttcgtgcaactgtagtcatcttaaaggcttctcatccactgtgcttcttaatgtgtaattaaagtgaggagaaattaaatactctgagggcgttttatataataaattcgtg

SEQ ID NO: 197109 - DNA, 2873 bp, Homo sapiens
  Payload ID: 18872
  Gene Name: ubiquitin protein ligase E3A
  Uniprot ID: Q05086
  ENST ID: ENST00000397954
  CDS Start-End: 246-2873
agcccaggcgcgggggcgacgacaggttaaaaatctgtaagagcctgattttagaattcaccagctcctcagaagtttggcgaaatatgagttattaagcctacgctcagatcaaggtagcagctagactggtgtgacaacctgtttttaatcagtgactcaaagctgtgatcaccctgatgtcaccgaatggccacagcttgtaaaagagagttacagtggaggtaaaaggagtggcttgcaggatggagaagctgcaccagtgttattggaaatcaggagaacctcagtctgacgacattgaagctagccgaatgaagcgagcagctgcaaagcatctaatagaacgctactaccaccagttaactgagggctgtggaaatgaagcctgcacgaatgagttttgtgcttcctgtccaacttttcttcgtatggataataatgcagcagctattaaagccctcgagctttataagattaatgcaaaactctgtgatcctcatccctccaagaaaggagcaagctcagcttaccttgagaactcgaaaggtgcccccaacaactcctgctctgagataaaaatgaacaagaaaggcgctagaattgattttaaagatgtgacttacttaacagaagagaaggtatatgaaattcttgaattatgtagagaaagagaggattattcccctttaatccgtgttattggaagagttttttctagtgctgaggcattggtacagagcttccggaaagttaaacaacacaccaaggaagaactgaaatctcttcaagcaaaagatgaagacaaagatgaagatgaaaaggaaaaagctgcatgttctgctgctgctatggaagaagactcagaagcatcttcctcaaggataggtgatagctcacagggagacaacaatttgcaaaaattaggccctgatgatgtgtctgtggatattgatgccattagaagggtctacaccagattgctctctaatgaaaaaattgaaactgcctttctcaatgcacttgtatatttgtcacctaacgtggaatgtgacttgacgtatcacaatgtatactctcgagatcctaattatctgaatttgttcattatcgtaatggagaatagaaatctccacagtcctgaatatctggaaatggctttgccattattttgcaaagcgatgagcaagctaccccttgcagcccaaggaaaactgatcagactgtggtctaaatacaatgcagaccagattcggagaatgatggagacatttcagcaacttattacttataaagtcataagcaatgaatttaacagtcgaaatctagtgaatgatgatgatgccattgttgctgcttcgaagtgcttgaaaatggtttactatgcaaatgtagtgggaggggaagtggacacaaatcacaatgaagaagatgatgaagagcccatccctgagtccagcgagctgacacttcaggaacttttgggagaagaaagaagaaacaagaaaggtcctcgagtggaccccctggaaactgaacttggtgttaaaaccctggattgtcgaaaaccacttatcccttttgaagagtttattaatgaaccactgaatgaggttctagaaatggataaagattatacttttttcaaagtagaaacagagaacaaattctcttttatgacatgtccctttatattgaatgctgtcacaaagaatttgggattatattatgacaatagaattcgcatgtacagtgaacgaagaatcactgttctctacagcttagttcaaggacagcagttgaatccatatttgagactcaaagttagacgtgaccatatcatagatgatgcacttgtccggctagagatgatcgctatggaaaatcctgcagacttgaagaagcagttgtatgtggaatttgaaggagaacaaggagttgatgagggaggtgtttccaaagaattttttcagctggttgtggaggaaatcttcaatccagatattggtatgttcacatacgatgaatctacaaaattgttttggtttaatccatcttcttttgaaactgagggtcagtttactctgattggcatagtactgggtctggctatttacaataactgtatactggatgtacattttcccatggttgtctacaggaagctaatggggaaaaaaggaacttttcgtgacttgggagactctcacccagttctatatcagagtttaaaagatttattggagtatgaagggaatgtggaagatgacatgatgatcactttccagatatcacagacagatctttttggtaacccaatgatgtatgatctaaaggaaaatggtgataaaattccaattacaaatgaaaacaggaaggaatttgtcaatctttattctgactacattctcaataaatcagtagaaaaacagttcaaggcttttcggagaggttttcatatggtgaccaatgaatctcccttaaagtacttattcagaccagaagaaattgaattgcttatatgtggaagccggaatctagatttccaagcactagaagaaactacagaatatgacggtggctataccagggactctgttctgattagggagttctgggaaatcgttcattcatttacagatgaacagaaaagactcttcttgcagtttacaacgggcacagacagagcacctgtgggaggactaggaaaattaaagatgattatagccaaaaatggcccagacacagaaaggttacctacatctcatacttgctttaatgtgcttttacttccggaatactcaagcaaagaaaaacttaaagagagattgttgaaggccatcacgtatgccaaaggatttggcatgctgtaa

SEQ ID NO: 197110 - DNA, 2986 bp, Homo sapiens
  Payload ID: 18872
  Gene Name: ubiquitin protein ligase E3A
  Uniprot ID: Q05086
  ENST ID: ENST00000428984
  CDS Start-End: 397-2955
gcggccgccgcagcccaggcgcgggggcgacgacaggttaaaaatctgtaagagcctgattttagaattcaccagctcctcagaagtttggcgaaatatgagttattaagcctacgctcagatcaaggtagcagctagactggtgtgacaacctgtttttaatcagtgactcaaagctgtgatcaccctgatgtcaccgaatggccacagcttgtaaaagagagttacagtggaggtaaaaggagtggcttgcaggatggagaagctgcaccagtgttattggaactcttctgtctgggagatacaagtttggaagcaatcttggggtacttacccacaaggctggtggagaccagatcaggagaacctcagtctgacgacattgaagctagccgaatgaagcgagcagctgcaaagcatctaatagaacgctactaccaccagttaactgagggctgtggaaatgaagcctgcacgaatgagttttgtgcttcctgtccaacttttcttcgtatggataataatgcagcagctattaaagccctcgagctttataagattaatgcaaaactctgtgatcctcatccctccaagaaaggagcaagctcagcttaccttgagaactcgaaaggtgcccccaacaactcctgctctgagataaaaatgaacaagaaaggcgctagaattgattttaaagatgtgacttacttaacagaagagaaggtatatgaaattcttgaattatgtagagaaagagaggattattcccctttaatccgtgttattggaagagttttttctagtgctgaggcattggtacagagcttccggaaagttaaacaacacaccaaggaagaactgaaatctcttcaagcaaaagatgaagacaaagatgaagatgaaaaggaaaaagctgcatgttctgctgctgctatggaagaagactcagaagcatcttcctcaaggataggtgatagctcacagggagacaacaatttgcaaaaattaggccctgatgatgtgtctgtggatattgatgccattagaagggtctacaccagattgctctctaatgaaaaaattgaaactgcctttctcaatgcacttgtatatttgtcacctaacgtggaatgtgacttgacgtatcacaatgtatactctcgagatcctaattatctgaatttgttcattatcgtaatggagaatagaaatctccacagtcctgaatatctggaaatggctttgccattattttgcaaagcgatgagcaagctaccccttgcagcccaaggaaaactgatcagactgtggtctaaatacaatgcagaccagattcggagaatgatggagacatttcagcaacttattacttataaagtcataagcaatgaatttaacagtcgaaatctagtgaatgatgatgatgccattgttgctgcttcgaagtgcttgaaaatggtttactatgcaaatgtagtgggaggggaagtggacacaaatcacaatgaagaagatgatgaagagcccatccctgagtccagcgagctgacacttcaggaacttttgggagaagaaagaagaaacaagaaaggtcctcgagtggaccccctggaaactgaacttggtgttaaaaccctggattgtcgaaaaccacttatcccttttgaagagtttattaatgaaccactgaatgaggttctagaaatggataaagattatacttttttcaaagtagaaacagagaacaaattctcttttatgacatgtccctttatattgaatgctgtcacaaagaatttgggattatattatgacaatagaattcgcatgtacagtgaacgaagaatcactgttctctacagcttagttcaaggacagcagttgaatccatatttgagactcaaagttagacgtgaccatatcatagatgatgcacttgtccggctagagatgatcgctatggaaaatcctgcagacttgaagaagcagttgtatgtggaatttgaaggagaacaaggagttgatgagggaggtgtttccaaagaattttttcagctggttgtggaggaaatcttcaatccagatattggtatgttcacatacgatgaatctacaaaattgttttggtttaatccatcttcttttgaaactgagggtcagtttactctgattggcatagtactgggtctggctatttacaataactgtatactggatgtacattttcccatggttgtctacaggaagctaatggggaaaaaaggaacttttcgtgacttgggagactctcacccagttctatatcagagtttaaaagatttattggagtatgaagggaatgtggaagatgacatgatgatcactttccagatatcacagacagatctttttggtaacccaatgatgtatgatctaaaggaaaatggtgataaaattccaattacaaatgaaaacaggaaggaatttgtcaatctttattctgactacattctcaataaatcagtagaaaaacagttcaaggcttttcggagaggttttcatatggtgaccaatgaatctcccttaaagtacttattcagaccagaagaaattgaattgcttatatgtggaagccggaatctagatttccaagcactagaagaaactacagaatatgacggtggctataccagggactctgttctgattagggagttctgggaaatcgttcattcatttacagatgaacagaaaagactcttcttgcagtttacaacgggcacagacagagcacctgtgggaggactaggaaaattaaagatgattatagccaaaaatggcccagacacagaaaggttacctacatctcatacttgctttaatgtgcttttacttccggaatactcaagcaaagaaaaacttaaagagagattgttgaaggccatcacgtatgccaaaggatttggcatgctgtaaaacaaaacaaaacaaaataaaacaaaaaaaa

SEQ ID NO: 197111 - DNA, 2658 bp, Homo sapiens
  Payload ID: 18872
  Gene Name: ubiquitin protein ligase E3A
  Uniprot ID: Q05086
  ENST ID: ENST00000438097
  CDS Start-End: 100-2658
ggagatacaagtttggaagcaatcttggggtacttacccacaaggctggtggagaccagatcaggagaacctcagtctgacgacattgaagctagccgaatgaagcgagcagctgcaaagcatctaatagaacgctactaccaccagttaactgagggctgtggaaatgaagcctgcacgaatgagttttgtgcttcctgtccaacttttcttcgtatggataataatgcagcagctattaaagccctcgagctttataagattaatgcaaaactctgtgatcctcatccctccaagaaaggagcaagctcagcttaccttgagaactcgaaaggtgcccccaacaactcctgctctgagataaaaatgaacaagaaaggcgctagaattgattttaaagatgtgacttacttaacagaagagaaggtatatgaaattcttgaattatgtagagaaagagaggattattcccctttaatccgtgttattggaagagttttttctagtgctgaggcattggtacagagcttccggaaagttaaacaacacaccaaggaagaactgaaatctcttcaagcaaaagatgaagacaaagatgaagatgaaaaggaaaaagctgcatgttctgctgctgctatggaagaagactcagaagcatcttcctcaaggataggtgatagctcacagggagacaacaatttgcaaaaattaggccctgatgatgtgtctgtggatattgatgccattagaagggtctacaccagattgctctctaatgaaaaaattgaaactgcctttctcaatgcacttgtatatttgtcacctaacgtggaatgtgacttgacgtatcacaatgtatactctcgagatcctaattatctgaatttgttcattatcgtaatggagaatagaaatctccacagtcctgaatatctggaaatggctttgccattattttgcaaagcgatgagcaagctaccccttgcagcccaaggaaaactgatcagactgtggtctaaatacaatgcagaccagattcggagaatgatggagacatttcagcaacttattacttataaagtcataagcaatgaatttaacagtcgaaatctagtgaatgatgatgatgccattgttgctgcttcgaagtgcttgaaaatggtttactatgcaaatgtagtgggaggggaagtggacacaaatcacaatgaagaagatgatgaagagcccatccctgagtccagcgagctgacacttcaggaacttttgggagaagaaagaagaaacaagaaaggtcctcgagtggaccccctggaaactgaacttggtgttaaaaccctggattgtcgaaaaccacttatcccttttgaagagtttattaatgaaccactgaatgaggttctagaaatggataaagattatacttttttcaaagtagaaacagagaacaaattctcttttatgacatgtccctttatattgaatgctgtcacaaagaatttgggattatattatgacaatagaattcgcatgtacagtgaacgaagaatcactgttctctacagcttagttcaaggacagcagttgaatccatatttgagactcaaagttagacgtgaccatatcatagatgatgcacttgtccggctagagatgatcgctatggaaaatcctgcagacttgaagaagcagttgtatgtggaatttgaaggagaacaaggagttgatgagggaggtgtttccaaagaattttttcagctggttgtggaggaaatcttcaatccagatattggtatgttcacatacgatgaatctacaaaattgttttggtttaatccatcttcttttgaaactgagggtcagtttactctgattggcatagtactgggtctggctatttacaataactgtatactggatgtacattttcccatggttgtctacaggaagctaatggggaaaaaaggaacttttcgtgacttgggagactctcacccagttctatatcagagtttaaaagatttattggagtatgaagggaatgtggaagatgacatgatgatcactttccagatatcacagacagatctttttggtaacccaatgatgtatgatctaaaggaaaatggtgataaaattccaattacaaatgaaaacaggaaggaatttgtcaatctttattctgactacattctcaataaatcagtagaaaaacagttcaaggcttttcggagaggttttcatatggtgaccaatgaatctcccttaaagtacttattcagaccagaagaaattgaattgcttatatgtggaagccggaatctagatttccaagcactagaagaaactacagaatatgacggtggctataccagggactctgttctgattagggagttctgggaaatcgttcattcatttacagatgaacagaaaagactcttcttgcagtttacaacgggcacagacagagcacctgtgggaggactaggaaaattaaagatgattatagccaaaaatggcccagacacagaaaggttacctacatctcatacttgctttaatgtgcttttacttccggaatactcaagcaaagaaaaacttaaagagagattgttgaaggccatcacgtatgccaaaggatttggcatgctgtaa

SEQ ID NO: 197112 - DNA, 3176 bp, Homo sapiens
  Payload ID: 18872
  Gene Name: ubiquitin protein ligase E3A
  Uniprot ID: Q05086
  ENST ID: ENST00000566215
  CDS Start-End: 587-3145
cgactacgaccagtgaggcggccgccgcagcccaggcgcgggggcgacgacaggttaaaaatctgtaagagcctgattttagaattcaccagctcctcagaagtttggcgaaatatgagttattaagcctacgctcagatcaaggtagcagctagactggtgtgacaacctgtttttaatcagtgactcaaagctgtgatcaccctgatgtcaccgaatggccacagcttgtaaaagagagttacagtggaggtaaaaggagtggcttgcaggatggagaagctgcaccagtgttattggaagtgagccaccatttgaatttgctagctcatgctgcagtattcagattatgccagcaggtttattttttgttttgcaagccagctctgcctccttacagtatgacatctgatgctggagggtcgcactttcaaaaatgagtcagctggtacatggggttatcatcaatttttagctcttctgtctgggagatacaagtttggaagcaatcttggggtacttacccacaaggctggtggagaccagatcaggagaacctcagtctgacgacattgaagctagccgaatgaagcgagcagctgcaaagcatctaatagaacgctactaccaccagttaactgagggctgtggaaatgaagcctgcacgaatgagttttgtgcttcctgtccaacttttcttcgtatggataataatgcagcagctattaaagccctcgagctttataagattaatgcaaaactctgtgatcctcatccctccaagaaaggagcaagctcagcttaccttgagaactcgaaaggtgcccccaacaactcctgctctgagataaaaatgaacaagaaaggcgctagaattgattttaaagatgtgacttacttaacagaagagaaggtatatgaaattcttgaattatgtagagaaagagaggattattcccctttaatccgtgttattggaagagttttttctagtgctgaggcattggtacagagcttccggaaagttaaacaacacaccaaggaagaactgaaatctcttcaagcaaaagatgaagacaaagatgaagatgaaaaggaaaaagctgcatgttctgctgctgctatggaagaagactcagaagcatcttcctcaaggataggtgatagctcacagggagacaacaatttgcaaaaattaggccctgatgatgtgtctgtggatattgatgccattagaagggtctacaccagattgctctctaatgaaaaaattgaaactgcctttctcaatgcacttgtatatttgtcacctaacgtggaatgtgacttgacgtatcacaatgtatactctcgagatcctaattatctgaatttgttcattatcgtaatggagaatagaaatctccacagtcctgaatatctggaaatggctttgccattattttgcaaagcgatgagcaagctaccccttgcagcccaaggaaaactgatcagactgtggtctaaatacaatgcagaccagattcggagaatgatggagacatttcagcaacttattacttataaagtcataagcaatgaatttaacagtcgaaatctagtgaatgatgatgatgccattgttgctgcttcgaagtgcttgaaaatggtttactatgcaaatgtagtgggaggggaagtggacacaaatcacaatgaagaagatgatgaagagcccatccctgagtccagcgagctgacacttcaggaacttttgggagaagaaagaagaaacaagaaaggtcctcgagtggaccccctggaaactgaacttggtgttaaaaccctggattgtcgaaaaccacttatcccttttgaagagtttattaatgaaccactgaatgaggttctagaaatggataaagattatacttttttcaaagtagaaacagagaacaaattctcttttatgacatgtccctttatattgaatgctgtcacaaagaatttgggattatattatgacaatagaattcgcatgtacagtgaacgaagaatcactgttctctacagcttagttcaaggacagcagttgaatccatatttgagactcaaagttagacgtgaccatatcatagatgatgcacttgtccggctagagatgatcgctatggaaaatcctgcagacttgaagaagcagttgtatgtggaatttgaaggagaacaaggagttgatgagggaggtgtttccaaagaattttttcagctggttgtggaggaaatcttcaatccagatattggtatgttcacatacgatgaatctacaaaattgttttggtttaatccatcttcttttgaaactgagggtcagtttactctgattggcatagtactgggtctggctatttacaataactgtatactggatgtacattttcccatggttgtctacaggaagctaatggggaaaaaaggaacttttcgtgacttgggagactctcacccagttctatatcagagtttaaaagatttattggagtatgaagggaatgtggaagatgacatgatgatcactttccagatatcacagacagatctttttggtaacccaatgatgtatgatctaaaggaaaatggtgataaaattccaattacaaatgaaaacaggaaggaatttgtcaatctttattctgactacattctcaataaatcagtagaaaaacagttcaaggcttttcggagaggttttcatatggtgaccaatgaatctcccttaaagtacttattcagaccagaagaaattgaattgcttatatgtggaagccggaatctagatttccaagcactagaagaaactacagaatatgacggtggctataccagggactctgttctgattagggagttctgggaaatcgttcattcatttacagatgaacagaaaagactcttcttgcagtttacaacgggcacagacagagcacctgtgggaggactaggaaaattaaagatgattatagccaaaaatggcccagacacagaaaggttacctacatctcatacttgctttaatgtgcttttacttccggaatactcaagcaaagaaaaacttaaagagagattgttgaaggccatcacgtatgccaaaggatttggcatgctgtaaaacaaaacaaaacaaaataaaacaaaaaaaa

SEQ ID NO: 197113 - DNA, 571 bp, Homo sapiens
  Payload ID: 18872
  Gene Name: ubiquitin protein ligase E3A
  ENST ID: ENST00000604860
  CDS Start-End: 1-570
cattttcccatggttgtctacaggaagctaatggggaaaaaaggaacttttcgtgacttgggagactctcacccagaatttgtcaatctttattctgactacattctcaataaatcagtagaaaaacagttcaaggcttttcggagaggttttcatatggtgaccaatgaatctcccttaaagtacttattcagaccagaagaaattgaattgcttatatgtggaagccggaatctagatttccaagcactagaagaaactacagaatatgacggtggctataccagggactctgttctgattagggagttctgggaaatcgttcattcatttacagatgaacagaaaagactcttcttgcagtttacaacgggcacagacagagcacctgtgggaggactaggaaaattaaagatgattatagccaaaaatggcccagacacagaaaggttacctacatctcatacttgctttaatgtgcttttacttccggaatactcaagcaaagaaaaacttaaagagagattgttgaaggccatcacgtatgccaaaggatttggcatgctgtaaa

SEQ ID NO: 197114 - DNA, 8741 bp, Homo sapiens
  Payload ID: 18872
  Gene Name: ubiquitin protein ligase E3A
  Uniprot ID: Q05086
  ENST ID: ENST00000614096
  CDS Start-End: 714-3332
ggcccgcccagccagtcctcccgtcttgcgccgcggccgcgagatccgtgtgtctcccaagatggtggcgctgggctcggggtgactacaggagacgacggggccttttcccttcgccaggacccgacacaccaggcttcgctcgctcgcgcacccctccgccgcgtagccatccgccagcgcgggcgcccgccatccgccgcctacttacgcttcacctctgccgacccggcgcgctcggctgcgggcggcggcgcctccttcggctcctcctcggaatagctcgcggcctgtagcccctggcaggagggcccctcagccccccggtgtggacaggcagcggcggctggcgacgaacgccgggatttcggcggccccggcgctccctttcccggcctcgttttccggataaggaagcgcgggtcccgcatgagccccggcggtggcggcagcgaaagagaacgaggcggtggcgggcggaggcggcgggcgagggcgactacgaccagtgaggcggccgccgcagcccaggcgcgggggcgacgacaggttaaaaatctgtaagagcctgattttagaattcaccagctcctcagaagtttggcgaaatatgagttattaagcctacgctcagatcaaggtagcagctagactggtgtgacaacctgtttttaatcagtgactcaaagctgtgatcaccctgatgtcaccgaatggccacagcttgtaaaagatcaggagaacctcagtctgacgacattgaagctagccgaatgaagcgagcagctgcaaagcatctaatagaacgctactaccaccagttaactgagggctgtggaaatgaagcctgcacgaatgagttttgtgcttcctgtccaacttttcttcgtatggataataatgcagcagctattaaagccctcgagctttataagattaatgcaaaactctgtgatcctcatccctccaagaaaggagcaagctcagcttaccttgagaactcgaaaggtgcccccaacaactcctgctctgagataaaaatgaacaagaaaggcgctagaattgattttaaagatgtgacttacttaacagaagagaaggtatatgaaattcttgaattatgtagagaaagagaggattattcccctttaatccgtgttattggaagagttttttctagtgctgaggcattggtacagagcttccggaaagttaaacaacacaccaaggaagaactgaaatctcttcaagcaaaagatgaagacaaagatgaagatgaaaaggaaaaagctgcatgttctgctgctgctatggaagaagactcagaagcatcttcctcaaggataggtgatagctcacagggagacaacaatttgcaaaaattaggccctgatgatgtgtctgtggatattgatgccattagaagggtctacaccagattgctctctaatgaaaaaattgaaactgcctttctcaatgcacttgtatatttgtcacctaacgtggaatgtgacttgacgtatcacaatgtatactctcgagatcctaattatctgaatttgttcattatcgtaatggagaatagaaatctccacagtcctgaatatctggaaatggctttgccattattttgcaaagcgatgagcaagctaccccttgcagcccaaggaaaactgatcagactgtggtctaaatacaatgcagaccagattcggagaatgatggagacatttcagcaacttattacttataaagtcataagcaatgaatttaacagtcgaaatctagtgaatgatgatgatgccattgttgctgcttcgaagtgcttgaaaatggtttactatgcaaatgtagtgggaggggaagtggacacaaatcacaatgaagaagatgatgaagagcccatccctgagtccagcgagctgacacttcaggaacttttgggagaagaaagaagaaacaagaaaggtcctcgagtggaccccctggaaactgaacttggtgttaaaaccctggattgtcgaaaaccacttatcccttttgaagagtttattaatgaaccactgaatgaggttctagaaatggataaagattatacttttttcaaagtagaaacagagaacaaattctcttttatgacatgtccctttatattgaatgctgtcacaaagaatttgggattatattatgacaatagaattcgcatgtacagtgaacgaagaatcactgttctctacagcttagttcaaggacagcagttgaatccatatttgagactcaaagttagacgtgaccatatcatagatgatgcacttgtccggctagagatgatcgctatggaaaatcctgcagacttgaagaagcagttgtatgtggaatttgaaggagaacaaggagttgatgagggaggtgtttccaaagaattttttcagctggttgtggaggaaatcttcaatccagatattggtatgttcacatacgatgaatctacaaaattgttttggtttaatccatcttcttttgaaactgagggtcagtttactctgattggcatagtactgggtctggctatttacaataactgtatactggatgtacattttcccatggttgtctacaggaagctaatggggaaaaaaggaacttttcgtgacttgggagactctcacccagttctatatcagagtttaaaagatttattggagtatgaagggaatgtggaagatgacatgatgatcactttccagatatcacagacagatctttttggtaacccaatgatgtatgatctaaaggaaaatggtgataaaattccaattacaaatgaaaacaggaaggaatttgtcaatctttattctgactacattctcaataaatcagtagaaaaacagttcaaggcttttcggagaggttttcatatggtgaccaatgaatctcccttaaagtacttattcagaccagaagaaattgaattgcttatatgtggaagccggaatctagatttccaagcactagaagaaactacagaatatgacggtggctataccagggactctgttctgattagggagttctgggaaatcgttcattcatttacagatgaacagaaaagactcttcttgcagtttacaacgggcacagacagagcacctgtgggaggactaggaaaattaaagatgattatagccaaaaatggcccagacacagaaaggttacctacatctcatacttgctttaatgtgcttttacttccggaatactcaagcaaagaaaaacttaaagagagattgttgaaggccatcacgtatgccaaaggatttggcatgctgtaaaacaaaacaaaacaaaataaaacaaaaaaaaggaaggaaaaaaaaagaaaaaatttaaaaaattttaaaaatataacgagggataaatttttggtggtgatagtgtcccagtacaaaaaggctgtaagatagtcaaccacagtagtcacctatgtctgtgcctcccttctttattggggacatgtgggctggaacagcagatttcagctacatatatgaacaaatcctttattattattataattatttttttgcgtgaaagtgttacatattctttcacttgtatgtacagagaggtttttctgaatatttattttaagggttaaatcacttttgcttgtgtttattactgcttgaggttgagccttttgagtatttaaaaaatatataccaacagaactactctcccaaggaaaatattgccaccatttgtagaccacgtaaccttcaagtatgtgctacttttttgtccctgtatctaactcaaatcaggaactgtattttttttaatgatttgcttttgaaacttgaagtcttgaaaacagtgtgatgcaattactgctgttctagcccccaaagagttttctgtgcaaaatcttgagaatcaatcaataaagaaagatggaaggaagggagaaattggaatgttttaactgcagccctcagaactttagtaacagcacaacaaattaaaaacaaaaacaactcatgccacagtatgtcgtcttcatgtgtcttgcaatgaactgtttcagtagccaatcctctttcttagtatatgaaaggacagggatttttgttcttgttgttctcgttgttgttttaagtttactggggaaagtgcatttggccaaatgaaatggtagtcaagcctattgcaacaaagttaggaagtttgttgtttgtttattataaacaaaaagcatgtgaaagtgcacttaagatagagtttttattaattacttacttattacctagattttaaatagacaatccaaagtctccccttcgtgttgccatcatcttgttgaatcagccattttatcgaggcacgtgatcagtgttgcaacataatgaaaaagatggctactgtgccttgtgttacttaatcatacagtaagctgacctggaaatgaatgaaactattactcctaagaattacattgtatagccccacagattaaatttaattaattaattcaaaacatgttaaacgttactttcatgtactatggaaaagtacaagtaggtttacattactgatttccagaagtaagtagtttcccctttcctagtcttctgtgtatgtgatgttgttaatttcttttattgcattataaaataaaaggattatgtatttttaactaaggtgagacattgatatatccttttgctacaagctatagctaatgtgctgagcttgtgccttggtgattgattgattgattgactgattgttttaactgattactgtagatcaacctgatgatttgtttgtttgaaattggcaggaaaaatgcagctttcaaatcattggggggagaaaaaggatgtctttcaggattattttaattaatttttttcataattgagacagaactgtttgttatgtaccataatgctaaataaaactgtggcacttttcaccataatttaatttagtggaaaaagaagacaatgctttccatattgtgataaggtaacatggggtttttctgggccagcctttagaacactgttagggtacatacgctaccttgatgaaagggaccttcgtgcaactgtagtcatcttaaaggcttctcatccactgtgcttcttaatgtgtaattaaagtgaggagaaattaaatactctgagggcgttttatataataaattcgtgaagaaatgtgtgctcttcagttctcaagttttattattatggtatttattaaagttctacaattgtaataacgtatccatatgacaagttttaaagtggtaattgaaataggttatcagatatagagttgttcacatcaagtagacttttaacagagtcagaatgaacctacccttaaaattttagagaaaaaaaatcgtcggttgcacagaatagctgctctagcttgcttaattatgccgggcatgttgtcactcctcttacttttgctgccttttcattactatttaatggaatgtccctgaacaataaggaagagcaaaacatagacattttgactacagtggatacttcctctaccccaaatgttatgttataaaagtactttttttgcccaggtactctattatatattttggttttctttgaattagacctcaatctccaggaagctctggagggaaaaaaaggaaccataaactaaagtaactggttttccaaataaatgtaaacttttttaaccttttattattatagaacatttcaaacatacataaaacatgaaaacagcctgcagccaaacttttctggaccttggcagctccagcaaatgagctggtcatcctaaccctggtttcctgagacaactacttttggggatgcttgcttgtatagggagatgatagatagatagatacatatcaaaaagaaacttgaaaaaggcttcgaacagaacttgccgatgttactcatccctcctcggtacagacattctgttagaacagatggttgtaatggggcagcatcactccctattcccattaaaaacatgaccattctgagatttcaggccccttcgaggaatttttctcaagaattccatacaaactgtcagaggaagaaatgtcgtcccaagactagtccctgtgtagtcttgatccctttacctgcttactgtaattttttttctctgactttccgccagtgtctaagggccatctgtacccctcccacccttccatgagccactgtataatccaaaaacacaccttccatttgctccctcacttgtctccttttacctcaacagtgttagtgtgtaaagaattgcctggggagggtagagggttttacaagtacagagtcccaagtcttttctcccctccccgttagtgggttggcatttattaataggcactgcaagattttgatgcaggtgtggggtagatatcactgtgaaaggctactaatgcatggtagtttcaccgaaagtacagtcttcaaggatccttataatctcctcattgccaaaatcagtaacatctataaccttgacaacaccctagcttgggctgttgcttctctggctacttgtttttccatcccagtttacccagattttagatggatactcctccaattctgcttaaagtccttacctgttcttgcccagttccctctagtcaacctcagtcactcccaaagattcttccccaatcccatatcttttgctcagacctctgtctctgggatttctttgttacctcatagtcagtagtcctaaaaacaaaattcttcatcttgcatctctatcgaccgaccattctttgtttctttttaagaaatgtaaccttcaccccaatcatcaaaatctctcattcctcaattgtcacaggttgtcacttctttccccctaaacctctcccatcattccttccttctttatactgcccttacaggtcctgatcctctgactcacccggacattcttagcagctgcctaatttcactccctgactctcatctccctcttccaatccttttcattgtgctagaacactatcttgctaattttaatatcctctgcattcagtgcctccacagattgccccctcactgacctttccaatttggccttgtgttacacactttcctcgctgcattcctacccagcatcttcacttgtcatatttctcaaatactcttcatgaccagatatttaaagtacctcatccatgaagacttcatcaacccccaaagtgcctccaatgcttccgtggtagcacagcataatggggtacatttcttagttgaacagtgaggagtcactgggattcttacagagtgtcttagggtctcctcttgatactctttccacatttcagttaaggaattttcttacatctttttttcttctaataacctttgcctggagtgtaagtaaattcatgatagagactgtcatttttaaaaaaaaaaacaaaccattttgcctttcacatgttattacctccatctttctgttatcttgtcagtgttgccacctaaatgattgaaaatgaccgagcatgcagtagaatgtagtgaagtttcctatttcatccattttttgcataagtgcattggtatctgtatatccatctgcccaagcaccagttgttgaaaagactattatttccccatgaatggtcctggtacccttgtcaaagaacagttgaccataaatataagactttctggattctcagtcttactccattgccctatatgtctgtcgttataccagcaccgcactgtcttgatggctgtagcttggtagtaagtttagatttgggatgtgcaagtcctccattttttttttttttttccccaaaatcattttgtctgttttgggtcccttgcattgcatatgaatttttatatgatcattgtgtcaattcctgcaaaacagctgggatcttgatagggatttagttgaattggtagataaatttgagaaataactgctattttaatggtgttaggttttctgttccatgactgtgggatgtctttgcatttgcttaggtctttatttcagtgatgttttagagatttcagtgtgcaagtcttgacgtctttaatttttttctaagtattttactgatgccactttaattatatgattattttctaatttttatttttgtattcatcactggtgttagaaataaaattaatttttgtatattgattttgtatattgtagcttttctaaaattctttttttgtcacttagtattttttgcatatgagatcatgcatctgtgaacagaaatacttttacttcttcctttccagtctagattcctattatttcattttcttgccttagtgtgctggctagcacctccagtacaatattggatagaagtgacaagagcagacatctttttcttgttcctgattttaaggggaaagcattcagtctttcaccattgagtatgatgttagctagctgtgggtttgcttcaagttgaggaaattcttttattaaacctagtttactgagtgttttttaatcaaaaaaaaaaaaaggaggggctgtgggttttgttaaatgcttcttctgtatcaagattttcatgttgttttgtcctttattaatatgttgtattaatggacttttgtatattgaattaactttgcattcctgggataatctcagttgtccatgctacataaaccttgttctatgctgctgga

SEQ ID NO: 197115 - DNA, 424 bp, Homo sapiens
  Payload ID: 18872
  Gene Name: ubiquitin protein ligase E3A
  ENST ID: ENST00000628890
  CDS Start-End: 306-424
gaattattacattttctcaaatgaagagatcatttaagaaaaacaaaatgctggaaaatagtccttaaaaacttttctataataattactcttctgatgaattttacattgacacctaatttgaagctttgaatattattttttgaacaatgaattgggtttatatattaaagtgttctaaccaaaggtttgtttaatttattagagttattaagcctacgctcagatcaaggtagcagctagactggtgtgacaacctgtttttaatcagtgactcaaagctgtgatcaccctgatgtcaccgaatggccacagcttgtaaaagatcaggagaacctcagtctgacgacattgaagctagccgaatgaagcgagcagctgcaaagcatctaatagaacgctactaccaccagttaactgaggg

SEQ ID NO: 197116 - DNA, 889 bp, Homo sapiens
  Payload ID: 18872
  Gene Name: ubiquitin protein ligase E3A
  ENST ID: ENST00000630907
  CDS Start-End: 445-889
agaagtaggcccctggtggccgcggctgctgcagccgtaactgtcagtcctggctgagcgacggcgggagggttttgtcgcccgaggggacgcgagcgggcccggggcggggcgggacgtgcgaggcgtcgagatttgggcctcctaggagccaggctcttcgagccagccggggccccagacagggaagggcaggccctttccttcaaaggggagccctttctcggcgttttcaaggtttttggctctcttggggaagacatatttagccgtgtgcttggttaaaaatctgtaagagcctgattttagaattcaccagctcctcagaagtttggcgaaatatgagttattaagcctacgctcagatcaaggtagcagctagactggtgtgacaacctgtttttaatcagtgactcaaagctgtgatcaccctgatgtcaccgaatggccacagcttgtaaaagatcaggagaacctcagtctgacgacattgaagctagccgaatgaagcgagcagctgcaaagcatctaatagaacgctactaccaccagttaactgagggctgtggaaatgaagcctgcacgaatgagttttgtgcttcctgtccaacttttcttcgtatggataataatgcagcagctattaaagccctcgagctttataagattaatgcaaaactctgtgatcctcatccctccaagaaaggagcaagctcagcttaccttgagaactcgaaaggtgcccccaacaactcctgctctgagataaaaatgaacaagaaaggcgctagaattgattttaaagatgtgacttacttaacagaagagaaggtatatgaaattcttgaattatgtagagaaagagaggattattcccctttaatccgtg

SEQ ID NO: 197117 - DNA, 394 bp, Homo sapiens
  Payload ID: 18872
  Gene Name: ubiquitin protein ligase E3A
  ENST ID: ENST00000626589
  CDS Start-End: 371-394
cacagtgactgcaccattttacattcccaccagcagtgaataagggttccaatttctctgcatcttttctaacacttgaggggaggtatggtgtcaagaaaacatagtcaccattattacgaaaagtaaaatatggaagagatgatccctaccatcaatcagcttacaactagaggcactgacaaatgtatacagatagctgtaatgttaaaaatctgtaagagcctgattttagaattcaccagctcctcagaagtttggcgaaatatgagttattaagcctacgctcagatcaaggtagcagctagactggtgtgacaacctgtttttaatcagtgactcaaagctgtgatcaccctgatgtcaccgaatggccacagcttgtaaaagatca

SEQ ID NO: 197118 - DNA, 5075 bp, Homo sapiens
  Payload ID: 18872
  Gene Name: ubiquitin protein ligase E3A
  Uniprot ID: Q05086
  ENST ID: ENST00000630424
  CDS Start-End: 627-3185
cggctggcgacgaacgccgggatttcggcggccccggcgctccctttcccggcctcgttttccggataaggaagcgcgggtcccgcatgagccccggcggtggcggcagcgaaagagaacgaggcggtggcgggcggaggcggcgggcgagggcgactacgaccagtgaggcggccgccgcagcccaggcgcgggggcgacgacaggttaaaaatctgtaagagcctgattttagaattcaccagctcctcagaagtttggcgaaatatgagttattaagcctacgctcagatcaaggtagcagctagactggtgtgacaacctgtttttaatcagtgactcaaagctgtgatcaccctgatgtcaccgaatggccacagcttgtaaaagtgccagcaggtttattttttgttttgcaagccagctctgcctccttacagtatgacatctgatgctggagggtcgcactttcaaaaatgagtcagctggtacatggggttatcatcaatttttagctcttctgtctgggagatacaagtttggaagcaatcttggggtacttacccacaaggctggtggagaccagatcaggagaacctcagtctgacgacattgaagctagccgaatgaagcgagcagctgcaaagcatctaatagaacgctactaccaccagttaactgagggctgtggaaatgaagcctgcacgaatgagttttgtgcttcctgtccaacttttcttcgtatggataataatgcagcagctattaaagccctcgagctttataagattaatgcaaaactctgtgatcctcatccctccaagaaaggagcaagctcagcttaccttgagaactcgaaaggtgcccccaacaactcctgctctgagataaaaatgaacaagaaaggcgctagaattgattttaaagatgtgacttacttaacagaagagaaggtatatgaaattcttgaattatgtagagaaagagaggattattcccctttaatccgtgttattggaagagttttttctagtgctgaggcattggtacagagcttccggaaagttaaacaacacaccaaggaagaactgaaatctcttcaagcaaaagatgaagacaaagatgaagatgaaaaggaaaaagctgcatgttctgctgctgctatggaagaagactcagaagcatcttcctcaaggataggtgatagctcacagggagacaacaatttgcaaaaattaggccctgatgatgtgtctgtggatattgatgccattagaagggtctacaccagattgctctctaatgaaaaaattgaaactgcctttctcaatgcacttgtatatttgtcacctaacgtggaatgtgacttgacgtatcacaatgtatactctcgagatcctaattatctgaatttgttcattatcgtaatggagaatagaaatctccacagtcctgaatatctggaaatggctttgccattattttgcaaagcgatgagcaagctaccccttgcagcccaaggaaaactgatcagactgtggtctaaatacaatgcagaccagattcggagaatgatggagacatttcagcaacttattacttataaagtcataagcaatgaatttaacagtcgaaatctagtgaatgatgatgatgccattgttgctgcttcgaagtgcttgaaaatggtttactatgcaaatgtagtgggaggggaagtggacacaaatcacaatgaagaagatgatgaagagcccatccctgagtccagcgagctgacacttcaggaacttttgggagaagaaagaagaaacaagaaaggtcctcgagtggaccccctggaaactgaacttggtgttaaaaccctggattgtcgaaaaccacttatcccttttgaagagtttattaatgaaccactgaatgaggttctagaaatggataaagattatacttttttcaaagtagaaacagagaacaaattctcttttatgacatgtccctttatattgaatgctgtcacaaagaatttgggattatattatgacaatagaattcgcatgtacagtgaacgaagaatcactgttctctacagcttagttcaaggacagcagttgaatccatatttgagactcaaagttagacgtgaccatatcatagatgatgcacttgtccggctagagatgatcgctatggaaaatcctgcagacttgaagaagcagttgtatgtggaatttgaaggagaacaaggagttgatgagggaggtgtttccaaagaattttttcagctggttgtggaggaaatcttcaatccagatattggtatgttcacatacgatgaatctacaaaattgttttggtttaatccatcttcttttgaaactgagggtcagtttactctgattggcatagtactgggtctggctatttacaataactgtatactggatgtacattttcccatggttgtctacaggaagctaatggggaaaaaaggaacttttcgtgacttgggagactctcacccagttctatatcagagtttaaaagatttattggagtatgaagggaatgtggaagatgacatgatgatcactttccagatatcacagacagatctttttggtaacccaatgatgtatgatctaaaggaaaatggtgataaaattccaattacaaatgaaaacaggaaggaatttgtcaatctttattctgactacattctcaataaatcagtagaaaaacagttcaaggcttttcggagaggttttcatatggtgaccaatgaatctcccttaaagtacttattcagaccagaagaaattgaattgcttatatgtggaagccggaatctagatttccaagcactagaagaaactacagaatatgacggtggctataccagggactctgttctgattagggagttctgggaaatcgttcattcatttacagatgaacagaaaagactcttcttgcagtttacaacgggcacagacagagcacctgtgggaggactaggaaaattaaagatgattatagccaaaaatggcccagacacagaaaggttacctacatctcatacttgctttaatgtgcttttacttccggaatactcaagcaaagaaaaacttaaagagagattgttgaaggccatcacgtatgccaaaggatttggcatgctgtaaaacaaaacaaaacaaaataaaacaaaaaaaaggaaggaaaaaaaaagaaaaaatttaaaaaattttaaaaatataacgagggataaatttttggtggtgatagtgtcccagtacaaaaaggctgtaagatagtcaaccacagtagtcacctatgtctgtgcctcccttctttattggggacatgtgggctggaacagcagatttcagctacatatatgaacaaatcctttattattattataattatttttttgcgtgaaagtgttacatattctttcacttgtatgtacagagaggtttttctgaatatttattttaagggttaaatcacttttgcttgtgtttattactgcttgaggttgagccttttgagtatttaaaaaatatataccaacagaactactctcccaaggaaaatattgccaccatttgtagaccacgtaaccttcaagtatgtgctacttttttgtccctgtatctaactcaaatcaggaactgtattttttttaatgatttgcttttgaaacttgaagtcttgaaaacagtgtgatgcaattactgctgttctagcccccaaagagttttctgtgcaaaatcttgagaatcaatcaataaagaaagatggaaggaagggagaaattggaatgttttaactgcagccctcagaactttagtaacagcacaacaaattaaaaacaaaaacaactcatgccacagtatgtcgtcttcatgtgtcttgcaatgaactgtttcagtagccaatcctctttcttagtatatgaaaggacagggatttttgttcttgttgttctcgttgttgttttaagtttactggggaaagtgcatttggccaaatgaaatggtagtcaagcctattgcaacaaagttaggaagtttgttgtttgtttattataaacaaaaagcatgtgaaagtgcacttaagatagagtttttattaattacttacttattacctagattttaaatagacaatccaaagtctccccttcgtgttgccatcatcttgttgaatcagccattttatcgaggcacgtgatcagtgttgcaacataatgaaaaagatggctactgtgccttgtgttacttaatcatacagtaagctgacctggaaatgaatgaaactattactcctaagaattacattgtatagccccacagattaaatttaattaattaattcaaaacatgttaaacgttactttcatgtactatggaaaagtacaagtaggtttacattactgatttccagaagtaagtagtttcccctttcctagtcttctgtgtatgtgatgttgttaatttcttttattgcattataaaataaaaggattatgtatttttaactaaggtgagacattgatatatccttttgctacaagctatagctaatgtgctgagcttgtgccttggtgattgattgattgattgactgattgttttaactgattactgtagatcaacctgatgatttgtttgtttgaaattggcaggaaaaatgcagctttcaaatcattggggggagaaaaaggatgtctttcaggattattttaattaatttttttcataattgagacagaactgtttgttatgtaccataatgctaaataaaactgtggcacttttcaccataatttaatttagtggaaaaagaagacaatgctttccatattgtgataaggtaacatggggtttttctgggccagcctttagaacactgttagggtacatacgctaccttgatgaaagggaccttcgtgcaactgtagtcatcttaaaggcttctcatccactgtgcttcttaatgtgtaattaaagtgaggagaaattaaatactctgagggcgttttatataataaattcgtgaagaaa

SEQ ID NO: 197119 - DNA, 706 bp, Homo sapiens
  Payload ID: 18872
  Gene Name: ubiquitin protein ligase E3A
  ENST ID: ENST00000628733
  CDS Start-End: 146-706
aggcggccgccgcagcccagctcctcagaagtttggcgaaatatgagttattaagcctacgctcagatcaaggtagcagctagactggtgtgacaacctgtttttaatcagtgactcaaagctgtgatcaccctgatgtcaccgaatggccacagcttgtaaaagatcaggagaacctcagtctgacgacattgaagctagccgaatgaagcgagcagctgcaaagcatctaatagaacgctactaccaccagttaactgagggctgtggaaatgaagcctgcacgaatgagttttgtgcttcctgtccaacttttcttcgtatggataataatgcagcagctattaaagccctcgagctttataagattaatgcaaaactctgtgatcctcatccctccaagaaaggagcaagctcagcttaccttgagaactcgaaaggtgcccccaacaactcctgctctgagataaaaatgaacaagaaaggcgctagaattgattttaaagatgtgacttacttaacagaagagaaggtatatgaaattcttgaattatgtagagaaagagaggattattcccctttaatccgtgttattggaagagttttttctagtgctgaggcattggtacagagcttccggaaagttaaacaacacaccaaggaagaactgaaatctcttcaagcaaaagatgaagacaaagatgaa

SEQ ID NO: 197120 - DNA, 654 bp, Homo sapiens
  Payload ID: 18872
  Gene Name: ubiquitin protein ligase E3A
  ENST ID: ENST00000625681
  CDS Start-End: 612-654
gcgagatccgtgtgtctcccaagatggtggcgctgggctcggggtgactacaggagacgacggggccttttcccttcgccaggacccgacacaccaggcttcgctcgctcgcgcacccctccgccgcgtagccatccgccagcgcgggcgcccgccatccgccgcctacttacgcttcacctctgccgacccggcgcgctcggctgcgggcggcggcgcctccttcggctcctcctcggaatagctcgcggcctgtagcccctggcaggagggcccctcagccccccggtgtggacaggcagcggcggctggcgacgaacgccgggatttcggcggccccggcgctccctttcccggcctcgttttccggataaggaagcgcgggtcccgcatgagccccggcggtggcggcagcgaaagagaacgaggcggtggcgggcggaggcggcgggcgagggcgactacgaccagtgaggcggccgccgcagcccaggcgcgggggcgacgacagagttattaagcctacgctcagatcaaggtagcagctagactggtgtgacaacctgtttttaatcagtgactcaaagctgtgatcaccctgatgtcaccgaatggccacagcttgtaaaagatcaggagaacctcagtctgacg

SEQ ID NO: 197121 - DNA, 1112 bp, Homo sapiens
  Payload ID: 18872
  Gene Name: ubiquitin protein ligase E3A
  ENST ID: ENST00000629252
  CDS Start-End: 966-1112
gctgggctcggggtgactacaggagacgacggggccttttcccttcgccaggacccgacacaccaggcttcgctcgctcgcgcacccctccgccgcgtagccatccgccagcgcgggcgcccgccatccgccgcctacttacgcttcacctctgccgacccggcgcgctcggctgcgggcggcggcgcctccttcggctcctcctcggaatagctcgcggcctgtagcccctggcaggagggcccctcagccccccggtgtggacaggcagcggcggctggcgacgaacgccgggatttcggcggccccggcgctccctttcccggcctcgttttccggataaggaagcgcgggtcccgcatgagccccggcggtggcggcagcgaaagagaacgaggcggtggcgggcggaggcggcgggcgagggcgactacgaccagtgaggcggccgccgcagcccaggcgcgggggcgacgacaggttaaaaatctgtaagagcctgattttagaattcaccagctcctcagaagtttggcgaaatatgagttattaagcctacgctcagatcaaggtagcagctagactggtgtgacaacctgtttttaatcagtgactcaaagctgtgatcaccctgatgtcaccgaatggccacagcttgtaaaagagagttacagtggaggtaaaaggagtggcttgcaggatggagaagctgcaccagtgttattggaatgccagcaggtttattttttgttttgcaagccagctctgcctccttacagtatgacatctgatgctggagggtcgcactttcaaaaatgagtcagctggtacatggggttatcatcaatttttagctcttctgtctgggagatacaagtttggaagcaatcttggggtacttacccacaaggctggtggagaccagatcaggagaacctcagtctgacgacattgaagctagccgaatgaagcgagcagctgcaaagcatctaatagaacgctactaccaccagttaactgagggctgtggaaatgaagcctgcacgaatgagttttgtgcttcctgtccaacttttcttcgtatggataataatgcagcagctattaaagcc

SEQ ID NO: 197122 - DNA, 436 bp, Homo sapiens
  Payload ID: 18872
  Gene Name: ubiquitin protein ligase E3A
  ENST ID: ENST00000629886
  CDS Start-End: 204-436
agtaggcccctggtggccgcggctgctgcagccgtaactgttaaaaatctgtaagagcctgattttagaattcaccagctcctcagaagtttggcgaaatatgagttattaagcctacgctcagatcaaggtagcagctagactggtgtgacaacctgtttttaatcagtgactcaaagctgtgatcaccctgatgtcaccgaatggccacagcttgtaaaagatcaggagaacctcagtctgacgacattgaagctagccgaatgaagcgagcagctgcaaagcatctaatagaacgctactaccaccagttaactgagggctgtggaaatgaagcctgcacgaatgagttttgtgcttcctgtccaacttttcttcgtatggataataatgcagcagctattaaagccctcgagctttataagattaatgcaaa

SEQ ID NO: 197123 - DNA, 445 bp, Homo sapiens
  Payload ID: 18872
  Gene Name: ubiquitin protein ligase E3A
  ENST ID: ENST00000626176
  CDS Start-End: 1-430
gatatcacagacagatctttttggtaacccaatgatgtatgatctaaaggaaaatggtgataaaattccaattacaaatgaaaacaggaagaatctagatttccaagcactagaagaaactacagaatatgacggtggctataccagggactctgttctgattagggagttctgggaaatcgttcattcatttacagatgaacagaaaagactcttcttgcagtttacaacgggcacagacagagcacctgtgggaggactaggaaaattaaagatgattatagccaaaaatggcccagacacagaaaggttacctacatctcatacttgctttaatgtgcttttacttccggaatactcaagcaaagaaaaacttaaagagagattgttgaaggccatcacgtatgccaaaggatttggcatgctgtaaaacaaaacaaaacaa

SEQ ID NO: 197124 - DNA, 3217 bp, Homo sapiens
  Payload ID: 18872
  Gene Name: ubiquitin protein ligase E3A
  ENST ID: ENST00000625778
  CDS Start-End: 604-2901
ctgccgggatactcggcccgcccagccagtcctcccgtcttgcgccgcggccgcgagatccgtgtgtctcccaagatggtggcgctgggctcggggtgactacaggagacgacggggccttttcccttcgccaggacccgacacaccaggcttcgctcgctcgcgcacccctccgccgcgtagccatccgccagcgcgggcgcccgccatccgccgcctacttacgcttcacctctgccgacccggcgcgctcggctgcgggcggcggcgcctccttcggctcctcctcggaatagctcgcggcctgtagcccctggcaggagggcccctcagccccccggtgtggacaggcagcggcggctggcgacgaacgccgggatttcggcggccccggcgctccctttcccggcctcgttttccggataaggaagcgcgggtcccgcatgagccccggcggtggcggcagcgaaagagaacgaggcggtggcgggcggaggcggcgggcgagggcgactacgaccagtgaggcggccgccgcagcccaggcgcgggggcgacgacagatcaggagaacctcagtctgacgacattgaagctagccgaatgaagcgagcagctgcaaagcatctaatagaacgctactaccaccagttaactgagggctgtggaaatgaagcctgcacgaatgagttttgtgcttcctgtccaacttttcttcgtatggataataatgcagcagctattaaagccctcgagctttataagattaatgcaaaactctgtgatcctcatccctccaagaaaggagcaagctcagcttaccttgagaactcgaaaggtgcccccaacaactcctgctctgagataaaaatgaacaagaaaggcgctagaattgattttaaagatgtgacttacttaacagaagagaaggtatatgaaattcttgaattatgtagagaaagagaggattattcccctttaatccgtgttattggaagagttttttctagtgctgaggcattggtacagagcttccggaaagttaaacaacacaccaaggaagaactgaaatctcttcaagcaaaagatgaagacaaagatgaagatgaaaaggaaaaagctgcatgttctgctgctgctatggaagaagactcagaagcatcttcctcaaggataggtgatagctcacagggagacaacaatttgcaaaaattaggccctgatgatgtgtctgtggatattgatgccattagaagggtctacaccagattgctctctaatgaaaaaattgaaactgcctttctcaatgcacttgtatatttgtcacctaacgtggaatgtgacttgacgtatcacaatgtatactctcgagatcctaattatctgaatttgttcattatcgtaatggagaatagaaatctccacagtcctgaatatctggaaatggctttgccattattttgcaaagcgatgagcaagctaccccttgcagcccaaggaaaactgatcagactgtggtctaaatacaatgcagaccagattcggagaatgatggagacatttcagcaacttattacttataaagtcataagcaatgaatttaacagtcgaaatctagtgaatgatgatgatgccattgttgctgcttcgaagtgcttgaaaatggtttactatgcaaatgtagtgggaggggaagtggacacaaatcacaatgaagaagatgatgaagagcccatccctgagtccagcgagctgacacttcaggaacttttgggagaagaaagaagaaacaagaaaggtcctcgagtggaccccctggaaactgaacttggtgttaaaaccctggattgtcgaaaaccacttatcccttttgaagagtttattaatgaaccactgaatgaggttctagaaatggataaagattatacttttttcaaagtagaaacagagaacaaattctcttttatgacatgtccctttatattgaatgctgtcacaaagaatttgggattatattatgacaatagaattcgcatgtacagtgaacgaagaatcactgttctctacagcttagttcaaggacagcagttgaatccatatttgagactcaaagttagacgtgaccatatcatagatgatgcacttgtccggctagagatgatcgctatggaaaatcctgcagacttgaagaagcagttgtatgtggaatttgaaggagaacaaggagttgatgagggaggtgtttccaaagaattttttcagctggttgtggaggaaatcttcaatccagatattggtatgttcacatacgatgaatctacaaaattgttttggtttaatccatcttcttttgaaactgagggtcagtttactctgattggcatagtactgggtctggctatttacaataactgtatactggatgtacattttcccatggttgtctacaggaagctaatggggaaaaaaggaacttttcgtgacttgggagactctcacccagttctatatcagagtttaaaagatttattggagtatgaagggaatgtggaagatgacatgatgatcactttccagatatcacagacagatctttttggtaacccaatgatgtatgatctaaaggaaaatggtgataaaattccaattacaaatgaaaacaggaaggaatttgtcaatctttattctgactacattctcaataaatcagtagaaaaacagttcaaggcttttcggagaggttttcatatggtgaccaatgaatctcccttaaagtacttattcagaccagaagaaattgaattgcttatatgtggaagccggaatctagatttccaagcactagaagaaactacagaatatgacggtggctataccagggactctgttctgattaggtgaggtacttagttcttcagaggaagatttgattcaccaaaggggtgtgtgattttgcttcagacctttatctctaggtactaattcccaaataagcaaactcacaaattgtcatctatatacttagatttgtatttgtaatataatcaccatttttcagagctaatcttgtgatttatttcatgaatgaagtgttgttatatataagtctcatgtaatctcctgcatttggcgtatggattatctagtattcctcactggttagagtatgcttactgctggttagaagataattaaaataaggctaccatgtctgcaa

SEQ ID NO: 197125 - DNA, 772 bp, Homo sapiens
  Payload ID: 18872
  Gene Name: ubiquitin protein ligase E3A
  ENST ID: ENST00000626068
  CDS Start-End: 61-772
cttaaatcttgtttacaaaattgtcttcctaagtaatatgtctacctttttttttggaatatggaatattttgctaactgtttctcaattgcattttacagatcaggagaacctcagtctgacgacattgaagctagccgaatgaagcgagcagctgcaaagcatctaatagaacgctactaccaccagttaactgagggctgtggaaatgaagcctgcacgaatgagttttgtgcttcctgtccaacttttcttcgtatggataataatgcagcagctattaaagccctcgagctttataagattaatgcaaaactctgtgatcctcatccctccaagaaaggagcaagctcagcttaccttgagaactcgaaaggtgcccccaacaactcctgctctgagataaaaatgaacaagaaaggcgctagaattgattttaaagatgtgacttacttaacagaagagaaggtatatgaaattcttgaattatgtagagaaagagaggattattcccctttaatccgtgttattggaagagttttttctagtgctgaggcattggtacagagcttccggaaagttaaacaacacaccaaggaagaactgaaatctcttcaagcaaaagatgaagacaaagatgaagatgaaaaggaaaaagctgcatgttctgctgctgctatggaagaagactcagaagcatcttcctcaaggataggtgatagctcacagggagacaacaatttgcaaaaattaggccctgatgatgtgtctg

SEQ ID NO: 197126 - DNA, 1873 bp, Homo sapiens
  Payload ID: 18872
  Gene Name: ubiquitin protein ligase E3A
  ENST ID: ENST00000630607
  CDS Start-End: 1688-1873
aataaaactagtatacttttctctcctagagagttacagtggaggtaaaaggagtggcttgcaggatggagaagctgcaccagtgttattggaagtgagccaccatttgaatttgctagctcatgctgcagtattcagattagtgggtgttttgtgatcatattttctgcgattcaaatcaagacctaaaattgattctcattctgagatttacattttattatccaatgttatttggttattgtttcagttttaaaatttctgacttgttattctgacacactttaggataacctaagtcaatagtttaatacaaaaatttccctttggttatatgttttgaattaggttatatgttctgcatttacaagcacatacaggattcttacttccagcaacttggcagtaaaagaataagtagactctttaggagccaaagtcaagcttgggaactgttgctaggtggtatatatttcatagtttatgtttgtttccaagacaaggtctcactccatcgcccaggctggagtgcagtggcacgatcacagttcactgcaactttgaccttctgggctcaagtgaccctcccacctcagcctcccaagttgctgggactaaaggcacccaccaccacacccggctaagagacgaggtttcatcatgttgcccaggttgaccttgaactcctgagctcaagtggtccttatgtcttgacctcccaaagtgctgagattacagacatgaactaccacacctggcatatgtcatagttttgagagtttgaattctaacctcgggactttggtaacttatttataatattctagaaatatactgttattaggatgagtagaaattcattcagacagaaactattataaattactgcaagaaaaatgtctgctagttctgcatatattcatttttctcttgattaaaaaacaatttccaatttgagtagaacaactttgctatgtttaatagacccaggacagatttattttaaggtaataatctttcaatccttcttcttctatactggattggtttaaattacttagcttgtcttatcaatggtttttaatagcctactttaatatatgtaaaaagtagtaattaatatgttacagtttggtggcaaacattttgatgccaaagttcacatattctcttgcttagggaacagaaattgggaagatagatgtagttatcatttgataatgtatttaaactctatcccatttcaggatctcaaaactttgtaacagttacatattgtacttctaagacttagatttgtttttcttcttgtgtcttacctttttgcagtaatatttttattttcctatcatcatgtcctcattttttccctctcttctctttccctgttaattttgaaagttttgctgcctacgtgtttgaaaacttctaatctgcctctcttccctcagtgccagcaggtttattttttgttttgcaagccagctctgcctccttacagtatgacatctgatgctggagggtcgcactttcaaaaatgagtcagctggtacatggggttatcatcaatttttagctcttctgtctgggagatacaagtttggaagcaatcttggggtacttacccacaaggctggtggagaccagatcaggagaacctcagtctgacgacattgaagctagccgaatgaagcgagcagctgcaaagcatctaatagaacgctactaccaccagttaactgagggctgtggaaatgaagcctgcacgaatgagttttgtgcttcctgtccaacttttcttcgtatggataataatgcagcagctattaaagccctcgagctttataagattaatgcaaaactctgtgatcct

SEQ ID NO: 197127 - DNA, 779 bp, Homo sapiens
  Payload ID: 18872
  Gene Name: ubiquitin protein ligase E3A
  ENST ID: ENST00000628267
  CDS Start-End: 631-779
tcttgcgccgcggccgcgagatccgtgtgtctcccaagatggtggcgctgggctcggggtgactacaggagacgacggggccttttcccttcgccaggacccgacacaccaggcttcgctcgctcgcgcacccctccgccgcgtagccatccgccagcgcgggcgcccgccatccgccgcctacttacgcttcacctctgccgacccggcgcgctcggctgcgggcggcggcgcctccttcggctcctcctcggaatagctcgcggcctgtagcccctggcaggagggcccctcagccccccggtgtggacaggcagcggcggctggcgacgaacgccgggatttcggcggccccggcgctccctttcccggcctcgttttccggataaggaagcgcgggtcccgcatgagccccggcggtggcggcagcgaaagagaacgaggcggtggcgggcggaggcggcgggcgagggcgactacgaccagtgaggcggccgccgcagcccaggcgcgggggcgacgacaggttaaaaatctgtaagagcctgattttagaattcaccagctcctcagaagtttggcgaaatatgatcaggagaacctcagtctgacgacattgaagctagccgaatgaagcgagcagctgcaaagcatctaatagaacgctactaccaccagttaactgagggctgtggaaatgaagcctgcacgaatgagttttgtgcttcctgtccaacttttcttcgtatggataataatgcagcagctattaaagccct

SEQ ID NO: 197128 - DNA, 5722 bp, Homo sapiens
  Payload ID: 18873
  Gene Name: ubiquitin protein ligase E3B
  Uniprot ID: Q7Z3V4
  ENST ID: ENST00000342494
  CDS Start-End: 596-3802
cggggcaagatggcggtagtgcgtcggctgctgccccgggtctggcagaactcgggtgttttgggctgagacagtggcagctgcggccccgaccccaagtgcggggacctccggcgaataaaggtcggcctgcgggtaggccggtagggcctgcggtccggcctgcgggagaactgggtcgtcagtcctccgagtggtggggctggggactttgagggagttggctctagggcacagtccctgcctggccaggtcggaggaacaagtgctgggatctggcgtgtgtgctccaggggctctttccgcggccctttccacctcttttcactttggggacggtaggcctttataaacggactaatgctgggtgatttgttcctgtggttgttgatgccgaggaaagactctgggccccaggactcacctaaactggagttcgaatactgttcgctcgctgtgtgaccttggaaaaaataacaagcttttctgaagtgagaagctgttctcagccacgagtcctgtgcaagatcactaatgattacctggcatttctgcgacacaggcaggtcctcagggtttgtgcaagtttgcaaacatgttcaccctgtctcagacctcgagagcatggttcatcgatagagcccgtcaggcacgagaagaaaggcttgtgcagaaggaacgggagcgggcagctgttgtgatccaggcccatgtccggagttttctctgtcggagtcgactgcagagagatatcaggagagagattgatgacttttttaaagcagatgaccctgagtccactaaaagaagtgcactttgtattttcaagattgccaggaaactgctgttcctattcagaatcaaagaggataatgagagatttgagaagttgtgtcgcagcatcctgagcagcatggatgctgagaatgagcctaaggtgtggtatgtgtccctggcttgttctaaggacctcaccctcctttggattcaacagatcaagaacattttgtggtactgctgtgattttctcaagcagctcaagcctgaaatcctgcaggactcccgactcatcaccctgtacctcacgatgcttgtcaccttcacagacacttcaacgtggaaaattcttcggggaaaaggtgaaagtcttcgaccagcgatgaaccacatttgtgcaaatataatgggacatctcaaccagcatggattttattctgtgctgcagatattgttaacccgtggcctggcaagaccccgtccttgtctatccaaaggcactttaacagcagctttttctctagcgttacgccctgtgattgctgcacagttctcagacaatctgattcggccgttcctcatccacatcatgtctgtgcctgctctggtgactcatctcagcacagtgacccctgagcgcctcactgttttagaatcccatgacatgcttcgtaaattcatcatatttttaagagaccaagatcgatgccgtgatgtatgtgaaagtttagaaggatgccatacgctttgtctaatgggcaacctcctacacttgggctccctcagccccagagtgttagaggaggagacagatgggttcgtgagtttgctcacccagacgctgtgctactgtcggaagtatgtgtctcagaagaagtccaacctgacccactggcatcctgtccttggctggttctcccaatctgtggattatggccttaacgagtcaatgcacttgatcaccaaacagctgcagttcttgtggggggtgcctctgatccggatcttcttctgtgacatcctgagcaagaagctactggagagccaggagccagcccacgcacagccagcatcccctcagaatgtgctcccagtgaagagtctcctaaagcgtgcttttcaaaagtcggcatcagtccggaatattctcaggcctgtcgggggtaaacgggtcgactctgcagaagtccagaaggtttgcaacatctgtgtcctctaccagacctcgctgacaactctcacacagattcggctgcagatactcacaggtctcacttaccttgatgacctgcttcccaaactgtgggcatttatctgtgagctcgggccccacggagggttaaagctcttcttggaatgcctgaacaatgacactgaagagtccaagcaactcttggccatgctgatgctgttctgtgactgttcgcggcacctcatcacaatccttgatgacattgaagtttatgaagaacagatttcattcaaactggaagagctggtcactatctcctctttcctgaattcttttgtgtttaagatgatctgggatggaattgtagagaacgccaagggtgagaccttggagctgttccagtctgtccacgggtggcttatggtgctgtacgagcgggactgccggcggcgcttcacccccgaggaccactggctgcgaaaggatctcaaacctagcgtgctcttccaagaactcgacagggacagaaaacgggcacagttgatcctgcagtacatcccacatgtcatccctcacaaaaacagagttctactgtttcgaaccatggttaccaaggagaaggagaaactggggctggtggaaaccagctctgcctccccgcatgtcactcacatcaccatccgccggtccaggatgctggaggacggctacgagcagcttaggcagctctcccagcacgccatgaagggggtcatccgtgtgaagtttgtcaatgacctcggggtggacgaagcagggattgatcaagacggtgtttttaaggagttcttggaagagatcatcaagagagtttttgacccagcactcaatctgttcaagacaaccagtggggatgagaggctgtacccctcacccacatcctacatccatgagaattacctgcagctcttcgagtttgtggggaagatgctggggaaggctgtgtatgagggaattgtggtggacgtgccatttgcatccttcttcctgagccaactgcttgggcaccaccacagcgtcttctatagctcggtggatgaactgccttctctggactccgagttctataaaaacctcacctccatcaagcgctatgatggggacatcactgacctgggcctgacgctgtcttacgacgaggacgtcatgggtcagcttgtttgccatgaactgattcctggagggaagaccattcctgttacaaatgaaaataaaattagctacatccatctgatggcacattttcgaatgcacactcaaataaaaaaccaaacagctgccctcattagcggattccgttccattatcaaacccgagtggatccgaatgttctcaactcctgaactgcagcgtctcatctctggcgacaatgctgagattgatctggaagatttaaagaagcacacagtctactacggtggtttccatggaagtcacagagtcatcatctggctctgggatattctggcctccgacttcacaccggatgagagagctatgtttctgaagttcgtgaccagctgctccagacccccgctcctgggattcgcctacctcaagcctccattctccatccgctgcgtggaggtgtcggacgatcaggacaccggggacactctgggcagcgtcctccggggcttcttcaccatccgcaagcgggagccaggcggccgcctgcccacctcctccacctgcttcaacctgctcaagctgcccaactacagcaagaagagcgtcctccgcgagaagctgcgctacgccatcagcatgaacacgggctttgaactctcctagctcctgtcccagccctgcctccagggctcctgggctgccagggaccttcagctcccagaggcagtgtggtcctgggaatgtgaccaacatgccaggtgacattggcccctagaccctctctatagccatgagactccttgtggcctcaagaaatttagacgcccacgacagcactacacagcatctccaggtgatgcccaaggcacagggctgcagaaaataaacctccagattccaccaacacgggtccattcttcctggtgatggcagaggggcttcttttagctagtttgatcttttgggagtctgtctttccttagccgtctgagtgagctgtgtatgaacaagtcccaggagttccaagagtctagagtggtttttgcagcatgggttgagtgtacaaagcctactgtgcgtgagatcctctccttccgtttctgaaatctcttactcaggtaaggcctcgccaagcctctatgcaccccacaaagtttctgcctccatgccgtccacagcgcctcttcccagacagccaggcccatctgctgcccagggaagcgcaggcgcctgctagggacgctatggacaccgtgagtccaaggcgctgctcctgccttgaagccacgcgctccacgccgcggccctcccattttctgcgtcctcagcgggctgagctgccagagagtcttcccggacctattcccgtcctatgcattcacattggcatcctggtttgggggaagaaaaacaacggcccttagcagcagccccgtttccagaatgtgctgcctgttccccaaagcctgcttgtcccgcggaggacggctgcctttgaccctgcttatttgtctcactggttatctaatgaggaacaaacactaacctaaggtacacatcccatctgggcggtggcttcactcctgagtctgcaaaatcccaggaaacttgggtcttgctgcccatccttcctcagcacagggaacccggaagcccgttgcactgacagaggctcacaccctctgggttttttgttttttttttaaacttcatttctcttccaacccattgtgttcctctgccctcattctttacctttgttgtaagaactttagctccagggaactgaggcagaggccctgtttgtggtctgtgttgacagccacccaccctctcccacctcatgctcctgcacctgcaccaccaaggttgatgccggattcgaagccaggaaggcccagtccctcctctgctctcctcaaagacgcaaaacattttccaacaagagctgtcacagtggcagcaaagcaggggccacccgtctccacagtccttcagagtttcagctgcatcctggtgtcccacccaggtcgagcccccaggcttctggaaaagagtgtgtgctctactttgatggaaacatggcaaggaatttaaagacaggaatgtattaatattattgaaggtgtgttcgtaacctctgattctgtggacttgccactttctccaaacgctcggttcctttgaagatttcttctgaacgtgtgtgcgcacgctgggcgggttcgtgcatacatgcggggaccccagactgtcagcacagggaagatggatcccatcctaatttttatcacctgaaggttggaaccagtgagggactgggagagagtgatttataagcaccaatatcaacttcatgtggatttttgacaaggaggggtagtttgtaatttcatttaaattcttttcagcagctggaaatattgcactatctgaaacactgaatctccttttgtaactggtgttcactgacaccttgatggctcttgatggctctaaaaagttgtaggattttttgtttttgtagctaacttatggattgagatgtgatcaaaggctttattaaatttgtacttcagcata

SEQ ID NO: 197129 - DNA, 1448 bp, Homo sapiens
  Payload ID: 18873
  Gene Name: ubiquitin protein ligase E3B
  Uniprot ID: Q7Z3V4
  ENST ID: ENST00000340074
  CDS Start-End: 586-1320
tggcggtagtgcgtcggctgctgccccgggtctggcagaactcgggtgttttgggctgagacagtggcagctgcggccccgaccccaagtgcggggacctccggcgaataaaggtcggcctgcgggtaggccggtagggcctgcggtccggcctgcgggagaactgggtcgtcagtcctccgagtggtggggctggggactttgagggagttggctctagggcacagtccctgcctggccaggtcggaggaacaagtgctgggatctggcgtgtgtgctccaggggctctttccgcggccctttccacctcttttcactttggggacggtaggcctttataaacggactaatgctgggtgatttgttcctgtggttgttgatgccgaggaaagactctgggccccaggactcacctaaactggagttcgaatactgttcgctcgctgtgtgaccttggaaaaaataacaagcttttctgaagtgagaagctgttctcagccacgagtcctgtgcaagatcactaatgattacctggcatttctgcgacacaggcaggtcctcagggtttgtgcaagtttgcaaacatgttcaccctgtctcagacctcgagagcatggttcatcgatagagcccgtcaggcacgagaagaaaggcttgtgcagaaggaacgggagcgggcagctgttgtgatccaggcccatgtccggagttttctctgtcggagtcgactgcagagagatatcaggagagagattgatgacttttttaaagcagatgaccctgagtccactaaaagaagtgcactttgtattttcaagattgccaggaaactgctgttcctattcagaatcaaagaggataatgagagatttgagaagttgtgtcgcagcatcctgagcagcatggatgctgagaatgagcctaaggtgtggtatgtgtccctggcttgttctaaggacctcaccctcctttggattcaacagatcaagaacattttgtggtactgctgtgattttctcaagcagctcaagcctgaaatcctgcaggactcccgactcatcaccctgtacctcacgatgcttgtcaccttcacagacacttcaacgtggaaaattcttcggggaaaaggtgaaagtcttcgaccagcgatgaaccacatttgtgcaaatataatgggacatctcaaccagcatggattttattctgtgctgcagtgctgtgatgggctgtttcctgatttggtttcatatgctcctcacaacaaccctgtgaggtggtccgttggcagaagctggtatgactggcagttgtctcgctagaggaaccttctacttcataccataattaaacggcttctaaaataatatgatgtctttaaattttaagtctggcattatttgtattagctgtttttttaactttattattaaagaatttctaaccataa

SEQ ID NO: 197130 - DNA, 5620 bp, Homo sapiens
  Payload ID: 18873
  Gene Name: ubiquitin protein ligase E3B
  Uniprot ID: Q7Z3V4
  ENST ID: ENST00000434735
  CDS Start-End: 491-3697
aacgtcttaagccgtccgttgtgcgcctaggggccagttttctttccagcctccccggccggagtgggttccagcttttctcggctggggagggcatttatcccacctccgctatttcagctgccagaggggaggcaaggtgtggggaagttttccttcccgggcgaagaagctctgcggaactgtcattttccggaactggatgcttgcttcctggcggggttctgaaagcgaacaccgcggggcaagatggcggtagtgcgtcggctgctgccccgggtctggcagaactcgggtgttttgggctgagacagtggcagctgcggccccgaccccaagtgcggggacctccggcgaataaagaaaaaataacaagcttttctgaagtgagaagctgttctcagccacgagtcctgtgcaagatcactaatgattacctggcatttctgcgacacaggcaggtcctcagggtttgtgcaagtttgcaaacatgttcaccctgtctcagacctcgagagcatggttcatcgatagagcccgtcaggcacgagaagaaaggcttgtgcagaaggaacgggagcgggcagctgttgtgatccaggcccatgtccggagttttctctgtcggagtcgactgcagagagatatcaggagagagattgatgacttttttaaagcagatgaccctgagtccactaaaagaagtgcactttgtattttcaagattgccaggaaactgctgttcctattcagaatcaaagaggataatgagagatttgagaagttgtgtcgcagcatcctgagcagcatggatgctgagaatgagcctaaggtgtggtatgtgtccctggcttgttctaaggacctcaccctcctttggattcaacagatcaagaacattttgtggtactgctgtgattttctcaagcagctcaagcctgaaatcctgcaggactcccgactcatcaccctgtacctcacgatgcttgtcaccttcacagacacttcaacgtggaaaattcttcggggaaaaggtgaaagtcttcgaccagcgatgaaccacatttgtgcaaatataatgggacatctcaaccagcatggattttattctgtgctgcagatattgttaacccgtggcctggcaagaccccgtccttgtctatccaaaggcactttaacagcagctttttctctagcgttacgccctgtgattgctgcacagttctcagacaatctgattcggccgttcctcatccacatcatgtctgtgcctgctctggtgactcatctcagcacagtgacccctgagcgcctcactgttttagaatcccatgacatgcttcgtaaattcatcatatttttaagagaccaagatcgatgccgtgatgtatgtgaaagtttagaaggatgccatacgctttgtctaatgggcaacctcctacacttgggctccctcagccccagagtgttagaggaggagacagatgggttcgtgagtttgctcacccagacgctgtgctactgtcggaagtatgtgtctcagaagaagtccaacctgacccactggcatcctgtccttggctggttctcccaatctgtggattatggccttaacgagtcaatgcacttgatcaccaaacagctgcagttcttgtggggggtgcctctgatccggatcttcttctgtgacatcctgagcaagaagctactggagagccaggagccagcccacgcacagccagcatcccctcagaatgtgctcccagtgaagagtctcctaaagcgtgcttttcaaaagtcggcatcagtccggaatattctcaggcctgtcgggggtaaacgggtcgactctgcagaagtccagaaggtttgcaacatctgtgtcctctaccagacctcgctgacaactctcacacagattcggctgcagatactcacaggtctcacttaccttgatgacctgcttcccaaactgtgggcatttatctgtgagctcgggccccacggagggttaaagctcttcttggaatgcctgaacaatgacactgaagagtccaagcaactcttggccatgctgatgctgttctgtgactgttcgcggcacctcatcacaatccttgatgacattgaagtttatgaagaacagatttcattcaaactggaagagctggtcactatctcctctttcctgaattcttttgtgtttaagatgatctgggatggaattgtagagaacgccaagggtgagaccttggagctgttccagtctgtccacgggtggcttatggtgctgtacgagcgggactgccggcggcgcttcacccccgaggaccactggctgcgaaaggatctcaaacctagcgtgctcttccaagaactcgacagggacagaaaacgggcacagttgatcctgcagtacatcccacatgtcatccctcacaaaaacagagttctactgtttcgaaccatggttaccaaggagaaggagaaactggggctggtggaaaccagctctgcctccccgcatgtcactcacatcaccatccgccggtccaggatgctggaggacggctacgagcagcttaggcagctctcccagcacgccatgaagggggtcatccgtgtgaagtttgtcaatgacctcggggtggacgaagcagggattgatcaagacggtgtttttaaggagttcttggaagagatcatcaagagagtttttgacccagcactcaatctgttcaagacaaccagtggggatgagaggctgtacccctcacccacatcctacatccatgagaattacctgcagctcttcgagtttgtggggaagatgctggggaaggctgtgtatgagggaattgtggtggacgtgccatttgcatccttcttcctgagccaactgcttgggcaccaccacagcgtcttctatagctcggtggatgaactgccttctctggactccgagttctataaaaacctcacctccatcaagcgctatgatggggacatcactgacctgggcctgacgctgtcttacgacgaggacgtcatgggtcagcttgtttgccatgaactgattcctggagggaagaccattcctgttacaaatgaaaataaaattagctacatccatctgatggcacattttcgaatgcacactcaaataaaaaaccaaacagctgccctcattagcggattccgttccattatcaaacccgagtggatccgaatgttctcaactcctgaactgcagcgtctcatctctggcgacaatgctgagattgatctggaagatttaaagaagcacacagtctactacggtggtttccatggaagtcacagagtcatcatctggctctgggatattctggcctccgacttcacaccggatgagagagctatgtttctgaagttcgtgaccagctgctccagacccccgctcctgggattcgcctacctcaagcctccattctccatccgctgcgtggaggtgtcggacgatcaggacaccggggacactctgggcagcgtcctccggggcttcttcaccatccgcaagcgggagccaggcggccgcctgcccacctcctccacctgcttcaacctgctcaagctgcccaactacagcaagaagagcgtcctccgcgagaagctgcgctacgccatcagcatgaacacgggctttgaactctcctagctcctgtcccagccctgcctccagggctcctgggctgccagggaccttcagctcccagaggcagtgtggtcctgggaatgtgaccaacatgccaggtgacattggcccctagaccctctctatagccatgagactccttgtggcctcaagaaatttagacgcccacgacagcactacacagcatctccaggtgatgcccaaggcacagggctgcagaaaataaacctccagattccaccaacacgggtccattcttcctggtgatggcagaggggcttcttttagctagtttgatcttttgggagtctgtctttccttagccgtctgagtgagctgtgtatgaacaagtcccaggagttccaagagtctagagtggtttttgcagcatgggttgagtgtacaaagcctactgtgcgtgagatcctctccttccgtttctgaaatctcttactcaggtaaggcctcgccaagcctctatgcaccccacaaagtttctgcctccatgccgtccacagcgcctcttcccagacagccaggcccatctgctgcccagggaagcgcaggcgcctgctagggacgctatggacaccgtgagtccaaggcgctgctcctgccttgaagccacgcgctccacgccgcggccctcccattttctgcgtcctcagcgggctgagctgccagagagtcttcccggacctattcccgtcctatgcattcacattggcatcctggtttgggggaagaaaaacaacggcccttagcagcagccccgtttccagaatgtgctgcctgttccccaaagcctgcttgtcccgcggaggacggctgcctttgaccctgcttatttgtctcactggttatctaatgaggaacaaacactaacctaaggtacacatcccatctgggcggtggcttcactcctgagtctgcaaaatcccaggaaacttgggtcttgctgcccatccttcctcagcacagggaacccggaagcccgttgcactgacagaggctcacaccctctgggttttttgttttttttttaaacttcatttctcttccaacccattgtgttcctctgccctcattctttacctttgttgtaagaactttagctccagggaactgaggcagaggccctgtttgtggtctgtgttgacagccacccaccctctcccacctcatgctcctgcacctgcaccaccaaggttgatgccggattcgaagccaggaaggcccagtccctcctctgctctcctcaaagacgcaaaacattttccaacaagagctgtcacagtggcagcaaagcaggggccacccgtctccacagtccttcagagtttcagctgcatcctggtgtcccacccaggtcgagcccccaggcttctggaaaagagtgtgtgctctactttgatggaaacatggcaaggaatttaaagacaggaatgtattaatattattgaaggtgtgttcgtaacctctgattctgtggacttgccactttctccaaacgctcggttcctttgaagatttcttctgaacgtgtgtgcgcacgctgggcgggttcgtgcatacatgcggggaccccagactgtcagcacagggaagatggatcccatcctaatttttatcacctgaaggttggaaccagtgagggactgggagagagtgatttataagcaccaatatcaacttcatgtggatttttgacaaggaggggtagtttgtaatttcatttaaattcttttcagcagctggaaatattgcactatctgaaacactgaatctccttttgtaactggtgttcactgacaccttgatggctcttgatggctctaaaaagttgtaggattttttgtttttgtagctaacttatggattgagatgtgatcaaaggctttattaaatttgtacttcagcatatga

SEQ ID NO: 197131 - DNA, 3771 bp, Homo sapiens
  Payload ID: 18873
  Gene Name: ubiquitin protein ligase E3B
  Uniprot ID: Q7Z3V4
  ENST ID: ENST00000449510
  CDS Start-End: 585-2711
ggcggtagtgcgtcggctgctgccccgggtctggcagaactcgggtgttttgggctgagacagtggcagctgcggccccgaccccaagtgcggggacctccggcgaataaaggtcggcctgcgggtaggccggtagggcctgcggtccggcctgcgggagaactgggtcgtcagtcctccgagtggtggggctggggactttgagggagttggctctagggcacagtccctgcctggccaggtcggaggaacaagtgctgggatctggcgtgtgtgctccaggggctctttccgcggccctttccacctcttttcactttggggacggtaggcctttataaacggactaatgctgggtgatttgttcctgtggttgttgatgccgaggaaagactctgggccccaggactcacctaaactggagttcgaatactgttcgctcgctgtgtgaccttggaaaaaataacaagcttttctgaagtgagaagctgttctcagccacgagtcctgtgcaagatcactaatgattacctggcatttctgcgacacaggcaggtcctcagggtttgtgcaagtttgcaaacatgttcaccctgtctcagacctcgagagcatggttcatcgatagagcccgtcaggcacgagaagaaaggcttgtgcagaaggaacgggagcgggcagctgttgtgatccaggcccatgtccggagttttctctgtcggagtcgactgcagagagatatcaggagagagattgatgacttttttaaagcagatgaccctgagtccactaaaagaagtgcactttgtattttcaagattgccaggaaactgctgttcctattcagaatcaaagaggataatgagagatttgagaagttgtgtcgcagcatcctgagcagcatggatgctgagaatgagcctaaggtgtggtatgtgtccctggcttgttctaaggacctcaccctcctttggattcaacagatcaagaacattttgtggtactgctgtgattttctcaagcagctcaagcctgaaatcctgcaggactcccgactcatcaccctgtacctcacgatgcttgtcaccttcacagacacttcaacgtggaaaattcttcggggaaaaggtgaaagtcttcgaccagcgatgaaccacatttgtgcaaatataatgggacatctcaaccagcatggattttattctgtgctgcagatattgttaacccgtggcctggcaagaccccgtccttgtctatccaaaggcactttaacagcagctttttctctagcgttacgccctgtgattgctgcacagttctcagacaatctgattcggccgttcctcatccacatcatgtctgtgcctgctctggtgactcatctcagcacagtgacccctgagcgcctcactgttttagaatcccatgacatgcttcgtaaattcatcatatttttaagagaccaagatcgatgccgtgatgtatgtgaaagtttagaaggatgccatacgctttgtctaatgggcaacctcctacacttgggctccctcagccccagagtgttagaggaggagacagatgggttcgtgagtttgctcacccagacgctgtgctactgtcggaagtatgtgtctcagaagaagtccaacctgacccactggcatcctgtccttggctggttctcccaatctgtggattatggccttaacgagtcaatgcacttgatcaccaaacagctgcagttcttgtggggggtgcctctgatccggatcttcttctgtgacatcctgagcaagaagctactggagagccaggagccagcccacgcacagccagcatcccctcagaatgtgctcccagtgaagagtctcctaaagcgtgcttttcaaaagtcggcatcagtccggaatattctcaggcctgtcgggggtaaacgggtcgactctgcagaagtccagaaggtttgcaacatctgtgtcctctaccagacctcgctgacaactctcacacagattcggctgcagatactcacaggtctcacttaccttgatgacctgcttcccaaactgtgggcatttatctgtgagctcgggccccacggagggttaaagctcttcttggaatgcctgaacaatgacactgaagagtccaagcaactcttggccatgctgatgctgttctgtgactgttcgcggcacctcatcacaatccttgatgacattgaagtttatgaagaacagatttcattcaaactggaagagctggtcactatctcctctttcctgaattcttttgtgtttaagatgatctgggatggaattgtagagaacgccaagggtgagaccttggagctgttccagtctgtccacgggtggcttatggtgctgtacgagcgggactgccggcggcgcttcacccccgaggaccactggctgcgaaaggatctcaaacctagcgtgctcttccaagaactcgacagggacagaaaacgggcacagttgatcctgcagtacatcccacatgtcatccctcacaaaaacagagttctactgtttcgaaccatggttaccaaggagaaggagaaactggggctggtggaaaccagctctgcctccccgcatgtcactcacatcaccatccgccggtccaggatgctggagagcttgtttgagtgcccctggccactggtgatcaatgccgagagctgctaggaaggcagtgtgtgctgaacagtggatgtttctgacattcttcaaggacggctacgagcagcttaggcagctctcccagcacgccatgaagggggtcatccgtgtgaagtttgtcaatgacctcggggtggacgaagcagggattgatcaagacggtgtttttaaggagttcttggaagagatcatcaagagagtttttgacccagcactcaatctgttcaagacaaccagtggggatgagaggctgtacccctcacccacatcctacatccatgagaattacctgcagctcttcgagtttgtggggaagatgctggggaaggctgtgtatgagggaattgtggtggacgtgccatttgcatccttcttcctgagccaactgcttgggcaccaccacagcgtcttctatagctcggtggatgaactgccttctctggactccgagttctataaaaacctcacctccatcaagcgctatgatggggacatcactgacctgggcctgacgctgtcttacgacgaggacgtcatgggtcagcttgtttgccatgaactgattcctggagggaagaccattcctgttacaaatgaaaataagtgagtatagcaattagctacatccatctgatggcacattttcgaatgcacactcaaataaaaaaccaaacagctgccctcattagcggattccgttccattatcaaacccgagtggatccgaatgttctcaactcctgaactgcagcgtctcatctctggcgacaatgctgagattgatctggaagatttaaagaagcacacagtctactacggtggtttccatggaagtcacagagtcatcatctggctctgggatattctggcctccgacttcacaccggatgagagagctatgtttctgaagttcgtgaccagctgctccagacccccgctcctgggattcgcctacctcaagcctccattctccatccgctgcgtggaggtgtcggacgatcaggacaccggggacactctgggcagcgtcctccggggcttcttcaccatccgcaagcgggagccag

SEQ ID NO: 197132 - DNA, 3600 bp, Homo sapiens
  Payload ID: 18873
  Gene Name: ubiquitin protein ligase E3B
  ENST ID: ENST00000537063
  CDS Start-End: 238-981
cggtagtgcgtcggctgctgccccgggtctggcagaactcgggtgttttgggctgagacagtggcagctgcggccccgaccccaagtgcggggacctccggcgaataaagaaaaaataacaagcttttctgaagtgagaagctgttctcagccacgagtcctgtgcaagatcactaatgattacctggcatttctgcgacacaggcaggtcctcagggtttgtgcaagtttgcaaacatgttcaccctgtctcagacctcgagagcatggttcatcgatagagcccgtcaggcacgagaagaaaggcttgtgcagaaggaacgggagcgggcagctgttgtgatccaggcccatgtccggagttttctctgtcggagtcgactgcagagagatatcaggagagagattgatgacttttttaaagcagatgaccctgagtccactaaaagaagtgcactttgtattttcaagattgccaggaaactgctgttcctattcagaatcaaagaggataatgagagatttgagaagttgtgtcgcagcatcctgagcagcatggatgctgagaatgagcctaaggtgtggtatgtgtccctggcttgttctaaggacctcaccctcctttggattcaacagatcaagaacattttgtggtactgctgtgattttctcaagcagctcaagcctgaaatcctgcaggactcccgactcatcaccctgtacctcacgatgcttgtcaccttcacagacacttcaacgtggaaaattcttcggggaaaaggtgaaagtcttcgaccagcgatgaaccacatttgtgcaaatataatgggacatctcaaccagcatggattttattctgtgctgcaggtctgtgactcctgccccccagtgtgcaacttctccactctccaacacctgcacttggatttttacatttgcattcagcatacctggtgtcctcctcagaaacacttttcataggaagagcttgatgcctgctgtcctcttcttccttcccctgccttgtctcacttgtgggtcaggtaaagggaggacagtggtgctgggatcccttgaatgctctacatttttggctgcaagggtaatccagtcttttgacatttaaactctggaaggagacctcagggcttgttccctcagattccttcttggttgatgtctagaatcatatttctagctctgtgtcctcaaacagccctttccactttgtaccttgttgtgccagatcatacctctagggaattgttgagaaagcctgattgctgtttaaaggtacaatggaagtcttgagtttgagaagtaatgttgactttgcccttccttctccctagtgctgtgatgggctgtttcctgatttggtttcatatgctcctcacaacaaccctgtgaggtggtccgttggcagaagctggtatgactggcagttgtctcgctagaggaaccttctacttcataccataattaaacggcttctaaaataatatgatgtctttaaattttaagtctggcattatttgtattagctgtttttttaactttattattaaagaatttctaaccataatatttagagaaagagtggtagagttaacctcgttacccaatactttcttccctttccttttataaaaacactgcatacggttttttgtttttttgtttttttgttttttttttaagagacagggttgccctgtcacccaggctggcctcaaggaatcttcctgcctcagcctcctgagctgggactgtaggtacaagccaccatgcctggctcacaatacagtttttttatctgaagcactcagtttacttttttgctcttttatgtacaaatgaatataaagttgatatcatcctctgaccaattaaaacattcttttcagatattgttaacccgtggcctggcaagaccccgtccttgtctatccaaaggcactttaacagcagctttttctctagcgttacggtgagtaagaaaccatagctgaggtgttggcatgttcttgaatgcttcctcctcttggtttttctttctctcgttactggtattaggtatagacttgcccattttgtcagaatttatgggaagcattgttcttaatgaaagtgagcacatttgtgactgctcaaactttttcttaatcttcagtcttgaatatttcttaatcttcagccctgaatattattgcagtgtgatctttggaaactattcaaaatgaatttcttttatctaaaagaggccaagatgcaatcatttttccttttgaagttttaattgacaaaacaaaaaacctaggagccaggagaagcccagcaaagggcagggtgagaggattaaggaaataatgtgaatacgcatgtaaaatgttagaatttggaggaccagagaagaggtgatatttgccttcacttagtttggagatgtcaggtactgaagaagctaagttaattccttatggaaattacacctgcaattctgagaattgccaaatgtaaaacactatgcttgttcataggtccagaacatgtttaaactgtcaaggggaacactagcttggggagatgttaataaaagatcctggaaggaagagtgtcatggtggaaccagcttggtgaaagctgcctgctctgcccccatctgtggatctacagtacaccttcatgctgagagctctgagaagtgctgctatgctagcaggaccccatgggcttatttaacccggggttggcccaaacgtatctgagcatggaatacccctgccttgttttttggatgccgttgatatcccatgaaatcattttccatggaaaacctatttggaaaatgatgggctagagcatgggttggccaaattttctggaaagagccggataaatatttcaactctatgggccatacagcctctgtcacaaccactctgccattgcatcttgaaagcagtcgtagattgtacatacacaaatgagcatgactgtgttccagtaaaactttatttacaaaaataggccatagtttataaacacctggtctagactgtgctttccactaaccactagccacagggggctgtttaaatgaaaattcatttaagttaaataaaatgaagaattcacttcctcagttgcattagccacatttcaaatgctcagcggccacatgtaactagtagcaattgtgtgggacagcacagatatagaaaacttccagcatcacagaaagttctgttggacaaggctgacctagagcaggtctgtccgatggaaacacagttagagccacatttaaaaagccaaaagaggccaggcacggcggcccatgcctgtaatcccagcactttgggagactgaggtgggcagatcattttgagctcaggagttcaagaccagtctgggcaacatggccaaaccttgtctctacaaaaaatacaaacattagctgggcatggtgccatgtgcctgtggttccagctactcaggagtctgaggtgggaggatcactggagccagggaagtcaaggctgcagcgagccgtgattgagcttctccagcctggatgacagagtgatacctggtctc

SEQ ID NO: 197133 - DNA, 1120 bp, Homo sapiens
  Payload ID: 18873
  Gene Name: ubiquitin protein ligase E3B
  Uniprot ID: Q7Z3V4
  ENST ID: ENST00000536398
  CDS Start-End: 258-992
aacaccgcggggcaagatggcggtagtgcgtcggctgctgccccgggtctggcagaactcgggtgttttgggctgagacagtggcagctgcggccccgaccccaagtgcggggacctccggcgaataaagaaaaaataacaagcttttctgaagtgagaagctgttctcagccacgagtcctgtgcaagatcactaatgattacctggcatttctgcgacacaggcaggtcctcagggtttgtgcaagtttgcaaacatgttcaccctgtctcagacctcgagagcatggttcatcgatagagcccgtcaggcacgagaagaaaggcttgtgcagaaggaacgggagcgggcagctgttgtgatccaggcccatgtccggagttttctctgtcggagtcgactgcagagagatatcaggagagagattgatgacttttttaaagcagatgaccctgagtccactaaaagaagtgcactttgtattttcaagattgccaggaaactgctgttcctattcagaatcaaagaggataatgagagatttgagaagttgtgtcgcagcatcctgagcagcatggatgctgagaatgagcctaaggtgtggtatgtgtccctggcttgttctaaggacctcaccctcctttggattcaacagatcaagaacattttgtggtactgctgtgattttctcaagcagctcaagcctgaaatcctgcaggactcccgactcatcaccctgtacctcacgatgcttgtcaccttcacagacacttcaacgtggaaaattcttcggggaaaaggtgaaagtcttcgaccagcgatgaaccacatttgtgcaaatataatgggacatctcaaccagcatggattttattctgtgctgcagtgctgtgatgggctgtttcctgatttggtttcatatgctcctcacaacaaccctgtgaggtggtccgttggcagaagctggtatgactggcagttgtctcgctagaggaaccttctacttcataccataattaaacggcttctaaaataatatgatgtctttaaattttaagtctggcattatttgtattagctgtttttttaactttattattaaagaatttctaaccataa

SEQ ID NO: 197134 - DNA, 2763 bp, Homo sapiens
  Payload ID: 18873
  Gene Name: ubiquitin protein ligase E3B
  ENST ID: ENST00000539599
  CDS Start-End: 149-2763
accgcggggcaagatggcggtagtgcgtcggctgctgccccgggtctggcagaactcgggtgttttgggctgagacagtggcagctgcggccccgaccccaagtgcggggacctccggcgaataaagggtttgtgcaagtttgcaaacatgttcaccctgtctcagacctcgagagcatggttcatcgatagagcccgtcaggcacgagaagaaaggcttgtgcagaaggaacgggagcgggcagctgttgtgatccaggcccatgtccggagttttctctgtcggagtcgactgcagagagatatcaggagagagattgatgacttttttaaagcagatgaccctgagtccactaaaagaagtgcactttgtattttcaagattgccaggaaactgctgttcctattcagaatcaaagaggataatgagagatttgagaagttgtgtcgcagcatcctgagcagcatggatgctgagaatgagcctaaggtgtggtatgtgtccctggcttgttctaaggacctcaccctcctttggattcaacagatcaagaacattttgtggtactgctgtgattttctcaagcagctcaagcctgaaatcctgcaggactcccgactcatcaccctgtacctcacgatgcttgtcaccttcacagacacttcaacgtggaaaattcttcggggaaaaggtgaaagtcttcgaccagcgatgaaccacatttgtgcaaatataatgggacatctcaaccagcatggattttattctgtgctgcagatattgttaacccgtggcctggcaagaccccgtccttgtctatccaaaggcactttaacagcagctttttctctagcgttacgccctgtgattgctgcacagttctcagacaatctgattcggccgttcctcatccacatcatgtctgtgcctgctctggtgactcatctcagcacagtgacccctgagcgcctcactgttttagaatcccatgacatgcttcgtaaattcatcatatttttaagagaccaagatcgatgccgtgatgtatgtgaaagtttagaaggatgccatacgctttgtctaatgggcaacctcctacacttgggctccctcagccccagagtgttagaggaggagacagatgggttcgtgagtttgctcacccagacgctgtgctactgtcggaagtatgtgtctcagaagaagtccaacctgacccactggcatcctgtccttggctggttctcccaatctgtggattatggccttaacgagtcaatgcacttgatcaccaaacagctgcagttcttgtggggggtgcctctgatccggatcttcttctgtgacatcctgagcaagaagctactggagagccaggagccagcccacgcacagccagcatcccctcagaatgtgctcccagtgaagagtctcctaaagcgtgcttttcaaaagtcggcatcagtccggaatattctcaggcctgtcgggggtaaacgggtcgactctgcagaagtccagaaggtttgcaacatctgtgtcctctaccagacctcgctgacaactctcacacagattcggctgcagatactcacaggtctcacttaccttgatgacctgcttcccaaactgtgggcatttatctgtgagctcgggccccacggagggttaaagctcttcttggaatgcctgaacaatgacactgaagagtccaagcaactcttggccatgctgatgctgttctgtgactgttcgcggcacctcatcacaatccttgatgacattgaagtttatgaagaacagatttcattcaaactggaagagctggtcactatctcctctttcctgaattcttttgtgtttaagatgatctgggatggaattgtagagaacgccaagggtgagaccttggagctgttccagtctgtccacgggtggcttatggtgctgtacgagcgggactgccggcggcgcttcacccccgaggaccactggctgcgaaaggatctcaaacctagcgtgctcttccaagaactcgacagggacagaaaacgggcacagttgatcctgcagtacatcccacatgtcatccctcacaaaaacagagttctactgtttcgaaccatggttaccaaggagaaggagaaactggggctggtggaaaccagctctgcctccccgcatgtcactcacatcaccatccgccggtccaggatgctggaggacggctacgagcagcttaggcagctctcccagcacgccatgaagggggtcatccgtgtgaagtttgtcaatgacctcggggtggacgaagcagggattgatcaagacggtgtttttaaggagttcttggaagagatcatcaagagagtttttgacccagcactcaatctgttcaagacaaccagtggggatgagaggctgtacccctcacccacatcctacatccatgagaattacctgcagctcttcgagtttgtggggaagatgctggggaaggctgtgtatgagggaattgtggtggacgtgccatttgcatccttcttcctgagccaactgcttgggcaccaccacagcgtcttctatagctcggtggatgaactgccttctctggactccgagttctataaaaacctcacctccatcaagcgctatgatggggacatcactgacctgggcctgacgctgtcttacgacgaggacgtcatgggtcagcttgtttgccatgaactgattcctggagggaagaccattcctgttac

SEQ ID NO: 197135 - DNA, 1541 bp, Homo sapiens
  Payload ID: 18873
  Gene Name: ubiquitin protein ligase E3B
  Uniprot ID: Q7Z3V4
  ENST ID: ENST00000540230
  CDS Start-End: 252-986
ggcggtagtgcgtcggctgctgccccgggtctggcagaactcgggtgttttgggctgagacagtggcagctgcggccccgaccccaagtgcggggacctccggcgaataaaggtcggcctgcggaaaaaataacaagcttttctgaagtgagaagctgttctcagccacgagtcctgtgcaagatcactaatgattacctggcatttctgcgacacaggcaggtcctcagggtttgtgcaagtttgcaaacatgttcaccctgtctcagacctcgagagcatggttcatcgatagagcccgtcaggcacgagaagaaaggcttgtgcagaaggaacgggagcgggcagctgttgtgatccaggcccatgtccggagttttctctgtcggagtcgactgcagagagatatcaggagagagattgatgacttttttaaagcagatgaccctgagtccactaaaagaagtgcactttgtattttcaagattgccaggaaactgctgttcctattcagaatcaaagaggataatgagagatttgagaagttgtgtcgcagcatcctgagcagcatggatgctgagaatgagcctaaggtgtggtatgtgtccctggcttgttctaaggacctcaccctcctttggattcaacagatcaagaacattttgtggtactgctgtgattttctcaagcagctcaagcctgaaatcctgcaggactcccgactcatcaccctgtacctcacgatgcttgtcaccttcacagacacttcaacgtggaaaattcttcggggaaaaggtgaaagtcttcgaccagcgatgaaccacatttgtgcaaatataatgggacatctcaaccagcatggattttattctgtgctgcagtgctgtgatgggctgtttcctgatttggtttcatatgctcctcacaacaaccctgtgaggtggtccgttggcagaagctggtatgactggcagttgtctcgctagaggaaccttctacttcataccataattaaacggcttctaaaataatatgatgtctttaaattttaagtctggcattatttgtattagctgtttttttaactttattattaaagaatttctaaccataatatttagagaaagagtggtagagttaacctcgttacccaatactttcttccctttccttttataaaaacactgcatacggttttttgtttttttgtttttttgttttttttttaagagacagggttgccctgtcacccaggctggcctcaaggaatcttcctgcctcagcctcctgagctgggactgtaggtacaagccaccatgcctggctcacaatacagtttttttatctgaagcactcagtttacttttttgctcttttatgtacaaatgaatataaagttgatatcatcctctgaccaattaaaacattcttttcagatattgttaacccgtggcctggcaagaccccgtccttgtctatccaaaggcactttaacagcagctttttctctagcgttacggtgagtaagaaaccatagctga

SEQ ID NO: 197136 - DNA, 1230 bp, Homo sapiens
  Payload ID: 18873
  Gene Name: ubiquitin protein ligase E3B
  ENST ID: ENST00000605142
  CDS Start-End: 1-528
actcaaataaaaaaccaaacagctgccctcattagcggattccgttccattatcaaacccgagtggatccgaatgttctcaactcctgaactgcagcgtctcatctctggcgacaatgctgagattgatctggaagatttaaagaagcacacagtctactacggtggtttccatggaagtcacagagtcatcatctggctctgggatattctggcctccgacttcacaccggatgagagagctatgtttctgaagttcgtgaccagctgctccagacccccgctcctgggattcgcctacctcaagcctccattctccatccgctgcgtggaggtgtcggacgatcagcaaggcaggcagctggacccctcagagccaagtgaggagggccccacagttctcacggcaggagaaccagccagccccagagagactgcccacggactcagccctctctcggcagcccctttctctttccttcctcagggaagggtacctggagtgggggtgggtacgtgctgtttttagtggcgtctggcctcaccagggctccagatctgaggcagcatgggagaaagtgagagagtgggctcaggaggcaggcaggcgcagactcgaatgctactcctaccccagcaggctgtgcacgtccaggctcgctgcttcatttcctcattggccaaaggagaaggaaagccttcagggttacggagctctgtgtgtctcaagcctggcccactgtgggtgctcaaatgagagtcctactccccataaaaacccagtggccgcctctgggtgtagctgcctctcatgatgcagtttgagcccgtgatgccaccttgtacaggaagctacacagtcctcggcctccatgcttaagggaaagttggcccaagtcatggtctgccaccggccacagcaccggtgaggagggaggagtgcattcagaaatgtttgggcacctaacagtttttacagcattctactttttgtcaattggttaaccagtaattcgctgtgaaccggaaggccccatttccaaaagcttacttagtgcaggaattctctgtgcaggccccagggagaaggggttccttctctggaagccagtcgtcttgtgtctggggcttgacctcgggtagtggtgccagggcagcgccctgcactctgcccagcatccagggactggccagatcccctccctgggctccctggccttggcatcagcct

SEQ ID NO: 197137 - DNA, 5229 bp, Homo sapiens
  Payload ID: 18874
  Gene Name: ubiquitin protein ligase E3C
  Uniprot ID: Q15386
  ENST ID: ENST00000348165
  CDS Start-End: 361-3612
tctgcagggccgcgcacgcactgacggctgaccgccatcttccctcccgaggcggcagttccaggtgcaagcgccgggtttgctgcccgctgggcgcccctgcagcggcccgagctgtggccggcgtggatgaggggcaggcgaggcagggccgcccctccagtattgccgcccctcccgccccagggcagggctgggagggtacagcccgggggcgggctcgggtcgcctcccggccgccgcgtcctcgctgccccgggccgggcgggcgggcgccgagagcctcccagcccgccccgtgccccgcccgcccggctgcttccgcggcggcgctgcccgcacatgggctaggctgccaggatgttcagcttcgaaggcgacttcaagacgcggcccaaggtgtcccttggcggcgcgagcaggaaggaggaaaaggcttctcttttacatcgtactcaggaagaaagaagaaagagagaggaagaaaggcgaaggttgaaaaatgcaataattatccagtcatttattcgaggctatagagacagaaaacagcaatattccatccaaagaagtgcatttgatcgctgtgctaccttgtcacagtccgggggcgcttttcccattgctaatggccccaaccttacccttttggtaaggcagcttctgtttttttacaaacaaaatgaagactcaaaacgtttgatatggctgtatcagaacttaattaaacacagctctctgtttgtcaagcagttggatggatctgagagacttacatgcttatttcagataaaaagattgatgagcctctgttgcaggttgctgcaaaactgtaatgatgacagtttgaatgttgcacttccaatgagaatgcttgaagtattttcgtctgagaatacttacttgcctgttttacaagatgctagctatgtggtgtcagtgattgaacaaattttgcactacatgattcacaatgggtattataggtctctatatttgttgattaacagcaagcttccatcaagtattgaatattctgatttatctcgagttcctatagcaaaaattttgctagagaatgttctaaaaccattgcactttacttacaactcctgtccggaaggtgcgaggcaacaagtttttacagccttcacagaggagtttctggcagcaccttttacagatcagatttttcatttcatcattccggcgcttgcagatgcgcagaccgttttcccttacgagccctttctgaatgcactgttgttaatagagagtagatgttcaagaaagagtggtggagcaccctggcttttctatttcgttttaactgttggcgaaaattatttgggggccctctctgaggaagggctgctggtgtatttgcgggtgctgcagaccttcctctctcagttaccagtctctcctgccagcgcgagctgtcacgactcagccagtgactctgaggaggagagtgaagaagccgacaagccctcaagcccggaggatggcagactgtcagtatcatacataacagaggaatgcctgaagaagctggacacaaagcagcagaccaacaccctgctcaacctggtgtggagggactctgcgagcgaggaggtcttcaccaccatggcctccgtctgccacacgctgatggtgcagcaccgcatgatggtacccaaagtcaggcttctctacagtttagcctttaatgccaggtttctgagacatctttggtttctaatatcttccatgtcaacacggatgatcacagggtctatggtaccgttgcttcaggtgatatccaggggttctcctatgtcttttgaagattctagtcgaatcatcccactcttttatctttttagctccttgtttagtcattcactaatttccatacatgataacgaattcttcggtgatcccatagaagttgtaggtcaaagacaatcatcaatgatgccttttactttagaagagctgataatgttgtctcgatgccttcgagatgcatgcctggggatcatcaagttggcttatccagaaaccaagccagaagttcgagaagaatatattacagcatttcagagtattggagttactactagctctgaaatgcaacaatgcatacagatggaacagaaaagatggattcagttatttaaggttatcaccaatctagtgaaaatgttgaagtccagagacacgaggagaaatttttgtcctccaaaccactggctgtcagaacaagaagatattaaagcagataaggtcactcagctctatgtgccagcatccagacatgtgtggaggttccggcggatggggaggataggcccgctgcagtccaccctggacgtgggtttggagtccccgccgctgtctgtgtctgaggaaagacagcttgctgtcctgacagagttgccttttgtggttccatttgaggaacgagtaaagatctttcagaggttgatttatgcagataagcaagaagttcaaggagatggtccatttctggatggaattaatgtcacaataagaagaaattacatttatgaagatgcttatgacaaactttctccagaaaatgagcctgatttgaaaaagcggatccgtgtgcacttgctcaatgcccatggcctggatgaagctggcattgatggtggtggtattttcagagagtttttaaatgaactactgaagtcaggatttaaccccaaccaggggttctttaagactactaatgaagggcttctgtaccccaacccggctgctcagatgcttgtgggagattcttttgccagacattactacttcctaggcagaatgcttggaaaggctctctatgagaacatgctggtggagctgccctttgcaggcttctttctttccaagttgcttggaaccagtgccgacgtggacattcaccacctcgcctccctagaccctgaggtgtataagaatttgctctttctgaagagctacgaagacgatgtggaggagcttgggctgaacttcactgtggtgaacaatgacctgggagaggcgcaggtagttgaactaaaattcggtgggaaagacatccctgtcaccagcgccaaccggattgcgtacatccacttggtggcagactacaggctgaacaggcagatccgccagcactgcctggctttccgccagggccttgccaatgtcgtcagcctcgagtggctccgaatgtttgatcagcaagaaattcaggtattaatttctggtgcacaagttcccataagcctagaggacctaaaatcctttacaaactattcaggaggctattctgcagaccatcctgttattaaggtcttctggagagttgtggaagggttcactgatgaagaaaagcgcaaactgctgaagtttgtaacaagctgctctcgaccccctctcttggggtttaaggagttgtatcccgcattttgtattcacaacggaggctccgaccttgagcggctccccacagccagcacctgcatgaacctgctgaagctccccgagttctatgacgagacacttttgcgaagtaaacttctctatgcgattgaatgtgccgctggctttgagctgagctgaagctgatgctggggtcagacccctacagagaaccagtgcttccttcgtcagcagcgcctccccagacccacgaggatactcacactgcacgcctgaggctctcctaagctccttctttcattctgccattcctccctcccttccttttttaaatgatttttattacggtgtggtcacttatttagatggacattgcttttcaaataacttaaaataacacgttatgtgccatgtggctactttagtaatattgccaagaagagcacagtttttacactagtggcatctcagtgaaattaaccaaagatgaagctttggctttgctggtgagatcagagccctcctgagcaggcagcgccactccagggttcagacagggctgcacaggcggcagagatacagggtctgagggctgagacgccatggggccgctgctgcttatgtggttggattgtttacaagcctcattattaaaactgaaggcattttttttttctgctgcctttcccaaagtggttaggtttggaaaagagatgatgatggtaatattttatttgtgctttttaagccatttccccaaatgggactagcatgcttgttttcagtataccgtggcctgcctcatgatggtttggagatactgtctgtggatgtgaggtggggacttcattcattgtcctatttctatctccactttgtgcctggagagctttcaggggaggtggaggaggagggtctgccaagctactgcaacatctgtcacccactatacccagttacttgggggaggacagacactgtggtgtcattaaagttgtttgaaccaaagtggcggctgcatctttgtcccgatgctagccgtgccggtctcccatcatccgctcgccctcctttcccctgggctgcgcccacttgtcttcctggatatttgggggtgactcgccatgcttggcaccctctgcttcctggtgctgctctgactcgaagacgggacagtccctggtgcacatccagggaagaggagtgtcggtagttcttgcagtaggcactttatcaggacctgacctgttgctgggtgattttagtctctacaaacagaaagcgtttcaaagcgtcagctgtgggagcagagtgaccctttgctgatgctggggggaggggatctaaatcctcatttatctcttctatgtctcgtattttactgtcactggaggctctgtgggctgtcatagttaattgaccataattagcaatatacttttaaagtgggaaagctgaatgacacttttaagacaatgaacattatcaaaacaaaatgtataatttcttaatttgaataataaattaagcgtttaaatgctatttgtagtcttgatatacagaaataaaataattagggttggtcttttttattttaggttgttttatgttgaatgttctatatcttattagttaatttgtatattttattagtattttggaaatagcatatctgagactgaagagaaattgacaattcacttatttgtggtttttttctcagctattctgagcttatttatttatttgtatgttctaatggctaaacatttacattaaatgttttttttcccaaga

SEQ ID NO: 197138 - DNA, 1626 bp, Homo sapiens
  Payload ID: 18874
  Gene Name: ubiquitin protein ligase E3C
  Uniprot ID: Q15386
  ENST ID: ENST00000389103
  CDS Start-End: 79-1293
cctcccagcccgccccgtgccccgcccgcccggctgcttccgcggcggcgctgcccgcacatgggctaggctgccaggatgttcagcttcgaaggcgacttcaagacgcggcccaaggtgtcccttggcggcgcgagcaggaagtattccatccaaagaagtgcatttgatcgctgtgctaccttgtcacagtccgggggcgcttttcccattgctaatggccccaaccttacccttttggtaaggcagcttctgtttttttacaaacaaaatgaagactcaaaacgtttgatatggctgtatcagaacttaattaaacacagctctctgtttgtcaagcagttggatggatctgagagacttacatgcttatttcagataaaaagattgatgagcctctgttgcaggttgctgcaaaactgtaatgatgacagtttgaatgttgcacttccaatgagaatgcttgaagtattttcgtctgagaatacttacttgcctgttttacaagatgctagctatgtggtgtcagtgattgaacaaattttgcactacatgattcacaatgggtattataggtctctatatttgttgattaacagcaagcttccatcaagtattgaatattctgatttatctcgagttcctatagcaaaaattttgctagagaatgttctaaaaccattgcactttacttacaactcctgtccggaaggtgcgaggcaacaagtttttacagccttcacagaggagtttctggcagcaccttttacagatcagatttttcatttcatcattccggcgcttgcagatgcgcagaccgttttcccttacgagccctttctgaatgcactgttgttaatagagagtagatgttcaagaaagagtggtggagcaccctggcttttctatttcgttttaactgttggcgaaaattatttgggggccctctctgaggaagggctgctggtgtatttgcgggtgctgcagaccttcctctctcagttaccagtctctcctgccagcgcgagctgtcacgactcagccagtgactctgaggaggagagtgaagaagccgacaagccctcaagcccggaggatggcagactgtcagtatcatacataacagaggaatgcctgaagaagctggacacaaagcagcagaccaacaccctgctcaacctggtgtggagggactctgcgagcgaggaggtcttcaccaccatggcctccgtctgccacacgctgatggtgcagcaccgcatgatggtacccaaagtcagggtgtacaaatgaatgtggagacctttgtaccctgacatggaaagatttccgagacagatgcgtacatgaaaaccgggaagacacaggacagtatgtagaagaaccggcttttcctataagaaggatggaaaaaataggaatatatattcatattgcataaagaaacttggaagcatatacaagaaactcatgaaagtgaacactcgtgtctgaatatgccgaggaagctggggctggagcagaagtgctcttctgagtacactatttttatatcacttttaagttttggattaggtgaatgacttaatattttaaaattggttaagtaataaatgaattgccagc

SEQ ID NO: 197139 - DNA, 448 bp, Homo sapiens
  Payload ID: 18874
  Gene Name: ubiquitin protein ligase E3C
  ENST ID: ENST00000430750
  CDS Start-End: 1-171
agcttcgaaggcgacttcaagacgcggcccaaggtgtcccttggcggcgcgagcaggaaggaggaaaaggcttctcttttacatcgtactcaggaagaaagaagaaagagagagtgttgggattacaggcgtgaactgcctcgtctggctgatgatgttgatgtttcatgaagcataaggagaaagctcactgttaagacatgtgtcttaactgtttgtgaagaaggaagaaaggcgaaggttgaaaaatgcaataattatccagtcatttattcgaggctatagagacagaaaacagcaatattccatccaaagaagtgcatttgatcgctgtgctaccttgtcacagtccgggggcgcttttcccattgctaatggccccaaccttacccttttggtaaggcagcttctgtttttttacaaacaaaatgaagactcaaaacgtttg

SEQ ID NO: 197140 - DNA, 1866 bp, Homo sapiens
  Payload ID: 18874
  Gene Name: ubiquitin protein ligase E3C
  Uniprot ID: Q15386
  ENST ID: ENST00000611269
  CDS Start-End: 317-1531
gcagggccgcgcacgcactgacggctgaccgccatcttccctcccgaggcggcagttccaggtgcaagcgccgggtttgctgcccgctgggcgcccctgcagcggcccgagctgtggccggcgtggatgaggggcaggcgaggcagggccgcccctccagtattgccgcccctcccgccccagggcagggctgggagggtacagcccgggggcgggctcgggtcgcctcccggccgccgcgtcctcgctgccccgtgccccgcccgcccggctgcttccgcggcggcgctgcccgcacatgggctaggctgccaggatgttcagcttcgaaggcgacttcaagacgcggcccaaggtgtcccttggcggcgcgagcaggaagtattccatccaaagaagtgcatttgatcgctgtgctaccttgtcacagtccgggggcgcttttcccattgctaatggccccaaccttacccttttggtaaggcagcttctgtttttttacaaacaaaatgaagactcaaaacgtttgatatggctgtatcagaacttaattaaacacagctctctgtttgtcaagcagttggatggatctgagagacttacatgcttatttcagataaaaagattgatgagcctctgttgcaggttgctgcaaaactgtaatgatgacagtttgaatgttgcacttccaatgagaatgcttgaagtattttcgtctgagaatacttacttgcctgttttacaagatgctagctatgtggtgtcagtgattgaacaaattttgcactacatgattcacaatgggtattataggtctctatatttgttgattaacagcaagcttccatcaagtattgaatattctgatttatctcgagttcctatagcaaaaattttgctagagaatgttctaaaaccattgcactttacttacaactcctgtccggaaggtgcgaggcaacaagtttttacagccttcacagaggagtttctggcagcaccttttacagatcagatttttcatttcatcattccggcgcttgcagatgcgcagaccgttttcccttacgagccctttctgaatgcactgttgttaatagagagtagatgttcaagaaagagtggtggagcaccctggcttttctatttcgttttaactgttggcgaaaattatttgggggccctctctgaggaagggctgctggtgtatttgcgggtgctgcagaccttcctctctcagttaccagtctctcctgccagcgcgagctgtcacgactcagccagtgactctgaggaggagagtgaagaagccgacaagccctcaagcccggaggatggcagactgtcagtatcatacataacagaggaatgcctgaagaagctggacacaaagcagcagaccaacaccctgctcaacctggtgtggagggactctgcgagcgaggaggtcttcaccaccatggcctccgtctgccacacgctgatggtgcagcaccgcatgatggtacccaaagtcagggtgtacaaatgaatgtggagacctttgtaccctgacatggaaagatttccgagacagatgcgtacatgaaaaccgggaagacacaggacagtatgtagaagaaccggcttttcctataagaaggatggaaaaaataggaatatatattcatattgcataaagaaacttggaagcatatacaagaaactcatgaaagtgaacactcgtgtctgaatatgccgaggaagctggggctggagcagaagtgctcttctgagtacactatttttatatcacttttaagttttggattaggtgaatgacttaatattttaaaattggttaagtaataaatgaattgccagctc

SEQ ID NO: 197141 - DNA, 1879 bp, Homo sapiens
  Payload ID: 18875
  Gene Name: ubiquitin protein ligase E3D
  ENST ID: ENST00000237186
  CDS Start-End: 124-234
acaggcgcctgcgccgcagcggggctgccgctggttggtccgcacgtggaacctctcctggtcctgttgacccgggcccctcggaacctccagcttggtccggtctgggactggaagcctgccatggcggcttctgcggcggagacgcgcgtgtttctggagagaaccgaaagaaggaggtatgcccatgaatatttccataatgccatcttcactccagatgaaaacccctgaaggctgcacagaaatccagcttccagcagaggtcaggcttgtaccttcctcttgccgtgggctacagtttgttgttggagatggactgcacctgcgactgcagacgcaagcaaaattaggcacaaaactgatttcaatgtttaatcaaagctcgcaaacccaagaatgttgcacgttttattgccaatcctgcggtgaagtcataataaaagacaggaagctcctcagggtgctcccactgccgagtgagaactggggagctctagttggagaatggtgttgtcatcctgacccctttgctaataaatcacttcatccgcaagagaatgactgttttattggagactctttcttcttggtgaatttaagaaccagtttgtggcagcaaagacctgaactatccccagtggagatgtgctgtgtttcttctgacaaccattgtaaattggaaccaaaggcaaataccaaagtaatttgtaagcgttgcaaggtaatgttgggagagaccgtgtcatcagaaaccaccaagttttatatgacagagataattattcagtcatctgagaggagttttcctatcataccaaggtcttggtttgtccagagcgtgatcgcccagtgtctggtgcagctctcctctgctagaagcacttttagattcacgattcaaggtcaggatgacaaagtgtatatcttgctatggcttttaaattcagacagtttggtgattgaatctttgagaaattccaaatatatcaaaaaattccccttgttggaaaacacattcaaagccgattctagttctgcctggagtgctgtcaaggtcctctaccagccatgcatcaaaagcaggaatgaaaaacttgtcagcttgtgggaaagtgacatcagcgtccacccgctaaccctgccctctgcaacctgcttggagctgctgttgatattgtcaaagagtaatgccaatctgccttcatcccttcgccgtgtgaattcctttcaggtggcctttttgaagatgtaactattagagctgggcattctcctcccccggcagacagctctcaagcaggagcacaccgaggccagcagtcagctcaggaggcatcaattacaaagacaagaaccagagctatgggataagagcattgcattgaagttttaagtttacttgtttgcatgtattctctaagagaagagttaactttagatctttgaaaacccaggactgtgaagaaagtcatagtagcaggttgaggcaagtgtagaagttacatctctatttcccacagagaggaatattcacatatgtgcagtgtcagcaccacctggaaggttattacctaatggagatccatctgtcctgtgtggaatccagtgaggaattttattggtggaactgaatgttaactgctgtaaatcctaggaaataaacttttaaagagtttctcaggatgatttaaaacaaattttaaaaaagaaaagtagaaaacattttatactttattcagaggagatgctcaatagatgtttgttgaatgaatgattatcaaattaaaggatttcctatttatgcaaatctgcatgtttcttttgttatttcctttaccatacattattgcaaattaataaatatacctcactagca

SEQ ID NO: 197142 - DNA, 2740 bp, Homo sapiens
  Payload ID: 18875
  Gene Name: ubiquitin protein ligase E3D
  ENST ID: ENST00000369746
  CDS Start-End: 1-551
tccagatgaaaacccctgaaggctgcacagaaatccagcttccagcagaggtcaggcttgtaccttcctcttgccgtgggctacagtttgttgttggagatggactgcacctgcgactgcagacgcaagcaaaattaggcacaaaactgatttcaatgtttaatcaaagctcgcaaacccaagaatgttgcacgttttattgccaatcctgcggtgaagtcataataaaagacaggaagctcctcagggtgctcccactgccgagtgagaactggggagctctagttggagaatggtgttgtcatcctgacccctttgctaataaatcacttcatccgcaagagaatgactgttttattggagactctttcttcttggtgaatttaagaaccagtttgtggcagcaaagacctgaactatccccagtggagatgtgctgtgtttcttctgacaaccattgtaaattggaaccaaaggcaaataccaaagtaatttgtaagcgttgcaaggtaatgttgggagagaccgtgtcatcagccaggtcatgctgatgcaagaggtgggctcccatggccttgaacagctctgttcctgtggttttgccggaaaccaccaagttttatatgacagagataattattcagtcatctgagaggagttttcctatcataccaaggtcttggtttgtccagagcgtgatcgcccagtgtctggtgcagctctcctctgctagaagcacttttagattcacgattcaaggtcaggatgacaaagtgtatatcttgctatggcttttaaattcagacagtttggtgattgaatctttgagaaattccaaatatatcaaaaaattccccttgttggaaaacacattcaaagccgattctagttctgcctggagtgctgtcaaggtcctctaccagccatgcatcaaaagcaggaatgaaaagtaagttgtgcatttgttttctctttccacattatgttttagcttttgttgtcatgttggtgttaagaaattaatgaattaaatgccactataccatttccctacttgaagcttctaggagccaatactgctaaatattatatgtttaaaataggttgaattattacagatgattcatgttaatatgcagaaagcttgcttttaccaaaaattattgtttttttcttgtaatctaagctgtctgtacatatggctgcagtgctaaatcagacttcaacagtgatgaatatttaccaataagcactttccaggcatcaggatacaataatgaacaaaccccagcccctacctcttagcattgttgttctaatagggggaaggcagaccataaacaaaacagattcttacgtctcttactatgtgtcaggcactcatctaagaactcgtagctcatttaagcctaacaacaacctgtgtggtatgtaccattatcatccccactttaaagataagcacactaagacactggtagtaaatcactctagtgaaaaatgaagcaaggtaaggtagttggcgaggggtaggatgggagtaggatgtcattttatattgcaaagtcagggaagattctttagataaggtgatatttaagcaggtaacttgaaggaagtgaagtggtgagccatatctgatggaagatcattcccagaaaaggaaacagcaggttattttaattgtaacagaatcaaagtttgtacttgtcctgtactcttagatgggtttgatcaaatttatcctaagaacggaagggtcttagtctttttctggaaagtaaataagacattgaaaaaattaattaggtttcttatgcaagtagtaccagtcataaaatattcaaacactaagagatatatacaaggtaaaattatatcccgctccagaagtaaaacgtttgttgtctactcttccacttccttttctgttcattttgcacctaaacatgtgtattttttacacttaaaaaaagcccatgtcttagagattctttccattgtgagtgcttgacattttatgaaatggaggtactataaattatttagccagttttcttttaatggatatttggtttattacttttttgctgttataattagtgttgtgatcttgtatgtttgttttctgattataagttttttatattagaggaatttctagaggtacaattgttgagtcaaagggtatggacatttaaaattttgagaggtaatatcaaagtattttgtaaaaaggcatcatgaatttatattcccacctgaagtttttataaatgtccattaccctgcactctcacccaaatttccatttagatttttgcctatctgatgtgattctaaaggaaacaggtttacttgacactatccttatattttattgagacatgttcaatggatgcatctcagttttatgcttttgagactctttttgagggcttgggtttttttttgtgtgtgtgcccttatgcatagtcaactagtaagctgtacattgattatattctcttttgatgtatgtgtttgtgtgtatctttatatatttaggtttatatcatcaaatttattaaaaccctttatattcatcttttctgtttattaaaatgtggacttttgtgacaggtatgttgaatcttatattatgattatgtaagtaattttcttctgttttgatactagttttcacattatgtattttaaagctgtgttattagaggaataaaagtttgtggcatgacaa

SEQ ID NO: 197143 - DNA, 1917 bp, Homo sapiens
  Payload ID: 18875
  Gene Name: ubiquitin protein ligase E3D
  Uniprot ID: Q7Z6J8
  ENST ID: ENST00000369747
  CDS Start-End: 124-1293
acaggcgcctgcgccgcagcggggctgccgctggttggtccgcacgtggaacctctcctggtcctgttgacccgggcccctcggaacctccagcttggtccggtctgggactggaagcctgccatggcggcttctgcggcggagacgcgcgtgtttctggaggtgcggggacagctgcagagcgcgcttctgatcctgggagaaccgaaagaaggaggtatgcccatgaatatttccataatgccatcttcactccagatgaaaacccctgaaggctgcacagaaatccagcttccagcagaggtcaggcttgtaccttcctcttgccgtgggctacagtttgttgttggagatggactgcacctgcgactgcagacgcaagcaaaattaggcacaaaactgatttcaatgtttaatcaaagctcgcaaacccaagaatgttgcacgttttattgccaatcctgcggtgaagtcataataaaagacaggaagctcctcagggtgctcccactgccgagtgagaactggggagctctagttggagaatggtgttgtcatcctgacccctttgctaataaatcacttcatccgcaagagaatgactgttttattggagactctttcttcttggtgaatttaagaaccagtttgtggcagcaaagacctgaactatccccagtggagatgtgctgtgtttcttctgacaaccattgtaaattggaaccaaaggcaaataccaaagtaatttgtaagcgttgcaaggtaatgttgggagagaccgtgtcatcagaaaccaccaagttttatatgacagagataattattcagtcatctgagaggagttttcctatcataccaaggtcttggtttgtccagagcgtgatcgcccagtgtctggtgcagctctcctctgctagaagcacttttagattcacgattcaaggtcaggatgacaaagtgtatatcttgctatggcttttaaattcagacagtttggtgattgaatctttgagaaattccaaatatatcaaaaaattccccttgttggaaaacacattcaaagccgattctagttctgcctggagtgctgtcaaggtcctctaccagccatgcatcaaaagcaggaatgaaaaacttgtcagcttgtgggaaagtgacatcagcgtccacccgctaaccctgccctctgcaacctgcttggagctgctgttgatattgtcaaagagtaatgccaatctgccttcatcccttcgccgtgtgaattcctttcaggtggcctttttgaagatgtaactattagagctgggcattctcctcccccggcagacagctctcaagcaggagcacaccgaggccagcagtcagctcaggaggcatcaattacaaagacaagaaccagagctatgggataagagcattgcattgaagttttaagtttacttgtttgcatgtattctctaagagaagagttaactttagatctttgaaaacccaggactgtgaagaaagtcatagtagcaggttgaggcaagtgtagaagttacatctctatttcccacagagaggaatattcacatatgtgcagtgtcagcaccacctggaaggttattacctaatggagatccatctgtcctgtgtggaatccagtgaggaattttattggtggaactgaatgttaactgctgtaaatcctaggaaataaacttttaaagagtttctcaggatgatttaaaacaaattttaaaaaagaaaagtagaaaacattttatactttattcagaggagatgctcaatagatgtttgttgaatgaatgattatcaaattaaaggatttcctatttatgcaaatctgcatgtttcttttgttatttcctttaccatacattattgcaaattaataaatatacctcactagca

SEQ ID NO: 197144 - DNA, 1352 bp, Homo sapiens
  Payload ID: 18875
  Gene Name: ubiquitin protein ligase E3D
  ENST ID: ENST00000430071
  CDS Start-End: 122-490
aggcgcctgcgccgcagcggggctgccgctggttggtccgcacgtggaacctctcctggtcctgttgacccgggcccctcggaacctccagcttggtccggtctgggactggaagcctgccatggcggcttctgcggcggagacgcgcgtgtttctggaggtgcggggacagctgcagagcgcgcttctgatcctgggagaaccgaaagaaggaggtatgcccatgaatatttccataatgccatcttcactccagatgaaaacccctgaaggctgcacagaaatccagcttccagcagaggtcaggcttgtaccttcctcttgccgtgggctacagtttgttgttggagatggactgcacctgcgactgcagacgcaagcaaaattaggcacaaaactgatttcaatgtttaatcaaagctcgcaaacccaagaatgttgcacgttttattgccaatcctgcggtgaagtcataataaaagacagatgatttgaaacagagtggctctccggaggtctctggatggttcgccctgttctccctgcactggaagctcctcagggtgctcccactgccgagtgagaactggggagctctagttggagaatggtgttgtcatcctgacccctttgctaataaatcacttcatccgcaagagaatgactgttttattggagactctttcttcttggtgaatttaagaaccagtttgtggcagcaaagacctgaactatccccagtggagatgtgctgtgtttcttctgacaaccattgtaaattggaaccaaaggcaaataccaaagtaatttgtaagcgttgcaaggtaatgttgggagagaccgtgtcatcagaaaccaccaagttttatatgacagagataattattcagtcatctgagaggagttttcctatcataccaaggtcttggtttgtccagagcgtgatcgcccagtgtctggtgcagctctcctctgctagaagcacttttagattcacgattcaaggtcaggatgacaaagtgtatatcttgctatggcttttaaattcagacagtttggtgattgaatctttgagaaattccaaatatatcaaaaaattccccttgttggaaaacacattcaaagccgattctagttctgcctggagtgctgtcaaggtcctctaccagccatgcatcaaaagcaggaatgaaaaacttgtcagcttgtgggaaagtgacatcagcgtccacccgctaaccctgccctctgcaacctgcttggagctgctgttgatattgtcaaagagtaatgccaatctgccttcatcccttcgccgtgtgaattcctttcaggtggcctttttgaagatg

SEQ ID NO: 197145 - DNA, 3255 bp, Homo sapiens
  Payload ID: 18875
  Gene Name: ubiquitin protein ligase E3D
  ENST ID: ENST00000505226
  CDS Start-End: 106-219
gcggggctgccgctggttggtccgcacgtggaacctctcctggtcctgttgacccgggcccctcggaacctccagcttggtccggtctgggactggaagcctgccatggcggcttctgcggcggagacgcgcgtgtttctggaggtgcggggacagctgcagagcgcgcttctgatcctgggagatagggtttcaccatattgcccatgctggtcttgaactcctggactcaagcgatccacccactttggactcccaaagtgctgggattacagagaaccgaaagaaggaggtatgcccatgaatatttccataatgccatcttcactccagatgaaaacccctgaaggctgcacagaaatccagcttccagcagaggtcaggcttgtaccttcctcttgccgtgggctacagtttgttgttggagatggactgcacctgcgactgcagacgcaagcaaaattaggcacaaaactgatttcaatgtttaatcaaagctcgcaaacccaagaatgttgcacgttttattgccaatcctgcggtgaagtcataataaaagacaggaagctcctcagggtgctcccactgccgagtgagaactggggagctctagttggagaatggtgttgtcatcctgacccctttgctaataaatcacttcatccgcaagagaatgactgttttattggagactctttcttcttggtgaatttaagaaccagtttgtggcagcaaagacctgaactatccccagtggagatgtgctgtgtttcttctgacaaccattgtaaattggaaccaaaggcaaataccaaagtaatttgtaagcgttgcaaggtaatgttgggagagaccgtgtcatcaggtaagaatttcataacaagaagccaaaatgattggcttcttgcttaaaagccagaatgatattttatagtaaatatataggaaagatagatgattaatatatgttgtggaattggtgcttttcaaaatagaccccaagtaacataccatccaatataccaagaagtttgtatattttgaccttcataaatacagagtattgaattttaagtattaagaagttgagtcattttcagagtttcatagcctctttgtagatataaagcaatagtataaagtttgttcttgggcctatttcaagaaaattggagcttttttctctctttgtttccttctttcttcttcttcttttttttttttttttaattttaccttcctggtaactcacgaaacagagcttttttcttaatacacctcctcagttagaagaattggtgcccagagatggagaagttgtttttcttggctgccatctggctcggggctgtattttggggctggggatgggagaggacctgttgaaatggaagaaaaaaaattccgaattttgtactttgtcccttattcttttggttccccagtagcattgattatattttatgtaaactctgttatactactttaaaatataataatgaaaatcctgataattaaaatgcattgctgtttaaagatatggtttatagtgtctagagaactacaacatgctgtgttagctttggatgatgaataattacttttaatacagttaattagaagatgtgatttacatgaagcaattgtacttaagggaaggcagatgatggtattttttgtttatttgtttgtttaatcgtcaaaatcttgtaagaagttacttgttcacagtgagccagaaaggaaaaatgagttagtaaaaggtaccatccttaacgtcatttttggaaaatgaaagcaagcctctgaagcaacaccttagaaaaagttaagccttctggttaaataaggtgaattgatttttaaattattttctccctgaagtcctgttaaaatgtcagttaaggaatgaaaagatatatatctacaaaggcaaagagaaatggagaggagatgacaatgacataaacaagagatgtaaacaaacttttttggaacacacttggcagcctggagggagctgcagctttggtgtctgtagatcatttggataaggagtgggccaataatctctgtagagccccaaaacaagtcagaatttggaggcagcaggtgacagggaaggcagtctgaggcaaggggctggaagcaggatgattggttcaaagtgtatatatacagctactagacttctaggtttcccacttcattttcaacttgcttctgtaatcctcaaggttggagattggaagacctcccccacaccctttttttttgaataatggaagaataccaactagagaaaagacttgcagacactgattctttggggacattcaaccaaaaatgaggttatgtcgttgttcaacaaaaatgaggttaaactgagcacagtggtgcatgcctatagtcccagctacttgggaggctgaggcaggagggtcacttgagcccaggggttcaaggctgtggtgcactattattgcacctatgaatagccactgcacttcagcctggagaacatagggagactctatctcttaaaaaaaaaaaaaaagagagagcttatattcactcatcctacagtcaacaaaccttgtacctatacccaagaactttctctcagcatttcactgccttacactaaaattgaaatgaattgttgagaatcaccaaatatttgagtaaatcaacaaaaaagaaaccaaggcaaataaatgattaagcaagcaaattaaaagcactgagaagaaacacattatgtatacagcagaagtaaatctttaaaaaaaaaatgcccttgaagaaataaactaatattgcttccataattcagagaatgtggaatttaaaaatgtaatagcttcagaaaaaaaaaattaaagaattggaagataaaagtaaagaattaggccagaaattaaaaccaaaagacagagattgaaaattaaagaagaggccgggcacggaggctcacgcctgtaatcccagcactttgggaggccgagatgggcagatgacctgaggtcaggagctcaagaccagcctggccaacatggtgaaaccctgtctctaccaaaaatacaaaaattagccagacatggtgacatgcacctgtaatcccagctactagggaggctgaggcaggagaatcgcttgaacccgggaggcaaagatggcagtgagctaagatcgtgccactgcactccagcctgagcaacagggcaagactccatctcaaaaaaaaaaaaaaaa

SEQ ID NO: 197146 - DNA, 1246 bp, Homo sapiens
  Payload ID: 18875
  Gene Name: ubiquitin protein ligase E3D
  ENST ID: ENST00000509102
  CDS Start-End: 34-888
cagcttggtccggtctgggactggaagcctgccatggcggcttctgcggcggagacgcgcgtgtttctggaggtgcggggacagctgcagagcgcgcttctgatcctgggagaaccgaaagaaggaggtatgcccatgaatatttccataatgccatcttcactccagatgaaaacccctgaaggctgcacagaaatccagcttccagcagaggtcaggcttgtaccttcctcttgccgtgggctacagtttgttgttggagatggactgcacctgcgactgcagacgcaagcaaaattaggcacaaaactgatttcaatgtttaatcaaagctcgcaaacccaagaatgttgcacgttttattgccaatcctgcggtgaagtcataataaaagacaggaagctcctcagggtgctcccactgccgagtgagaactggggagctctagttggagaatggtgttgtcatcctgacccctttgctaataaatcacttcatccgcaagagaatgactgttttattggagactctttcttcttggtgaatttaagaaccagtttgtggcagcaaagacctgaactatccccagtggagatgtgctgtgtttcttctgacaaccattgtaaattggaaccaaaggcaaataccaaagtaatttgtaagcgttgcaaggtaatgttgggagagaccgtgtcatcagaaaccaccaagttttatatgacagagataattattcagtcatctgagaggagttttcctatcataccaaggtcttggtttgtccagagcgtgatcgcccagtgtctggtgcagctctcctctgctagaagcacttttagattcacgattcaagctatggcttttaaattcagacagtttggtgattgaatctttgagaaattccaaatatatcaaaaaattccccttgttggaaaacacattcaaagccgattctagttctgcctggagtgctgtcaaggtcctctaccagccatgcatcaaaagcaggaatgaaaaacttgtcagcttgtgggaaagtgacatcagcgtccacccgctaaccctgccctctgcaacctgcttggagctgctgttgatattgtcaaagagtaatgccaatctgccttcatcccttcgccgtgtgaattcctttcaggtggcctttttgaagatgtaactattagagctgggcattctcctcccccggcagacagctctcaagcaggagcacaccgaggccagcagt

SEQ ID NO: 197147 - DNA, 114 bp, Homo sapiens
  Payload ID: 18875
  Gene Name: ubiquitin protein ligase E3D
  ENST ID: ENST00000626828
  CDS Start-End: 1-114
atggcggcttctgcggcggagacgcgcgtgtttctggaggtgcggggacagctgcagagcgcgcttctgatcctgggagatagggtttcaccatattgcccatgctggtcttga

SEQ ID NO: 197148 - DNA, 753 bp, Homo sapiens
  Payload ID: 18876
  Gene Name: ubiquitin related modifier 1
  ENST ID: ENST00000372847
  CDS Start-End: 11-202
cttcctcaacatggctgcgcccttgtcagtggaggtggagttcgggagctcacctggctgtctttttctctggtcctcctttgcagaggtggtgcggagctcctgtttgacggtattaagaaacatcgagtcactttgcctggacaggaggaaccctgggacatccggaacctgctcatctggatcaagaagaatttgctaaaagagcggccagagttgttcatccagggagacagcgtgtgagtcccactcctcccttccctgaagcaggtggagggagggacggatatttgagcccccaccctcgggttcagtcctggccttctctgaatccggttctccccttcctcctccctaactcttccagctctgagatctgttttcagttttcttgttactaaaccgaactcttgaggattttttaaatcccagatgaaaggagcctggtgaatttctcagaaaacttggattctgccctctggttgccacagacttgctgtgggaccttaggcgacttacttcgcttctctgggcctcagttactctctacacagaaagtgctgaggaaaaaacgtagctagtacaactgaagagctaaatattctgttttatttcattgtaatttaaatagccacatgcagctagtagattaccatacagtgcagcacgggtctagaattccaaggagtcattgactctgtgcgtgcacacacccatgcacatgcacacacactcactggggacaccccatag

SEQ ID NO: 197149 - DNA, 3045 bp, Homo sapiens
  Payload ID: 18876
  Gene Name: ubiquitin related modifier 1
  Uniprot ID: Q9BTM9
  ENST ID: ENST00000372850
  CDS Start-End: 21-212
gcgagctcggcttcctcaacatggctgcgcccttgtcagtggaggtggagttcggaggtggtgcggagctcctgtttgacggtattaagaaacatcgagtcactttgcctggacaggaggaaccctgggacatccggaacctgctcatctggatcaagaagaatttgctaaaagagcggccagagttgttcatccagggagacagcgtgtgagtcccactcctcccttccctgaagcaggtggagggagggacggatatttgagcccccaccctcgggttcagtcctggccttctctgaatccggttctccccttcctcctccctaactcttccagctctgagatctgttttcagttttcttgttactaaaccgaactcttgaggattttttaaatcccagatgaaaggagcctggtgaatttctcagaaaacttggattctgccctctggttgccacagacttgctgtgggaccttaggcgacttacttcgcttctctgggcctcagttactctctacacagaaagtgctgaggaaaaaacgtagctagtacaactgaagagctaaatattctgttttatttcattgtaatttaaatagccacatgcagctagtagattaccatacagtgcagcacgggtctagaattccaaggagtcattgactctgtgcgtgcacacacccatgcacatgcacacacactcactggggacaccccatagaagcccagtgcagtctccttggaaaggaccaggttccagttgccacgaagttacttctaaaacaaggccagtcccccacgtgaaaggtggccggtgcagttgtgaggctcgcttatttgcctcgaagcataggtcactgtcaggtcctaagggatcaggcctaggggatcagccctccttcaggtcatggtccagtggtcctggaggccacctctaaggccagcagtgctccttgggccattaccagtgggagccaggctaagctgcctgaccaaatgttgacctaccctgccttatgccaggcaggactgcacgtgagcattgccatgtggcatggcaactgattcggaagaggcaaaacagccttctctccaggatgggcatgcagaggcctaaaaaaaagccgaagttcttttccagggctaacgagaataagattagacccctggaaaagtcctactaatggttaccatgacagtgtggcaagcactccacacatatcagctcatttcgttttcgtataggccttgtgggttagacagtatcacttatcccattttcagatgaggaacctgatactcagaaacaaaatgacctgcccatggtctgggtggtggtgctggctggcatttgcacccattttccatctggctacaaagaccatgcatgactgacctggtttccttcacactcagaccagcctccccttcctgggatatctttagccagaccccaggaggaaggctcctcagcacactctcctgcagcccaaagctctcagcctctcttcctctgtgctactgcctcctgcctctcactccttgctactcaccaccatctttcccacaggcggccaggaattctggtgctgattaacgatgccgactgggagctactggtcagtaccttgggggacatccctcccccagcccctgcccttgctgcttcagtgggaaagcgttgggcctctcctcaggcacatatagagtggctgggtaatcctccgccccactccagccccacactgaggctgctggagtctcccactccaggtgaggaagggatgggtagctggggacatgggagtactcctccatcctgaagatttgcaggttgaggtataggatacccatttttctggtagagtctgtctcttccagagcagccagtcctcagcccctgttctcccaactcctggggtggacctgggaaggtggccctgagggtctcccgctcccctctctcccgcaccagggtgagctggactaccagcttcaggaccaggacagcgtcctcttcatctccactctgcacggcggctgagggcccttctctgggcctgggcacccttagaggggagaacgaagcaatcagacatccccttgggccctgcttccaggtctccctgtcccccttgcctgccttcttccctgctctgtcccctaagctccctccaggcagggaaaagaggccaggtgctaaaaatgagcctttctcaagcacgtgagcagcggaaggcagacaggcgccagagcccagcactcccttttccagcagctgtggtgggggagggttcccctccagtttgtcaagagttgaaggaggctctgtggccaggtgacctggctgccttccactccttgtacctcagtctaaacatggagtggccgctgacaaggcgctccagccccagagccagcgtcttcatggggaagatgaatggacctgagtagctgaaggaaggcccctccctacccaaagactggaggcttctcagcctcaatttccctgtctgtacagctgagggctctgcctgtcccccactgctatcagtatggaaccccagctggggtcccctattgagtgccgactccccccaccgccagcagctgctcctccagccacacccctcctgctccccccacccctagcccttgaccctggctggcctgccccgctccacaggccaccagatgggctcctgagaccctccccaggctgcttacagctcattctgctgggggtagagatgaggggagggagtaagttaaaccttggactagcaagtagaagcctggggggatgcgtgtgcctcagtttcctcctccacaactgaatatagtggctgaaaactggggagatacttgatggcgcgaatgtccgttttctctcccttcccacctcctgcaggaagcaggacggggcaggcagcacctggtaggcacagtgctttgcccctcctccccttcccttctggaagtcttggggcctcagtgcttgcaacagccggccttgggcaaataaaagactaggttgtttacta

SEQ ID NO: 197150 - DNA, 2650 bp, Homo sapiens
  Payload ID: 18876
  Gene Name: ubiquitin related modifier 1
  Uniprot ID: Q9BTM9
  ENST ID: ENST00000372853
  CDS Start-End: 63-368
ccggaaatttgcgggcgcgccggaagttgaggggagtttcctgcgagctcggcttcctcaacatggctgcgcccttgtcagtggaggtggagttcggaggtggtgcggagctcctgtttgacggtattaagaaacatcgagtcactttgcctggacaggaggaaccctgggacatccggaacctgctcatctggatcaagaagaatttgctaaaagagcggccagagttgttcatccagggagacagcgtgcggccaggaattctggtgctgattaacgatgccgactgggagctactgggtgagctggactaccagcttcaggaccaggacagcgtcctcttcatctccactctgcacggcggctgagggcccttctctgggcctgggcacccttagaggggagaacgaagcaatcagacatccccttgggccctgcttccaggtctccctgtcccccttgcctgccttcttccctgctctgtcccctaagctccctccaggcagggaaaagaggccaggtgctaaaaatgagcctttctcaagcacgtgagcagcggaaggcagacaggcgccagagcccagcactcccttttccagcagctgtggtgggggagggttcccctccagtttgtcaagagttgaaggaggctctgtggccaggtgacctggctgccttccactccttgtacctcagtctaaacatggagtggccgctgacaaggcgctccagccccagagccagcgtcttcatggggaagatgaatggacctgagtagctgaaggaaggcccctccctacccaaagactggaggcttctcagcctcaatttccctgtctgtacagctgagggctctgcctgtcccccactgctatcagtatggaaccccagctggggtcccctattgagtgccgactccccccaccgccagcagctgctcctccagccacacccctcctgctccccccacccctagcccttgaccctggctggcctgccccgctccacaggccaccagatgggctcctgagaccctccccaggctgcttacagctcattctgctgggggtagagatgaggggagggagtaagttaaaccttggactagcaagtagaagcctggggggatgcgtgtgcctcagtttcctcctccacaactgaatatagtggctgaaaactggggagatacttgatggcgcgaatgtccgttttctctcccttcccacctcctgcaggaagcaggacggggcaggcagcacctggtaggcacagtgctttgcccctcctccccttcccttctggaagtcttggggcctcagtgcttgcaacagccggccttgggcaaataaaagactaggttgtttactagccttgcttggagcttcatccttggaaacgggtggcacctcatatccccccagccgtggtctgtgatacaacctctccatcctcagcctagggcctcagagctacccttcacccaaaagaggggtgggggtgaacactcagacaatctgagagggggtagtctaatagagccatctggagaagggagtggcagagccagtctgtgctgaccagtctgtgtcccgggacgcatccccacccgtctgtccaaggctttgtcccaccagctgcagccagcagcctcagaacccaaaatgagggtagcatagataagactgctgagccccctttctgtggtctttcctttccatgacctagagaaaagagctttgctggagggagacccccaaaaagaattagggtgctaacatcccaccaaaagcatcatcccacccaaaatgttgcttttcattctatgtcaataatttaaggtggaatttctctcaccctgtggagatgaaagtggcaaaaggttgtcccagcagtgttgggggatggggtgtgcacatcattcttttgggggtagatgacctgctggctggtgggcttttctccaggactactgcaggtagagaccctctgggcttgtgtggagtgggagcagccgtgttgggactatggggaggagctggtctgggtgcaaattaaggccagtgttggggtctgagtgctgtccagaaaggctgtgtgaccaaccctcactagttcctgaggtcagggtctccatgttagggaacagagcaagagacttggaacagctccctacagctgcacttctagaaggtcagcctgtccgattcttgtaacctggaggtccctccccatctgcagccccctgagctgcaggagcggccccatcagtgcacctgattggaacacactagatttcaggtcctggaaactgggcgctaggatccgtttccctggctgcagagagtgggaggtgtgatgtggaatatcccttctcccagcacaccccaattaatactgaagagtagggcaggaggaggtgctgggaaaaccgggtttcttggcacatgggggtgcaagcactgtggttgaaattggccatgtccaaggcacaccagacgatttcaggtcatttttagccctagactggaaaggggtcaggggacaggtgacctgggctcagcccccagcagctcccaactgcccctctcccaagcaactcctgatccctgcttttgaggaaataaacaaataaaaccccgctatctccgaa

SEQ ID NO: 197151 - DNA, 2944 bp, Homo sapiens
  Payload ID: 18876
  Gene Name: ubiquitin related modifier 1
  Uniprot ID: Q9BTM9
  ENST ID: ENST00000452446
  CDS Start-End: 1-441
atggctgcgcccttgtcagtggaggtggagttcggaggtggtgcggagctcctgtttgacggtattaagaaacatcgagtcactttgcctggacaggaggaaccctgggacatccggaacctgctcatctggatcaagaagaatttgctaaaagagcggccagagttgttcatccagggagacagcgtgcggccaggaattctggtgctgattaacgatgccgactgggagctactggtcagtaccttgggggacatccctcccccagcccctgcccttgctgcttcagtgggaaagcgttgggcctctcctcaggcacatatagagtggctgggtaatcctccgccccactccagccccacactgaggctgctggagtctcccactccaggtgaggaagggatgggtagctggggacatgggagtactcctccatcctgaagatttgcaggttgaggtataggatacccatttttctggtagagtctgtctcttccagagcagccagtcctcagcccctgttctcccaactcctggggtggacctgggaaggtggccctgagggtctcccgctcccctctctcccgcaccagggtgagctggactaccagcttcaggaccaggacagcgtcctcttcatctccactctgcacggcggctgagggcccttctctgggcctgggcacccttagaggggagaacgaagcaatcagacatccccttgggccctgcttccaggtctccctgtcccccttgcctgccttcttccctgctctgtcccctaagctccctccaggcagggaaaagaggccaggtgctaaaaatgagcctttctcaagcacgtgagcagcggaaggcagacaggcgccagagcccagcactcccttttccagcagctgtggtgggggagggttcccctccagtttgtcaagagttgaaggaggctctgtggccaggtgacctggctgccttccactccttgtacctcagtctaaacatggagtggccgctgacaaggcgctccagccccagagccagcgtcttcatggggaagatgaatggacctgagtagctgaaggaaggcccctccctacccaaagactggaggcttctcagcctcaatttccctgtctgtacagctgagggctctgcctgtcccccactgctatcagtatggaaccccagctggggtcccctattgagtgccgactccccccaccgccagcagctgctcctccagccacacccctcctgctccccccacccctagcccttgaccctggctggcctgccccgctccacaggccaccagatgggctcctgagaccctccccaggctgcttacagctcattctgctgggggtagagatgaggggagggagtaagttaaaccttggactagcaagtagaagcctggggggatgcgtgtgcctcagtttcctcctccacaactgaatatagtggctgaaaactggggagatacttgatggcgcgaatgtccgttttctctcccttcccacctcctgcaggaagcaggacggggcaggcagcacctggtaggcacagtgctttgcccctcctccccttcccttctggaagtcttggggcctcagtgcttgcaacagccggccttgggcaaataaaagactaggttgtttactagccttgcttggagcttcatccttggaaacgggtggcacctcatatccccccagccgtggtctgtgatacaacctctccatcctcagcctagggcctcagagctacccttcacccaaaagaggggtgggggtgaacactcagacaatctgagagggggtagtctaatagagccatctggagaagggagtggcagagccagtctgtgctgaccagtctgtgtcccgggacgcatccccacccgtctgtccaaggctttgtcccaccagctgcagccagcagcctcagaacccaaaatgagggtagcatagataagactgctgagccccctttctgtggtctttcctttccatgacctagagaaaagagctttgctggagggagacccccaaaaagaattagggtgctaacatcccaccaaaagcatcatcccacccaaaatgttgcttttcattctatgtcaataatttaaggtggaatttctctcaccctgtggagatgaaagtggcaaaaggttgtcccagcagtgttgggggatggggtgtgcacatcattcttttgggggtagatgacctgctggctggtgggcttttctccaggactactgcaggtagagaccctctgggcttgtgtggagtgggagcagccgtgttgggactatggggaggagctggtctgggtgcaaattaaggccagtgttggggtctgagtgctgtccagaaaggctgtgtgaccaaccctcactagttcctgaggtcagggtctccatgttagggaacagagcaagagacttggaacagctccctacagctgcacttctagaaggtcagcctgtccgattcttgtaacctggaggtccctccccatctgcagccccctgagctgcaggagcggccccatcagtgcacctgattggaacacactagatttcaggtcctggaaactgggcgctaggatccgtttccctggctgcagagagtgggaggtgtgatgtggaatatcccttctcccagcacaccccaattaatactgaagagtagggcaggaggaggtgctgggaaaaccgggtttcttggcacatgggggtgcaagcactgtggttgaaattggccatgtccaaggcacaccagacgatttcaggtcatttttagccctagactggaaaggggtcaggggacaggtgacctgggctcagcccccagcagctcccaactgcccctctcccaagcaactcctgatccctgcttttgaggaaataaacaaataaaaccccgctatctccgaa

SEQ ID NO: 197152 - DNA, 723 bp, Homo sapiens
  Payload ID: 18876
  Gene Name: ubiquitin related modifier 1
  ENST ID: ENST00000470840
  CDS Start-End: 21-212
gcgagctcggcttcctcaacatggctgcgcccttgtcagtggaggtggagttcgggagctcacctggctgtctttttctctggtcctcctttgcagaggtggtgcggagctcctgtttgacggtattaagaaacatcgagtcactttgcctggacaggaggaaccctgggacatccggaacctgctcatctggatcaagaagaatttgctaaaagagcggccagagttgttcatccagggagacagcgtgcggccaggaattctggtgctgattaacgatgccgactgggagctactgggtgagctggactaccagcttcaggaccaggacagcgtcctcttcatctccactctgcacggcggctgagggcccttctctgggcctgggcacccttagaggggagaacgaagcaatcagacatccccttgggccctgcttccaggtctccctgtcccccttgcctgccttcttccctgctctgtcccctaagctccctccaggcagggaaaagaggccaggtgctaaaaatgagcctttctcaagcacgtgagcagcggaaggcagacaggcgccagagcccagcactcccttttccagcagctgtggtgggggagggttcccctccagtttgtcaagagttgaaggaggctctgtggccaggtgacctggctgccttccactccttgtacctcagtctaaacatggagtggccgctgacaagg

SEQ ID NO: 197153 - DNA, 3996 bp, Homo sapiens
  Payload ID: 18877
  Gene Name: ubiquitin specific peptidase 1
  Uniprot ID: O94782
  ENST ID: ENST00000339950
  CDS Start-End: 816-3173
gtggcccatcccgtctgctctctgtcccgtctcccgacccgtacgcttttccctcaactcgcgcgcacgaatggttaaaaaaagggtgtgaggctcgagcccgccagccaggccgctagcacctcgcgcgcgccctcagcgaggacccgcacgagctgcccggctctgtgcctgcgttgtttgaaactgtggaacccgttaggcttttggggaactacagtcccagctggctccggagcccgtgcgtgccaggggcgagtggccgtcgcgagacggctcctgcctttcgtgtctctgcagcgtggagactggaaccggcaatttcaaaggacgccacgttcaatcgcagcgctggcgcgggcggaggctaaaacacgggggtcctgagactgaggaaaacgcgccaagttcccctcggtggcggagtgctaaagaccctagcggttcaggcgttcggcgagcggggccgctgcttgttgcgctcctggctctcccggggcgggcgcagatgggcgccgctcccgggatgtagttggtgttggtgcaagacgggagcgagcggcggtcggggttcccgctcttgggagcggatggtcactcccccgcggggagggcgagccgaccagattttcctggggccggggacccggcgggctcggggcagggactcacctgtcgcacccacactcattcgggttggacttgccggcgtcaccgccgcggacttcgctttgggccatgaccagatataattggtgattacaactttcctctataaattaactcttgacactccttgggatttgaagaaaaaaatgcctggtgtcatacctagtgaaagtaatggactttcaagaggtagcccttcaaagaaaaacagactttccttaaagttttttcagaaaaaggaaactaagagagctttggatttcacagattctcaagaaaatgaagaaaaagcttctgaatatagagcatctgaaattgatcaagttgttcctgcagcacagtcttcacctataaactgtgagaagagagaaaacttgttaccatttgtgggactgaataatctcggcaatacttgctatcttaatagtatacttcaggtattatatttttgtcccggttttaaatctggagtaaagcacttatttaatattatttcaaggaagaaagaagctctaaaggatgaagccaatcaaaaagacaagggaaattgcaaagaagattctttggcaagttatgaattgatatgcagtttacagtccttaatcatttcggttgaacagctccaggctagttttctcttaaatccagagaaatatactgatgaacttgccactcagccaaggcgactgcttaacacactgagggaactcaaccctatgtatgaaggatatctacagcatgatgcacaggaagtattacaatgtattttgggaaacattcaagaaacatgccaactcctaaaaaaagaagaagtaaaaaatgtggcagaattacctactaaggtagaagaaatacctcatccgaaagaggaaatgaatggtattaacagcatagagatggacagtatgaggcattctgaagactttaaagagaaactcccaaaaggaaatgggaaaagaaaaagtgacactgaatttggtaacatgaagaaaaaagttaaattatccaaggaacaccagtcattggaagagaaccagagacaaactagatcaaaaagaaaagctacaagtgatacattagagagtcctcctaaaataattcccaagtatatttctgaaaatgagagtccaagaccctcacaaaagaaatcaagagttaaaataaattggttaaagtctgcaactaagcaacccagcattctttctaaattttgtagtctgggaaaaataacaacaaaccaaggagtcaaaggacaatctaaagaaaatgaatgtgatcctgaagaggacttggggaagtgtgaaagtgataacacaactaatggttgtggacttgaatctccaggaaatactgttacacctgtaaatgttaatgaagttaaacccataaacaaaggtgaagaacaaattggttttgagctagtggagaaattatttcaaggtcagctggtattaaggacgcgttgcttggaatgtgaaagtttaacagaaagaagagaagattttcaagacatcagtgtgccagtacaagaagatgagctttccaaagtagaggagagttctgaaatttctccagagccaaaaacagaaatgaagaccctgagatgggcaatttcacaatttgcttcagtagaaaggattgtaggagaagataaatatttctgtgaaaactgccatcattatactgaagctgaacgaagtcttttgtttgacaaaatgcctgaagttataactattcatttgaagtgctttgctgctagtggtttggagtttgattgttatggtggtggactttccaagatcaacactcctttattgacacctcttaaattgtcactagaagaatggagcacaaagccaactaacgacagctatggattatttgcggttgtgatgcatagtggcattacaattagtagtgggcattacactgcttctgttaaagtcactgaccttaacagtttagaactagataaaggaaattttgtggttgaccaaatgtgtgaaataggtaagccagaaccattgaatgaggaggaagcaaggggtgtggttgagaattataatgatgaagaagtgtcaattagagttggtggaaatacacagccaagtaaagttttgaacaaaaaaaatgtagaagctattggacttcttggaggacaaaagagcaaagcagattatgagctatacaacaaagcctctaatcctgataaggttgctagtacagcgtttgctgaaaatagaaattctgagactagtgatactactgggacccatgaatctgatagaaacaaggaatccagtgaccaaacaggcattaatattagtggatttgagaacaaaatttcatacgtagtgcaaagcttaaaggagtatgaggggaagtggttgctttttgatgattctgaagtcaaagttactgaagagaaggactttctgaattctctttccccttctacatctcctacttctactccttacttgctattttataagaaattatagagtgagtgtattttccttgtgtatatattaaacacacccatacaaacattggtaaagttgattacatcaaagaatctttagcttatcttttgaagctactggatattattggtctctctaggtttttatataaatagtgaaatttgaattactgaaaaccatgttaatttttagaactcattttcctcagtagagactagtgatgcattagcttctgggaacaaacttgtatcggttcttaattaaattatccaaaacggaggcatttaaacacttggatttacaccagtcttttgtgtttgctttttaaaataaagtgctcgtatttgtattctccatattttggagtaattatctacatgatgtttatagttcctgtggtttttcacccaagaagcagaatctcattcagtacatttagttttataagagtcatgaagctaaatccttgggctatgtcagaggcacaaagtctagaatgtgtgtattcacaatggtgtatgtacattttgtgccttgattcacttagaagtgtctcagaaaacctggacagttcgcttctacacaagaattttatatgtatttatgaagatgattctgtaccctagtatatctttttgggcatggactaatttgtatctgtttaactcatattctgcacgatctgtatatagtacatcaaacttagaggtgtgaccttaaatttaactttttttaaaaactgggaggtcaataaaatttaaactgcttaactatgtatatgaatatttgaattttttacttgtatatttttataaatacagctgagttttcttaaagcgaa

SEQ ID NO: 197154 - DNA, 3507 bp, Homo sapiens
  Payload ID: 18877
  Gene Name: ubiquitin specific peptidase 1
  Uniprot ID: O94782
  ENST ID: ENST00000371146
  CDS Start-End: 329-2686
ggggcttaccgcgagggcctcgctccggaagccgcaccctccgcggcgtcccaccgtcgaggattaacaaaacgccaaacaagattttaacagtcggcagcgaaagcgcgcactcgagcgccaatgagagcggaaggaggggcaccgcgcctgaggaacactccgtatgtcgaacaatgattggctggagcccacctttcttcttttttgctattagatgggcttgctgctcccgcccatctaattggctttggtctagatataattggtgattacaactttcctctataaattaactcttgacactccttgggatttgaagaaaaaaatgcctggtgtcatacctagtgaaagtaatggactttcaagaggtagcccttcaaagaaaaacagactttccttaaagttttttcagaaaaaggaaactaagagagctttggatttcacagattctcaagaaaatgaagaaaaagcttctgaatatagagcatctgaaattgatcaagttgttcctgcagcacagtcttcacctataaactgtgagaagagagaaaacttgttaccatttgtgggactgaataatctcggcaatacttgctatcttaatagtatacttcaggtattatatttttgtcccggttttaaatctggagtaaagcacttatttaatattatttcaaggaagaaagaagctctaaaggatgaagccaatcaaaaagacaagggaaattgcaaagaagattctttggcaagttatgaattgatatgcagtttacagtccttaatcatttcggttgaacagctccaggctagttttctcttaaatccagagaaatatactgatgaacttgccactcagccaaggcgactgcttaacacactgagggaactcaaccctatgtatgaaggatatctacagcatgatgcacaggaagtattacaatgtattttgggaaacattcaagaaacatgccaactcctaaaaaaagaagaagtaaaaaatgtggcagaattacctactaaggtagaagaaatacctcatccgaaagaggaaatgaatggtattaacagcatagagatggacagtatgaggcattctgaagactttaaagagaaactcccaaaaggaaatgggaaaagaaaaagtgacactgaatttggtaacatgaagaaaaaagttaaattatccaaggaacaccagtcattggaagagaaccagagacaaactagatcaaaaagaaaagctacaagtgatacattagagagtcctcctaaaataattcccaagtatatttctgaaaatgagagtccaagaccctcacaaaagaaatcaagagttaaaataaattggttaaagtctgcaactaagcaacccagcattctttctaaattttgtagtctgggaaaaataacaacaaaccaaggagtcaaaggacaatctaaagaaaatgaatgtgatcctgaagaggacttggggaagtgtgaaagtgataacacaactaatggttgtggacttgaatctccaggaaatactgttacacctgtaaatgttaatgaagttaaacccataaacaaaggtgaagaacaaattggttttgagctagtggagaaattatttcaaggtcagctggtattaaggacgcgttgcttggaatgtgaaagtttaacagaaagaagagaagattttcaagacatcagtgtgccagtacaagaagatgagctttccaaagtagaggagagttctgaaatttctccagagccaaaaacagaaatgaagaccctgagatgggcaatttcacaatttgcttcagtagaaaggattgtaggagaagataaatatttctgtgaaaactgccatcattatactgaagctgaacgaagtcttttgtttgacaaaatgcctgaagttataactattcatttgaagtgctttgctgctagtggtttggagtttgattgttatggtggtggactttccaagatcaacactcctttattgacacctcttaaattgtcactagaagaatggagcacaaagccaactaacgacagctatggattatttgcggttgtgatgcatagtggcattacaattagtagtgggcattacactgcttctgttaaagtcactgaccttaacagtttagaactagataaaggaaattttgtggttgaccaaatgtgtgaaataggtaagccagaaccattgaatgaggaggaagcaaggggtgtggttgagaattataatgatgaagaagtgtcaattagagttggtggaaatacacagccaagtaaagttttgaacaaaaaaaatgtagaagctattggacttcttggaggacaaaagagcaaagcagattatgagctatacaacaaagcctctaatcctgataaggttgctagtacagcgtttgctgaaaatagaaattctgagactagtgatactactgggacccatgaatctgatagaaacaaggaatccagtgaccaaacaggcattaatattagtggatttgagaacaaaatttcatacgtagtgcaaagcttaaaggagtatgaggggaagtggttgctttttgatgattctgaagtcaaagttactgaagagaaggactttctgaattctctttccccttctacatctcctacttctactccttacttgctattttataagaaattatagagtgagtgtattttccttgtgtatatattaaacacacccatacaaacattggtaaagttgattacatcaaagaatctttagcttatcttttgaagctactggatattattggtctctctaggtttttatataaatagtgaaatttgaattactgaaaaccatgttaatttttagaactcattttcctcagtagagactagtgatgcattagcttctgggaacaaacttgtatcggttcttaattaaattatccaaaacggaggcatttaaacacttggatttacaccagtcttttgtgtttgctttttaaaataaagtgctcgtatttgtattctccatattttggagtaattatctacatgatgtttatagttcctgtggtttttcacccaagaagcagaatctcattcagtacatttagttttataagagtcatgaagctaaatccttgggctatgtcagaggcacaaagtctagaatgtgtgtattcacaatggtgtatgtacattttgtgccttgattcacttagaagtgtctcagaaaacctggacagttcgcttctacacaagaattttatatgtatttatgaagatgattctgtaccctagtatatctttttgggcatggactaatttgtatctgtttaactcatattctgcacgatctgtatatagtacatcaaacttagaggtgtgaccttaaatttaactttttttaaaaactgggaggtcaataaaatttaaactgcttaactatgtatatgaatatttgaattttttacttgtatatttttataaatacagctgagttttcttaaagcg

SEQ ID NO: 197155 - DNA, 502 bp, Homo sapiens
  Payload ID: 18877
  Gene Name: ubiquitin specific peptidase 1
  ENST ID: ENST00000442679
  CDS Start-End: 240-502
ggaggcggggcttaccgcgagggcctcgctccggaagccgcaccctccgcggcgtcccaccgtcgaggattaacaaaacgccaaacaagattttaacagtcggcagcgaaagcgcgcactcgagcgccaatgagagcggaaggaggggcaccgcgcctgaggaacactccatataattggtgattacaactttcctctataaattaactcttgacactccttgggatttgaagaaaaaaatgcctggtgtcatacctagtgaaagtaatggactttcaagaggtagcccttcaaagaaaaacagactttccttaaagttttttcagaaaaaggaaactaagagagctttggatttcacagattctcaagaaaatgaagaaaaagcttctgaatatagagcatctgaaattgatcaagttgttcctgcagcacagtcttcacctataaactgtgagaagagagaaaacttgttaccatttgtgggactgaataatctcggcaa

SEQ ID NO: 197156 - DNA, 893 bp, Homo sapiens
  Payload ID: 18877
  Gene Name: ubiquitin specific peptidase 1
  ENST ID: ENST00000452143
  CDS Start-End: 336-893
cggaggcggggcttaccgcgagggcctcgctccggaagccgcaccctccgcggcgtcccaccgtcgaggattaacaaaacgccaaacaagattttaacagtcggcagcgaaagcgcgcactcgagcgccaatgagagcggaaggaggggcaccgcgcctgaggaacactccgtatgtcgaacaatgattggctggagcccacctttcttcttttttgctattagatgggcttgctgctcccgcccatctaattggctttggtctagatataattggtgattacaactttcctctataaattaactcttgacactccttgggatttgaagaaaaaaatgcctggtgtcatacctagtgaaagtaatggactttcaagaggtagcccttcaaagaaaaacagactttccttaaagttttttcagaaaaaggaaactaagagagctttggatttcacagattctcaagaaaatgaagaaaaagcttctgaatatagagcatctgaaattgatcaagttgttcctgcagcacagtcttcacctataaactgtgagaagagagaaaacttgttaccatttgtgggactgaataatctcggcaatacttgctatcttaatagtatacttcaggtattatatttttgtcccggttttaaatctggagtaaagcacttatttaatattatttcaaggaagaaagaagctctaaaggatgaagccaatcaaaaagacaagggaaattgcaaagaagattctttggcaagttatgaattgatatgcagtttacagtccttaatcatttcggttgaacagctccaggctagttttctcttaaatccagagaaatatactgatgaacttgccactcagccaaggcgactgcttaacacactgagg

SEQ ID NO: 197157 - DNA, 3009 bp, Homo sapiens
  Payload ID: 18878
  Gene Name: ubiquitin specific peptidase 10
  Uniprot ID: Q14694
  ENST ID: ENST00000219473
  CDS Start-End: 114-2510
gcgcaggcgcggcggccgatgcgagtgtgtatgtgcgggcgagaagatggcggcggcgggggaagcagcgtgagcagccggaggatcgcggagtcccaatgaaacgggcagccatggccctccacagcccgcagtatatttttggagattttagccctgatgaattcaatcaattctttgtgactcctcgatcttcagttgagcttcctccatacagtggaacagttctgtgtggcacacaggctgtggataaactacctgatggacaagaatatcagagaattgagtttggtgtcgatgaagtcattgaacccagtgacactttgccgagaacccccagctacagtatttcaagcacactgaaccctcaggcccctgaatttattctcggttgtacagcttccaaaataacccctgatggtatcactaaagaagcaagctatggctccatcgactgccagtacccaggctctgccctcgctttggatggaagttctaatgtggaggcggaagttttggaaaatgatggtgtctcaggtggtcttggacaaagggagcgtaaaaagaagaaaaagcggccacctggatattacagctatttgaaagatggtggcgatgatagtatctccacagaagccctggtcaatggccatgccaattcagcagtcccgaacagtgtcagtgcagaggatgcagaatttatgggtgacatgcccccgtcagttacgcccaggacttgtaacagcccccagaactccacagactctgtcagtgacattgtgcctgacagtcctttccccggagcactcggcagtgacaccaggactgcagggcagccagaggggggccccggggctgattttggtcagtcctgcttccctgcagaggctggcagagacaccctgtcaaggacagctggggctcagccctgcgttggtaccgatactactgaaaaccttggagttgctaatggacaaatacttgaatcctcgggtgagggcacagctaccaacggggtggagttgcacaccacggaaagcatagacttggacccaaccaaacccgagagtgcatcacctcctgctgacggcacgggctctgcatcaggcacccttcctgtcagccagcccaagtcctgggccagcctctttcatgattctaagccctcttcctcctcgccggtggcctatgtggaaactaagtattcccctcccgccatatctcccctggtttctgaaaagcaggttgaagtcaaagaagggcttgttccggtttcagaggatcctgtagccataaagattgcagagttgctggagaatgtaaccctaatccataaaccagtgtcgttgcaaccccgtgggctgatcaataaagggaactggtgctacattaatgctacactgcaggcattggttgcttgcccgccgatgtaccacctgatgaagttcattcctctgtattccaaagtgcaaaggccttgtacgtcaacacccatgatagacagctttgttcggctaatgaatgagttcactaatatgccagtacctccaaaaccccgacaagctcttggagataaaatcgtgagggatattcgccctggagctgcctttgagcccacatatatttacagactcctgacagttaacaagtcaagcctgtctgaaaagggtcgacaagaagatgctgaggaatacttaggcttcattctaaatggacttcatgaggaaatgttgaacctaaagaagcttctctcaccaagtaatgaaaaacttacgatttccaacggccccaaaaaccactcggtcaatgaagaagagcaggaagaacaaggtgaaggaagcgaggatgaatgggaacaagtgggcccccggaacaagacttccgtcacccgccaggcggattttgttcagactccaatcaccggcatttttggtggacacatcaggtctgtggtttaccagcagagttcaaaagaatctgccactttgcagccatttttcacgttgcagttggatatccagtcagacaagatacgcacagtccaggatgcactggagagcttggtggcaagagaatctgtccaaggttataccacaaaaaccaaacaagaggttgagataagtcgaagagtgactctggaaaaactccctcctgtcctcgtgctgcacctgaaacgattcgtttatgagaagactggtgggtgccagaagcttatcaaaaatattgaatatcctgtggacttggaaattagtaaagaactgctttctccaggggttaaaaataagaattttaaatgccaccgaacctatcggctctttgcagtggtctaccatcacggcaacagtgcgacgggcggccattacactacagacgtcttccagatcggtctgaatggctggctgcgcatcgatgaccagacagtcaaggtgatcaaccagtaccaggtggtgaaaccaactgctgaacgcacagcctacctcctgtattaccgccgagtggacctgctgtaaaccctgtgtgcgctgtgtgtgcgcccagtgcccgcttcgtaggacaccacctcacactcacttcccgcctctctttagtggctctttagagagaaactctttctccctttgcaaaaatgggctagaatgaaaaggagatgccttggggttcgtgcacaacacagcttctgttgactctaacttccaaatcaaaatcatttggttgaaacagactgttgcttgattttagaaaatacacaaaaacccatatttctgaaataatgctgattcctgagataagaaagtggatttgatccccagtctcattgcttagtagaataaatcctgcaccagcaacaacacttgtaaatttgtgaaaatgaattttatctttccttaaaaaagaaattttttaatccatcacacttttcttccctaccctttagtttttgataaatgataaaaatgagccagttatcaaagaagaactagttcttacttcaaaagaaaaataaacata

SEQ ID NO: 197158 - DNA, 3070 bp, Homo sapiens
  Payload ID: 18878
  Gene Name: ubiquitin specific peptidase 10
  ENST ID: ENST00000540269
  CDS Start-End: 97-285
gatgcgagtgtgtatgtgcgggcgagaagatggcggcggcgggggaagcagcgtgagcagccggaggatcgcggagtcccaatgaaacgggcagccatggccctccacagcccgcagtatatttttggagattttagccctgatgaattcaatcaattctttgtgactcctcgatcttcagttgaggacaagaatatcagagaattgagtttggtgtcgatgaagtcattgaacccagtgacactttgccgagaacccccagctacagtatttcaagcacactgaaccctcaggcccctgaatttattctcggttgtacagcttccaaaataacccctgatggtatcactaaagaagcaagctatggctccatcgactgccagtacccaggctctgccctcgctttggatggaagttctaatgtggaggcggaagttttggaaaatgatggtgtctcaggtggtcttggacaaagggagcgtaaaaagaagaaaaagcggccacctggatattacagctatttgaaagatggtggcgatgatagtatctccacagaagccctggtcaatggccatgccaattcagcagtcccgaacagtgtcagtgcagaggatgcagaatttatgggtgacatgcccccgtcagttacgcccaggacttgtaacagcccccagaactccacagactctgtcagtgacattgtgcctgacagtcctttccccggagcactcggcagtgacaccaggactgcagggcagccagaggggggccccggggctgattttggtcagtcctgcttccctgcagaggctggcagagacaccctgtcaaggacagctggggctcagccctgcgttggtaccgatactactgaaaaccttggagttgctaatggacaaatacttgaatcctcgggtgagggcacagctaccaacggggtggagttgcacaccacggaaagcatagacttggacccaaccaaacccgagagtgcatcacctcctgctgacggcacgggctctgcatcaggcacccttcctgtcagccagcccaagtcctgggccagcctctttcatgattctaagccctcttcctcctcgccggtggcctatgtggaaactaagtattcccctcccgccatatctcccctggtttctgaaaagcaggttgaagtcaaagaagggcttgttccggtttcagaggatcctgtagccataaagattgcagtgttcggctaatgaatgagttcactaatatgccagtacctccaaaaccccgacaagctcttggagataaaatcgtgagggatattcgccctggagctgcctttgagcccacatatatttacagactcctgacagttaacaagtcaagcctgtctgaaaagggtcgacaagaagatgctgaggaatacttaggcttcattctaaatggacttcatgaggaaatgttgaacctaaagaagcttctctcaccaagtaatgaaaaacttacgatttccaacggccccaaaaaccactcggtcaatgaagaagagcaggaagaacaaggtgaaggaagcgaggatgaatgggaacaagtgggcccccggaacaagacttccgtcacccgccaggcggattttgttcagactccaatcaccggcatttttggtggacacatcaggtctgtggtttaccagcagagttcaaaagaatctgccactttgcagccatttttcacgttgcagttggatatccagtcagacaagatacgcacagtccaggatgcactggagagcttggtggcaagagaatctgtccaaggttataccacaaaaaccaaacaagaggttgagataagtcgaagagtgactctggaaaaactccctcctgtcctcgtgctgcacctgaaacgattcgtttatgagaagactggtgggtgccagaagcttatcaaaaatattgaatatcctgtggacttggaaattagtaaagaactgctttctccaggggttaaaaataagaattttaaatgccaccgaacctatcggctctttgcagtggtctaccatcacggcaacagtgcgacgggcggccattacactacagacgtcttccagatcggtctgaatggctggctgcgcatcgatgaccagacagtcaaggtgatcaaccagtaccaggtggtgaaaccaactgctgaacgcacagcctacctcctgtattaccgccgagtggacctgctgtaaaccctgtgtgcgctgtgtgtgcgcccagtgcccgcttcgtaggacaccacctcacactcacttcccgcctctctttagtggctctttagagagaaactctttctccctttgcaaaaatgggctagaatgaaaaggagatgccttggggttcgtgcacaacacagcttctgttgactctaacttccaaatcaaaatcatttggttgaaacagactgttgcttgattttagaaaatacacaaaaacccatatttctgaaataatgctgattcctgagataagaaagtggatttgatccccagtctcattgcttagtagaataaatcctgcaccagcaacaacacttgtaaatttgtgaaaatgaattttatctttccttaaaaaagaaattttttaatccatcacacttttcttccctaccctttagtttttgataaatgataaaaatgagccagttatcaaagaagaactagttcttacttcaaaagaaaaataaacataaaaaataagttgctggttcctaacaggaaaaattttaataattgtactgagagaaactgcttacgtacacattgcagatcaaatatttggagttaaaatgttagtctacatagatgggtgattgtaactttattgccattaaaagatttcaaattgcattcatgcttctgtgtacacataatgaaaaatgggcaaataatgaagatctctccttcagtctgctctgtttaattctgctgtctgctcttctctaatgctgcgtccctaattgtacacagtttagtgatatctaggagtataaagttgtcgcccatcaataaaaatcacaaagttggtttaaa

SEQ ID NO: 197159 - DNA, 502 bp, Homo sapiens
  Payload ID: 18878
  Gene Name: ubiquitin specific peptidase 10
  ENST ID: ENST00000570053
  CDS Start-End: 52-502
aagcagcgtgagcagccggaggatcgcggagtcccaatgaaacgggcagccatggccctccacagcccgcagtatatttttggagattttagccctgatgaattcaatcaattctttgtgactcctcgatcttcagttgagggtcgacaagaagatgctgaggaatacttaggcttcattctaaatggacttcatgaggaaatgttgaacctaaagaagcttctctcaccaagtaatgaaaaacttacgatttccaacggccccaaaaaccactcggtcaatgaagaagagcaggaagaacaaggtgaaggaagcgaggatgaatgggaacaagtgggcccccggaacaagacttccgtcacccgccaggcggattttgttcagactccaatcaccggcatttttggtggacacatcaggtctgtggtttaccagcagagttcaaaagaatctgccactttgcagccatttttcacgttgcagttggatatccagtcagaca

SEQ ID NO: 197160 - DNA, 1315 bp, Homo sapiens
  Payload ID: 18878
  Gene Name: ubiquitin specific peptidase 10
  ENST ID: ENST00000563048
  CDS Start-End: 88-195
gtgtatgtgcgggcgagaagatggcggcggcgggggaagcagcgtgagcagccggaggatcgcggagtcccaatgaaacgggcagccatggccctccacagcccgcagtatatttttggagattttagccctgatgaattcaatcaattctttgtgactcctcgatcttcagttgagagttgctggagaatgtaaccctaatccataaaccagtgtcgttgcaaccccgtgggctgatcaataaagggaactggtgctacattaatgctacactgcaggcattggttgcttgcccgccgatgtaccacctgatgaagttcattcctctgtattccaaagtgcaaaggccttgtacgtcaacacccatgatagacagctttgttcggctaatgaatgagttcactaatatgccagtacctccaaaaccccgacaagctcttggagataaaatcgtgagggatattcgccctggagctgcctttgagcccacatatatttacagactcctgacagttaacaagtcaagcctgtctgaaaagggtcgacaagaagatgctgaggaatacttaggcttcattctaaatggacttcatgaggaaatgttgaacctaaagaagcttctctcaccaagtaatgaaaaacttacgatttccaacggccccaaaaaccactcggtcaatgaagaagagcaggaagaacaaggtgaaggaagcgaggatgaatgggaacaagtgggcccccggaacaagacttccgtcacccgccaggcggattttgttcagactccaatcaccggcatttttggtggacacatcaggtctgtggtttaccagcagagttcaaaagaatctgccactttgcagccatttttcacgttgcagttggatatccagtcagacaagatacgcacagtccaggatgcactggagagcttggtggcaagagaatctgtccaaggttataccacaaaaaccaaacaagaggttgagataagtcgaagagtgactctggaaaaactccctcctgtcctcgtgctgcacctgaaacgattcgtttatgagaagactggtgggtgccagaagcttatcaaaaatattgaatatcctgtggacttggaaattagtaaagaactgctttctccaggggttaaaaataagaattttaaatgccaccgaacctatcggctctttgcagtggtctaccatcacggcaacagtgcgacgggcggccattacactacagacgtcttccagatcggtctgaatggctggctgcgcatcgatgaccagacagtcaaggtgatcaaccagtacca

SEQ ID NO: 197161 - DNA, 590 bp, Homo sapiens
  Payload ID: 18878
  Gene Name: ubiquitin specific peptidase 10
  ENST ID: ENST00000563386
  CDS Start-End: 84-275
atgtgcgggcgagaagatggcggcggcgggggaagcagcgtgagcagccggaggatcgcggagtcccaatgaaacgggcagccatggccctccacagcccgcagatggagtctggctctgtcgccccggctggggtgcggtggcgcgatctcagctcactgcaacctcggcctccctggttcaagcaattctcctggctcagcctcccgagcagccgggactacagtatatttttggagattttagccctgatgaattcaatcaattctttgtgactcctcgatcttcagttgagcttcctccatacagtggaacagttctgtgtggcacacaggctgtggataaactacctgatggacaagaatatcagagaattgagtttggtgtcgatgaagtcattgaacccagtgacactttgccgagaacccccagctacagtatttcaagcacactgaaccctcaggcccctgaatttattctcggttgtacagcttccaaaataacccctgatggtatcactaaagaagcaagctatggctccatcgactgccagtacccaggctctgccctcgctttggatggaagttcta

SEQ ID NO: 197162 - DNA, 572 bp, Homo sapiens
  Payload ID: 18878
  Gene Name: ubiquitin specific peptidase 10
  ENST ID: ENST00000569925
  CDS Start-End: 1-229
ccagtcagacaagatacgcacagtccaggatgcactggagagcttggtggcaagagaatctgtccaaggttataccacaaaaaccaaacaagagaactgctttctccaggggttaaaaataagaattttaaatgccaccgaacctatcggctctttgcagtggtctaccatcacggcaacagtgcgacgggcggccattacactacagacgtcttccagatcggtctgaatggctggctgcgcatcgatgaccagacagtcaaggtgatcaaccagtaccaggtggtgaaaccaactgctgaacgcacagcctacctcctgtattaccgccgagtggacctgctgtaaaccctgtgtgcgctgtgtgtgcgcccagtgcccgcttcgtaggacaccacctcacactcacttcccgcctctctttagtggctctttagagagaaactctttctccctttgcaaaaatgggctagaatgaaaaggagatgccttggggttcgtgcacaacacagcttctgttgactctaacttccaaatcaaaatcatttggttgaaacagactgttgcttgat

SEQ ID NO: 197163 - DNA, 569 bp, Homo sapiens
  Payload ID: 18878
  Gene Name: ubiquitin specific peptidase 10
  ENST ID: ENST00000562283
  CDS Start-End: 146-569
gtgtatgtgcgggcgagaagatggcggcggcgggggaagcagcgtgagcagccggaggatcgcggagtcccaatgaaacgggcagccatggccctccacagcccgcagtatgtttggcagagaaagcggaaatggaggtagtggcatgagtcagcagaaagattttagccctgatgaattcaatcaattctttgtgactcctcgatcttcagttgagcttcctccatacagtggaacagttctgtgtggcacacaggctgtggataaactacctgatggacaagaatatcagagaattgagtttggtgtcgatgaagtcattgaacccagtgacactttgccgagaacccccagctacagtatttcaagcacactgaaccctcaggcccctgaatttattctcggttgtacagcttccaaaataacccctgatggtatcactaaagaagcaagctatggctccatcgactgccagtacccaggctctgccctcgctttggatggaagttctaatgtggaggcggaagttttggaaaatgatggtgtctcaggtggtcttggacaaaggg

SEQ ID NO: 197164 - DNA, 330 bp, Homo sapiens
  Payload ID: 18878
  Gene Name: ubiquitin specific peptidase 10
  ENST ID: ENST00000567526
  CDS Start-End: 1-330
agtcagacaagatacgcacagtccaggatgcactggagagcttggtggcaagagaatctgtccaaggttataccacaaaaaccaaacaagaggttgagataagtcgaagagtgactctggaaaaactccctcctgtcctcgtgctgcacctgaaacgattcgtttatgagaagactggtgggtgccagaagcttatcaaaaatattgaatatcctgtggacttggaaattagtaaagtggtctaccatcacggcaacagtgcgacgggcggccattacactacagacgtcttccagatcggtctgaatggctggctgcgcatcgatgacc

SEQ ID NO: 197165 - DNA, 2717 bp, Homo sapiens
  Payload ID: 18878
  Gene Name: ubiquitin specific peptidase 10
  Uniprot ID: Q14694
  ENST ID: ENST00000570191
  CDS Start-End: 197-2605
gtgtatgtgcgggcgagaagatggcggcggcgggggaagcagcgtgagcagccggaggatcgcggagtcccaatgaaacgggcagccatggccctccacagcccgcagctcctgggccatgatcccattttcatcagatgacttgagaacccagaagctctaccagcactgccattctgtcccgtcttgaaacatcatgccctggttgccctctcctggaatagggcagtatatttttggagattttagccctgatgaattcaatcaattctttgtgactcctcgatcttcagttgagcttcctccatacagtggaacagttctgtgtggcacacaggctgtggataaactacctgatggacaagaatatcagagaattgagtttggtgtcgatgaagtcattgaacccagtgacactttgccgagaacccccagctacagtatttcaagcacactgaaccctcaggcccctgaatttattctcggttgtacagcttccaaaataacccctgatggtatcactaaagaagcaagctatggctccatcgactgccagtacccaggctctgccctcgctttggatggaagttctaatgtggaggcggaagttttggaaaatgatggtgtctcaggtggtcttggacaaagggagcgtaaaaagaagaaaaagcggccacctggatattacagctatttgaaagatggtggcgatgatagtatctccacagaagccctggtcaatggccatgccaattcagcagtcccgaacagtgtcagtgcagaggatgcagaatttatgggtgacatgcccccgtcagttacgcccaggacttgtaacagcccccagaactccacagactctgtcagtgacattgtgcctgacagtcctttccccggagcactcggcagtgacaccaggactgcagggcagccagaggggggccccggggctgattttggtcagtcctgcttccctgcagaggctggcagagacaccctgtcaaggacagctggggctcagccctgcgttggtaccgatactactgaaaaccttggagttgctaatggacaaatacttgaatcctcgggtgagggcacagctaccaacggggtggagttgcacaccacggaaagcatagacttggacccaaccaaacccgagagtgcatcacctcctgctgacggcacgggctctgcatcaggcacccttcctgtcagccagcccaagtcctgggccagcctctttcatgattctaagccctcttcctcctcgccggtggcctatgtggaaactaagtattcccctcccgccatatctcccctggtttctgaaaagcaggttgaagtcaaagaagggcttgttccggtttcagaggatcctgtagccataaagattgcagagttgctggagaatgtaaccctaatccataaaccagtgtcgttgcaaccccgtgggctgatcaataaagggaactggtgctacattaatgctacactgcaggcattggttgcttgcccgccgatgtaccacctgatgaagttcattcctctgtattccaaagtgcaaaggccttgtacgtcaacacccatgatagacagctttgttcggctaatgaatgagttcactaatatgccagtacctccaaaaccccgacaagctcttggagataaaatcgtgagggatattcgccctggagctgcctttgagcccacatatatttacagactcctgacagttaacaagtcaagcctgtctgaaaagggtcgacaagaagatgctgaggaatacttaggcttcattctaaatggacttcatgaggaaatgttgaacctaaagaagcttctctcaccaagtaatgaaaaacttacgatttccaacggccccaaaaaccactcggtcaatgaagaagagcaggaagaacaaggtgaaggaagcgaggatgaatgggaacaagtgggcccccggaacaagacttccgtcacccgccaggcggattttgttcagactccaatcaccggcatttttggtggacacatcaggtctgtggtttaccagcagagttcaaaagaatctgccactttgcagccatttttcacgttgcagttggatatccagtcagacaagatacgcacagtccaggatgcactggagagcttggtggcaagagaatctgtccaaggttataccacaaaaaccaaacaagaggttgagataagtcgaagagtgactctggaaaaactccctcctgtcctcgtgctgcacctgaaacgattcgtttatgagaagactggtgggtgccagaagcttatcaaaaatattgaatatcctgtggacttggaaattagtaaagaactgctttctccaggggttaaaaataagaattttaaatgccaccgaacctatcggctctttgcagtggtctaccatcacggcaacagtgcgacgggcggccattacactacagacgtcttccagatcggtctgaatggctggctgcgcatcgatgaccagacagtcaaggtgatcaaccagtaccaggtggtgaaaccaactgctgaacgcacagcctacctcctgtattaccgccgagtggacctgctgtaaaccctgtgtgcgctgtgtgtgcgcccagtgcccgcttcgtaggacaccacctcacactcacttcccgcctctctttagtggctctttagagagaaactctttctccctttgc

SEQ ID NO: 197166 - DNA, 570 bp, Homo sapiens
  Payload ID: 18878
  Gene Name: ubiquitin specific peptidase 10
  ENST ID: ENST00000563892
  CDS Start-End: 97-570
gatgcgagtgtgtatgtgcgggcgagaagatggcggcggcgggggaagcagcgtgagcagccggaggatcgcggagtcccaatgaaacgggcagccatggccctccacagcccgcagtatatttttggagattttagccctgatgaattcaatcaattctttgtgactcctcgatcttcagttgagcttcctccatacagtggaacagttctgtgtggcacacaggctgtggataaactacctgatgagttgctggagaatgtaaccctaatccataaaccagtgtcgttgcaaccccgtgggctgatcaataaagggaactggtgctacattaatgctacactgcaggcattggttgcttgcccgccgatgtaccacctgatgaagttcattcctctgtattccaaagtgcaaaggccttgtacgtcaacacccatgatagacagctttgttcggctaatgaatgagttcactaatatgccagtacctccaaaaccccgacaagctcttggagataaaatcgtgagggatattcgccctggagctgcctttgagcccacatatatttac

SEQ ID NO: 197167 - DNA, 730 bp, Homo sapiens
  Payload ID: 18878
  Gene Name: ubiquitin specific peptidase 10
  ENST ID: ENST00000569038
  CDS Start-End: 107-730
ggcggcgggggaagcagcgtgagcagccggaggatcgcggagtcccaatgaaacgggcagccatggccctccacagcccgcagtatgtttggcagagaaagcggaaatggaggttgaagtcaaagaagggcttgttccggtttcagaggatcctgtagccataaagattgcagagttgctggagaatgtaaccctaatccataaaccagtgtcgttgcaaccccgtgggctgatcaataaagggaactggtgctacattaatgctacactgcaggcattggttgcttgcccgccgatgtaccacctgatgaagttcattcctctgtattccaaagtgcaaaggccttgtacgtcaacacccatgatagacagctttgttcggctaatgaatgagttcactaatatgccagtacctccaaaaccccgacaagctcttggagataaaatcgtgagggatattcgccctggagctgcctttgagcccacatatatttacagactcctgacagttaacaagtcaagcctgtctgaaaagggtcgacaagaagatgctgaggaatacttaggcttcattctaaatggacttcatgaggaaatgttgaacctaaagaagcttctctcaccaagtaatgaaaaacttacgatttccaacggccccaaaaaccactcggtcaatgaagaagagcaggaagaacaagccatttttcacgttgcagttggatatccagtc

SEQ ID NO: 197168 - DNA, 3338 bp, Homo sapiens
  Payload ID: 18879
  Gene Name: ubiquitin specific peptidase 11
  Uniprot ID: P51784
  ENST ID: ENST00000218348
  CDS Start-End: 50-2941
ttaccccacctagcccttcgacgcgtctgtgcacggggccatttccaatatggcagtagccccgcgactgtttggggggctctgcttccgtttccgggaccagaatccggaagtggctgttgaggggcgtcttccaatctcgcacagctgcgttggctgtagaagagaacggacggcgatggcgacggtcgcagcaaatccagctgctgctgcggcggctgtggcggcggcagcggcggtgactgaggatagagagccacagcacgaggagctgccaggcctggacagccagtggcgccagatagaaaacggcgagagtgggcgagaacgtccactgcgggccggcgaaagctggttccttgtggagaagcactggtataagcagtgggaggcatacgtgcagggaggggaccaggactccagcaccttccctggctgcatcaacaatgccacactctttcaagatgagataaactggcgcctcaaggagggactggtggaaggcgaggattatgtgctgctcccagcagctgcttggcattacctggtcagctggtatggtctagagcatggccagccacccattgaacgcaaggtcatagagctgcccaacatccagaaggtcgaagtgtacccagtagaactgctgcttgtccggcacaatgatttgggcaaatctcacactgttcagttcagccataccgattctattggcctagtattgcgcacagctcgggagcggtttctggtggagccccaggaagacactcggctttgggccaagaactcagaaggctctttggataggttgtatgacacacacatcacggttctcgatgcggcccttgagactgggcagttgatcatcatggagacccgcaagaaagatggcacttggcccagcgcacagctgcatgtcatgaacaacaacatgtcggaagaggatgaggacttcaagggtcagccaggcatctgtggcctcaccaatctgggcaacacgtgcttcatgaactcggccctgcagtgcctcagcaatgtgccacagctcaccgagtacttcctcaacaactgctacctggaggagctcaacttccgcaacccactgggcatgaagggtgagatcgcagaggcctatgcagacctggtgaagcaggcgtggtctggccaccaccgctccattgtgccacatgtgttcaagaacaaggttggccattttgcatcccaatttctgggctaccagcagcatgactctcaggagctgctgtcattcctcctggacgggctgcatgaggaccttaatcgggtgaagaagaaggagtatgtggagctgtgcgatgctgctgggcgaccggatcaggaggtggcacaggaggcatggcaaaaccacaaacggcggaacgattctgtgatcgtggacactttccacggcctcttcaagtccacgctggtgtgccccgattgtggcaatgtatctgtgaccttcgaccccttctgctacctcagtgttccactgcctatcagccacaagagggtcttggaggtcttctttatccccatggatccgcgccgcaagccagagcagcaccggctcgtggtccccaagaaaggcaagatctcggatctatgtgtggctctgtccaaacacacgggcatctcgccagagaggatgatggtggctgatgtcttcagtcaccgcttctataagctctatcagctagaggagcctctgagcagcatcttggaccgtgatgatatcttcgtctatgaggtgtcaggtcgcattgaggccattgagggctcaagagaggacatcgtggttcctgtctacctgcgggagcgcacccctgcccgtgactacaacaactcctactacggcctgatgctttttggacaccccctcctggtatcagtgccccgggaccgcttcacctgggagggcctgtataacgtcctgatgtaccggctctcacgctacgtgaccaaacccaactcagatgatgaggacgatggggatgagaaagaagatgacgaggaggataaagatgacgtccctgggccctcaactgggggcagcctccgagaccctgagccagagcaggctgggcccagctctggagtcacgaacaggtgcccgttcctcctggacaattgccttggcacatctcagtggcccccaaggcgacgacgcaagcagctgttcaccctgcagacggtgaactccaatgggaccagcgaccgcacaacctcccctgaagaagtccatgcccagccgtacattgctatcgactgggagccagagatgaagaagcgttactatgacgaggtagaggctgagggctacgtgaagcatgactgcgtcgggtacgtgatgaagaaggctcccgtgcggctgcaggagtgcattgagctcttcaccactgtggagaccctggagaaggaaaacccctggtactgcccttcctgcaagcagcaccagctggcaaccaagaagctggacctgtggatgctgccggagattctcatcatccacctgaaacgcttttcctacaccaagttctcccgagagaagctggacaccctcgtggagtttcctatccgggacctggacttctctgagtttgtcatccagccacagaatgagtcgaatccggagctgtacaaatatgacctcatcgcggtttccaaccattatgggggcatgcgtgatggacactacacaacatttgcctgcaacaaggacagcggccagtggcactactttgatgacaacagcgtctcccctgtcaatgagaatcagatcgagtccaaggcagcctatgtcctcttctaccaacgccaggacgtggcgcgacgcctgctgtccccggccggctcatctggcgccccagcctcccctgcctgcagctccccacccagctctgagttcatggatgttaattgagagccctgggtcctgccacagaaaaaaaaaaaaaaaagccctctctgcaatctcgcttctcgtgtccgccccgcttctcttattcgtgttaggtgcccccgccaggcattgcaggcttagtcgtggctactgttctcctgtgccgctgcatcgctctctcccgggaaagaacaggtcgtgtctcctcctagcagtgcgcgccccgcctgtgtttgcccttccagcagtgaccctcccttctagtctttatttatggtcgtgcccttccctctcctcagcccagagtgttctgcgtgggtggtgatgggggttcacctgaacacagagtgtattttcttattgaggccctgtaccttctgctgtgtgtgtgtatatataaagcaccagtctgctcccc

SEQ ID NO: 197169 - DNA, 1077 bp, Homo sapiens
  Payload ID: 18879
  Gene Name: ubiquitin specific peptidase 11
  ENST ID: ENST00000377078
  CDS Start-End: 656-1077
gtgctctgaggccgagggacgacagtggaggggaggtggtgcctatgaggcagaaaatggcgcctgcgaataagcaaagtttatgacgcgccgtggtttttgattctggcggaagccttcccgagtcgagagaacgtgcaggttccttgtggagaagcactggtataagcagtgggaggcatacgtgcagggaggggaccaggactccagcaccttccctggctgcatcaacaatgccacactctttcaagatgagataaactggcgcctcaaggagggactggtggaaggcgaggattatgtgctgctcccagcagctgcttggcattacctggtcagctggtatggtctagagcatggccagccacccattgaacgcaaggtcatagagctgcccaacatccagaaggtcgaagtgtacccagtagaactgctgcttgtccggcacaatgatttgggcaaatctcacactgttcagttcagccataccgattctattggcctagtattgcgcacagctcgggagcggtttctggtggagccccaggaagacactcggctttgggccaagaactcagaaggctctttggataggttgtatgacacacacatcacggttctcgatgcggcccttgagactgggcagttgatcatcatggagacccgcaagaaagatggcacttggcccagcgcacagctgcatgtcatgaacaacaacatgtcggaagaggatgaggacttcaagggtcagccaggcatctgtggcctcaccaatctgggcaacacgtgcttcatgaactcggccctgcagtgcctcagcaatgtgccacagctcaccgagtacttcctcaacaactgctacctggaggagctcaacttccgcaacccactgggcatgaagggtgagatcgcagaggcctatgcagacctggtgaagcaggcgtggtctggccaccaccgctccattgtgccacatgtgttcaagaacaaggttggccattttgcatcccaatttctgggctaccagcagcatgactctcaggagctgctgtcattcctcctggacgggctgcatga

SEQ ID NO: 197170 - DNA, 804 bp, Homo sapiens
  Payload ID: 18879
  Gene Name: ubiquitin specific peptidase 11
  ENST ID: ENST00000377080
  CDS Start-End: 657-804
aacgtctggaaaaggggcggggcctgtgtggtgcagtctgacgcctgagaacaaaatggggtttgttgtgatgagaccagtttcggtcctggaggtggggccgggcctgcgtagtgaaactgcgtaggaacctgggaagaaggttccttgtggagaagcactggtataagcagtgggaggcatacgtgcagggaggggaccaggactccagcaccttccctggctgcatcaacaatgccacactctttcaagatgagataaactggcgcctcaaggagggactggtggaaggcgaggattatgtgctgctcccagcagctgcttggcattacctggtcagctggtatggtctagagcatggccagccacccattgaacgcaaggtcatagagctgcccaacatccagaaggtcgaagtgtacccagtagaactgctgcttgtccggcacaatgatttgggcaaatctcacactgttcagttcagccataccgattctattggcctagtattgcgcacagctcgggagcggtttctggtggagccccaggaagacactcggctttgggccaagaactcagaaggctctttggataggttgtatgacacacacatcacggttctcgatgcggcccttgagactgggcagttgatcatcatggagacccgcaagaaagatggcacttggcccagcgcacagctgcatgtcatgaacaacaacatgtcggaagaggatgaggacttcaagggtcagccaggcatctgtggcctcaccaatctgggcaacacgtgcttcatgaactcgg

SEQ ID NO: 197171 - DNA, 3515 bp, Homo sapiens
  Payload ID: 18879
  Gene Name: ubiquitin specific peptidase 11
  ENST ID: ENST00000377107
  CDS Start-End: 355-3117
gatggtacaatgaagggcattctgatcaggctaacaaaaacactgctcccagggtaggagtcctagcccacctcgggaacctcagcctccactttccatgccacctgtgccctaagtctacagggcgttaggaccccacaaggcacttttgtctttcttggttcccactgaagattttaccccacctagcccttcgacgcgtctgtgcacggggccatttccaatatggcagtagccccgcgactgtttggggggctctgcttccgtttccgggaccagaatccggaagtggctgttgaggggcgtcttccaatctcgcacagctgcgttggctgtagaagagaacggacggcgatggcgacggtcgcagcaaatccagctgctgctgcggcggctgtggcggcggcagcggcggtgactgaggatagagagccacagcacgaggagctgccaggcctggacagccagtggcgccagatagaaaacggcgagagtgggcgagaacgtccactgcgggccggcgaaagctggttccttgtggagaagcactggtataagcagtgggaggcatacgtgcagggaggggaccaggactccagcaccttccctggctgcatcaacaatgccacactctttcaagatgagataaactggcgcctcaaggagggactggtggaaggcgaggattatgtgctgctcccagcagctgcttggcattacctggtcagctggtatggtctagagcatggccagccacccattgaacgcaaggtcatagagctgcccaacatccagaaggtcgaagtgtacccagtagaactgctgcttgtccggcacaatgatttgggcaaatctcacactgttcagttcagccataccgattctattggcctagtattgcgcacagctcgggagcggtttctggtggagccccaggaagacactcggctttgggccaagaactcagaaggctctttggataggttgtatgacacacacatcacggttctcgatgcggcccttgagactgggcagttgatcatcatggagacccgcaagaaagatggcacttggcccagcgcacagctgcatgtcatgaacaacaacatgtcggaagaggatgaggacttcaagggtcagccaggcatctgtggcctcaccaatctgggcaacacgtgcttcatgaactcggccctgcagtgcctcagcaatgtgccacagctcaccgagtacttcctcaacaactgctacctggaggagctcaacttccgcaacccactgggcatgaagggtgagatcgcagaggcctatgcagacctggtgaagcaggcgtggtctggccaccaccgctccattgtgccacatgtgttcaagaacaaggttggccattttgcatcccaatttctgggctaccagcagcatgactctcaggagctgctgtcattcctcctggacgggctgcatgaggaccttaatcgggtgaagaagaaggagtatgtggagctgtgcgatgctgctgggcgaccggatcaggaggtggcacaggaggcatggcaaaaccacaaacggcggaacgattctgtgatcgtggacactttccacggcctcttcaagtccacgctggtgtgccccgattgtggcaatgtatctgtgaccttcgaccccttctgctacctcagtgttccactgcctatcagccacaagagggtcttggaggtcttctttatccccatggatccgcgccgcaagccagagcagcaccggctcgtggtccccaagaaaggcaagatctcggatctatgtgtggctctgtccaaacacacgggcatctcgccagagaggatgatggtggctgatgtcttcagtcaccgcttctataagctctatcagctagaggagcctctgagcagcatcttggaccgtgatgatatcttcgtctatgaggtgtcaggtcgcattgaggccattgagggctcaagagaggacatcgtggttcctgtctacctgcgggagcgcacccctgcccgtgactacaacaactcctactacggcctgatgctttttggacaccccctcctggtatcagtgccccgggaccgcttcacctgggagggcctgtataacgtcctgatgtaccggctctcacgctacgtgaccaaacccaactcagatgatgaggacgatggggatgagaaagaagatgacgaggaggataaagatgacgtccctgggccctcaactgggggcagcctccgagaccctgagccagagcaggctgggcccagctctggagtcacgaacaggtgcccgttcctcctggacaattgccttggcacatctcagtggcccccaaggcgacgacgcaagcagctgttcaccctgcagacggtgaactccaatgggaccagcgaccgcacaacctcccctgaagaagtccatgcccagccgtacattgctatcgactgggagccagagatgaagaagcgttactatgacgaggtagaggctgagggctacgtgaagcatgactgcgtcgggtacgtgatgaagaaggctcccgtgcggctgcaggagtgcattgagctcttcaccactgtggagaccctggagaaggaaaacccctggtactgcccttcctgcaagcagcaccagctggcaaccaagaagctggacctgtggatgctgccggagattctcatcatccacctgaaacgcttttcctacaccaagttctcccgagagaagctggacaccctcgtggagtttcctatccgggacctggacttctctgagtttgtcatccagccacagaatgagtcgaatccggagctgtacaaatatgacctcatcgcggtttccaaccattatgggggcatgcgtgatggacactacacaacatttgcctgcaacaaggacagcggccagtggcactactttgatgacaacagcgtctcccctgtcaatgagaatcagatcgagtccaaggcagcctatgtcctcttctaccaacgccaggacgtggcgcgacgcctgctgtccccggccggctcatctggcgccccagcctcccctgcctgcagctccccacccagctctgagttcatggatgttaattgagagccctgggtcctgccacagaaaaaaaaaaaaaaaagccctctctgcaatctcgcttctcgtgtccgccccgcttctcttattcgtgttaggtgcccccgccaggcattgcaggcttagtcgtggctactgttctcctgtgccgctgcatcgctctctcccgggaaagaacaggtcgtgtctcctcctagcagtgcgcgccccgcctgtgtttgcccttccagcagtgaccctcccttctagtctttatttatggtcgtgcccttccctctcctcagcccagagtgttctgcgtgggtggtgatgggggttcacctgaacacagagtgtattttcttattgaggccctgtaccttctgctgtgtgtgtgtatatataaagcaccagtctgctcccca

SEQ ID NO: 197172 - DNA, 4511 bp, Homo sapiens
  Payload ID: 18880
  Gene Name: ubiquitin specific peptidase 12
  Uniprot ID: O75317
  ENST ID: ENST00000282344
  CDS Start-End: 258-1370
cggaggcagcggctgcgccctgcgccggggcggagccgggggcgggccggcggccggcaggcgggggctggggcccgaggccgggagtgcctgagcgccggcggcgacgacggcagcggcggcccagcgggctcggtggttgggtccgcggcggctcggggtccgcccgcgggctgcggtgcgagcgggcggcccggctcccctcctcccccgcccgccgccgccgctgtgattgggtggaagatggcgctggccggatggaaatcctaatgacagtctccaaattcgcctccatctgtaccatgggcgccaatgcttcggcattagagaaagagattggtccagaacagtttccggtcaatgagcactattttggattagtcaattttgggaatacctgctactgcaattcagttcttcaagcactttatttttgtcgtccatttcgggaaaaagttcttgcgtataagagtcaacctaggaaaaaggagagccttcttacatgcttagcagatctcttccatagcatagccactcagaagaaaaaggttggagtaataccccctaagaagttcatcacaagattacggaaagaaaatgagctttttgacaactacatgcaacaagatgcccatgaattcttaaattacctactaaatacaattgctgatattttacaagaagagagaaagcaggaaaaacaaaatggtcgtttacctaatggtaatattgataatgaaaataataacagcacaccagacccaacgtgggttcatgagatttttcagggaacattaactaatgaaaccagatgtcttacttgtgaaactataagcagcaaagatgaagattttttagacctttctgttgacgtggaacaaaatacatcaattactcactgcttaaggggtttcagcaacacagaaactctgtgcagtgaatacaagtattactgtgaagagtgtcgcagcaaacaggaagcacacaaacggatgaaagttaaaaaactgcccatgattctagctctacacctgaagagatttaaatatatggatcaacttcatcgatatacaaaactctcttaccgggtagtttttcctttagaacttcgtctgtttaacacttcaggtgatgccaccaatccagacagaatgtacgaccttgttgctgttgtggttcactgtggaagtggtcccaatcgaggccattatattgcaatagttaagagtcatgatttttggttgttgtttgatgacgacattgtagaaaaaatagatgcacaagctattgaagaattctacgggttgacatcagatatctcaaagaactctgagtctggttacatccttttctatcagtctcgggactgagagggaaccgtgatgaagagacactttctgcctcatttcttctctggttattttggaaaggatcaagcactgatttttcaagaaaagagaaatgcaggaagctcagggggcagtagcacactttgcacacgataaagcaaagacgatggattgacaagcccttccgatcatggtagttgatttatttgctcaggtatcatgctgtctgtacagttccatacaacaaggaggtgaaatcagagataccagctcctcttttaaaacagccttccagtcattggcacgcattttctctttattaattgcaccaataatgctttgaattccttgggggtgcagtagaaagaatcggaatctgtgccgtattgataaggagatgatgttgaacacactgcataaatttgcctggttcagtatgtatagaagcatattcagtggtcttttcaagagtaaaccagaaatacttttgggcccaacacttgcagttgccttcctgatgtaaaaactaacatgctagataatccagtgtcgggaagacaaagatgttttgcttctctgaagaagcttataataatatacagtatatgtatatgtagggagcaattggtcaaaagtggctttttgtttccccaaggggaaagactggctttgtaattataattttttccttatttattttacttaaaactggtagagtctaagtattatatgaagtgcccatgattctgtcagtaaatttgaacatatttttattagttaatgtcagtttaagttgtccttttgtttgtttctatttttaaggtgaattttaatttctatctgaaatcagttaagataccttgagaaaaactgcagtgagaggagataaatatcctttttcaggaggaactgatatctctggctaaatatttgtccttttattatggtttctaaatcagttattttcttcagctttaatttcataaaattaaaaaactattttaaaaattcctgtagttgttggaataattaaaaattctggtgcagtggtggtataccaatctttagaattcttaagtattctaatgtttcaagttgagatcatgcttgggaaaatcatgtcatagcatttatgttattttcagatgccattttttaccctggaaagaagtcataatgttcatcataaccctagcagcctggatagtgagctaaacaaacccttcaaagattaaattttaatcaagtagaccgggaatacaaaagacaagtccttccttcccttccccccacctttacaaatcttactggaagggtgttcagaaattaaaatctgtgtttgctaagacttcattctgttgggggttttaagaagtaatatatgtaacataaaatatatgtaaacgattgcagtttttttggacgtttttccatgcatcagtaagttgtctgacagtagccaaatgtaacttgcagaaaattattgaaaattatattcagaataatagcaatcaggccttggatgttctttattaaactcttttcaggcagtaaatttaaaaaaaattgtcattttctaaagtccttttgctaaaactgttgactatggaaaacaacaaaaaggaattttttagtctgctgctattattaacatttattatctgtatcttttggctcaggaaatgacttcacctattttttccataagcagacctttaacagagtcacttaattgggctgcttaaacagatgttctgggagaaaattataatatttagtatttgtacaaaatatcaaaaagtattttgacaagtttctttttaagatagttcctaaagccttaccctggctagaggtgttttgtacaaattatatataagccagcctgatctaccaacatgccacagagaatcacaatcaacagtgtggggaaagtcagggcagtggaagtggatgcactctttttattttgaaggcttaaaccaaattgtcttggaattaaagctgtatttctgcagctttcggtacagagaaaaagaggaaagtgaagctgtgtcagttttaacattagctatatcaacatgtttaagaaagatagatgaagtcatttgcataaaggtacagcattgaaatactatgttgtgtttgtttttacatttttgcattaaaaaaaaacatgccgtaaaagccaagttaaatttcatattaaagcaagttctagtgtatgtgttgagttcctggtaatcacatacttgttcacatctacaccgtacttcatagtatgatttgtcaggggagggattgtggggtgacagttttacatttactttttcttcttaatgcagctggatctaagtaaaatgttttgaagtttatcagaaactaaatgtacttttaaaacgtatagggtcagggttgggggaaaaatacaggtatagtaagtaagaaaagtgacccatgaagaaagcatcgtgaggttgtatgttggttgactgtgattaaaatgcggggctggtgtaagttgtaagtggtggctgattgccgtgtaactatgtacatgattgttgggatggctgtcccatattttgtatattggaataaaaatttctataaattattgtaactaaaagtaaatattctaaattaagtcccacttcttaagtcacatggcttctgtcttggaaattttacctttaaaagattatttaagacaggaaccaggaggcttgggaacagggaaagagggaaatgttgtattatgtgggtcttggggcctctaaccatcagtatagggttttttctttccttgatggcagtagaaagacctcattttcataacataactactcttgatactttctttaaaaacactttttattaaagattctatcatgaggtatttggctgggagctgggaggctaaagcgctcatgtcctggctcttcagtgaatttaactgtgtgaccttgggcaagtcacttaacctctctgtgcttcagtctccctgtcttgtaaaatgggagtaatacctacctcacagggttgttgtggggattaattagagataatgtctgtaaagcatttaaggttcttgaagaaggcactatataaatacaaaataatatctattaaagttggtttatttgtgcctgtgggtttcaa

SEQ ID NO: 197173 - DNA, 349 bp, Homo sapiens
  Payload ID: 18880
  Gene Name: ubiquitin specific peptidase 12
  ENST ID: ENST00000620323
  CDS Start-End: 63-119
ggctcccctcctcccccgcccgccgccgccgctgtgattgggtggaagatggcgctggccggatggaaatcctaatgacagtctccaaattcgcctccatctgtaccatggagtggtgaatcagatctgaaagatgccttaaaaagcagattctctactacacgctgaggaacagtacaaaaaatgactgaaatcaggtggacataaaatcgacagtattaaagaaatcatattgaaggatgaatcattgaagactccatttcccaactggatgattgttctttctcacagtttacattttaggaaagcatttgtattaaatggactatattaaaatgattttggagaa

SEQ ID NO: 197174 - DNA, 712 bp, Homo sapiens
  Payload ID: 18880
  Gene Name: ubiquitin specific peptidase 12
  ENST ID: ENST00000612674
  CDS Start-End: 1-271
taatattgataatgaaaataataacagcacaccagacccaacgtgggttcatgagatttttcagggaacattaactaatgaaaccagatgtcttacttgtgaaactataagcagcaaagatgaagattttttagacctttctgttgacgtggaacaaaatacatcaattactcactgcttaaggggtttcagcaacacagaaactctgtgcagtgaatacaagtattactgtgaagagtgtcgcagcaaacaggaagcacacaaacggtaattttagagctttatggatttttaagtgattttattttttgtaattgatgttggaggtgggcttagaaaaacaatctaggaaaatttacattgagtaaaaattcttaattctatcactaacagttaatgttcattaagtattactaggtaaatgatattctactcaatgtttattttacaaaaactgtgtaccctgaagtgatttcctatgtctagcgattatttaatcatcataaaccagtacagttaaaatatttggctttgaggctttcctgatgatgtaaacttttttcttggtgaagagggttgagggagatagcactccccattgcccatcccccacacccccagtttctgcttttcctacataggatgttgtacattctcttagcatgttattgtaagactggtttggtatcaataaatggaataataaacatca

SEQ ID NO: 197175 - DNA, 8323 bp, Homo sapiens
  Payload ID: 18881
  Gene Name: ubiquitin specific peptidase 13 (isopeptidase T-3)
  Uniprot ID: Q92995
  ENST ID: ENST00000263966
  CDS Start-End: 472-3063
ggcctcctcggagttgcccctctgcaagccaacaattcgggatagaaaacacctccgtggtgttttcccggggccctcccgcgccgcgttcggccgccagcccgctcgagctcccgcgccaacgcctcaggggttcgccctccgccccccgccgccgcgcccggcccacgcgcagggcccctctccagcgccccctccccggcacgctgcggctggcgctccccagccccgcctgacgctgcagctgggccggagactcgccattggattaaaaatagcgtcgccagtccgccccaagcccgcggtgcccgctcccgccccgcagcccgctctccccgcccgccccggctcggccggctgccgttgcccgcgcagcccgcccgtcagcccgctcgctggcgccgccgccgccggcagaccccgcgctccggctccggctcggctcgctcggctccggtgcgcgccgaggccatgcagcgccggggcgccctgttcggcatgccgggcggcagcggaggcaggaagatggctgcaggagacatcggcgagctgctagtgccccacatgcccacgatccgcgtgcccaggtccggcgacagggtctacaagaacgagtgcgccttctcctacgactctcccaattctgaaggtggactctatgtatgcatgaatacatttttggcctttggaagggaacatgttgaaagacattttcgaaaaactggacagagtgtatacatgcacctgaaaagacatgtgcgagagaaggtaagaggggcgtctggtggagcgttaccaaaaaggaggaattccaagatttttttagatctagatactgatgacgatttaaatagcgacgattatgaatatgaagatgaagccaaacttgttatattcccagatcactatgaaatagcactaccaaatattgaggagttaccagccctggtaacaattgcttgtgatgcagttctcagctcaaaatctccatacagaaagcaggacccagacacgtgggaaaatgaattgccagtatctaaatatgccaacaacctcacccagctggacaatggagtcaggattcctccaagtggttggaagtgtgccagatgcgacctgcgagaaaacctctggttgaatctgactgacggctctgtcctgtgtggaaagtggttctttgacagctctgggggcaacgggcatgcgctggagcattacagagacatgggctacccactagccgtgaaactgggaaccatcactcctgacggggcagatgtttattcttttcaagaagaagaacctgttttggatcctcatttggccaagcacttagcgcattttggaattgatatgcttcatatgcatgggacagagaatgggctccaggacaatgacatcaagctgagggtcagtgagtgggaagtgatccaggagtcgggcacgaaactgaagccaatgtatggtcctggctacacgggtctgaagaacctgggcaacagctgctatctcagctctgtcatgcaggccatcttcagcatcccagaattccagagagcgtatgtaggaaaccttcccagaatatttgactactcgcctttagatccaacacaagatttcaacacacagatgactaagttaggacatggccttctctcaggccagtattcaaagcctccggtgaaatctgaactcattgaacaggtgatgaaggaggagcacaagccacagcagaacgggatctctccgcgcatgtttaaggcctttgtaagcaagagccacccggaattctcctctaacaggcagcaagatgcccaggaattcttcttgcacctggtgaatctagtagagaggaaccgcatcggctcagaaaacccaagcgatgtttttcgttttttggtggaagaacgcattcagtgctgtcagacccggaaagtccgctacacggagagggtggattacctgatgcagttacctgtggccatggaggcggcaaccaacaaggatgaactgatcgcttatgaactaacgagaagggaagcagaagcaaacagaagaccccttcctgagttggtacgtgccaagataccatttagtgcctgccttcaggccttctctgaaccagaaaatgttgatgatttctggagcagtgccctacaagcaaagtctgcgggtgtgaaaacatctcgctttgcttcattccctgaatacttggtagtgcagataaagaagttcacttttggtcttgactgggttcccaaaaaatttgatgtttctattgatatgccagacctacttgatatcaaccatctccgagccagggggttacagccaggagaggaagaacttccagacatcagcccccccatagtcattcctgatgactcaaaagatcgcctgatgaaccaattgatagacccatcagacatcgatgagtcatcagtgatgcagctggccgagatgggtttcccgctggaagcatgtcgcaaggctgtgtacttcactggaaatatgggcgccgaggtggccttcaactggatcattgttcacatggaagagccagattttgctgagccgctgaccatgcctggttatggaggggcagcttctgctggagcctctgtttttggtgcttctggactggataaccaacctccagaggaaatcgtagctatcatcacctccatgggatttcagcgaaatcaggctattcaggcactacgagcaacgaataataacctggaaagagcactggattggatctttagccaccctgagtttgaagaagacagtgattttgtgattgagatggagaataatgccaatgcaaacattatttctgaggccaagcccgaaggacctagagtcaaggatggatctggaacatatgagctatttgcattcatcagtcacatgggaacatccacaatgagtggtcattacatttgccatatcaaaaaggaaggaagatgggtgatttacaatgaccacaaagtttgtgcctcagaaaggccccctaaagacctgggctacatgtacttttaccgcaggataccaagctaaacctcaaatataaaaattggcgaaaagaagccatacgcctttttaatttgccaaaaaaaaaaagaagaagaagaagttgaaacaactagacatgaaggaatatatggggtatttatcgtttatttaaagagcacgatcagttgacaccttctgaaatagaactgagaagaaatttctattagtgatgatacactattatattgtagatagtttttataaatgttcaaaaagatgatgatatttaaaaacaaaaaaagtattcatattgctggtggaggatctgccatcagcacatcaaaaatggggatgtgcccccagccctctattttgctttgggggtcagtgatagtggcctctggagaaaccaaataatgtggccagtggtgtggccttacccacaacaaatgaaaagcccacttgtgtttcatatagaaaatcagcagttgggtggggctttatttgtgacataatttttttcatgacatacaataatttctgatgtatccatgtagatattatgctctgtccataatagagcctctgcaatgaaagatatttttaatttgtcacattaaaattcataatacgattgtgtgaatgtgtgtgagactgactgagagtgtgagacttttactagaaaagtgagtccactagaaaatctgtgacaagttggtttttaaagtctgaacagttgatattaagcatatctgaaaaaagcaagtaaatattttaacaaaactatgactcaggaaccttcgagaagattagttccccacttagatttttaaggagtaaaaagggctgagttatgcctttaagtgctgtcaagaattcacttgggtttgggacatttgctggtgtaatgctagatgcccacagcagcataatattgtactttgtcaaaggtaggtaaattctctgtttctcagcagccctttccccaaaaggtatggtgtttatttttagtaaaaatagctaatctctttttaccatctcacatgataactctttggagtcatgtcaagtgccccaaatttgtctgtgattttcccatctctgagctctttatctgcctccgtttccttgtttttctggggccagagtctcatctctgcctttttttggtgtatcaccttctgacttgccttcattgcttgtctgatgtgaccaacagtgtgatcttggacacactaaggattttagatgcaaagaaactttatacaacattatgaaagactatcctttccattttggttatttcagcattttagttgcaacctgggattagattagagtttccaacgtgatgaaaagtggaatgatagcattctataatttccataattttcctactggtccgtaccaaattctagagtctctggagttgctatttcagagtatttggtcaaacgaaaaagaatttattgctgtctgtttaacatgtatttgtttggttgaaaggatctttttagaaactgtaggaaaataaacagaaccaaccaggtgaaacaaagcacagacattgggttaggatgtagtgagttgtgaacaatcaggattctgggtgtgatgggggtccctgtctcataggtgatcctttggtgccatgtgaccgagagacatggtgtctaaggcccatggcctggagacctgggtgctgctcctagctgactgtggaccttgggcaagtccttcatccgtcctgtgcctcactgtcctcatctgaacaatggtatgatgacacctgccctctctttcaatcatgctttgaggatacagtgagattggttacagtgaaccttcaatgagtagaatgtggtatgccatggtgggttgtagtagatggtgctccctgccttttctcctctgttttcctcaatttgggaacaaatgagattggcagaaggagggagctcacggtgcagtacttttctaccaaagtgtgcccactggtgtcacctcctaatgttaacttggatttcctaaagcagtcccactctgttatgagagtcactgactcccgtggacatccccacagtaagcagccttacaaaatccagtccccttagggcagagtgagtgtcatagaataatgactccaaacccacgtcaaaaatggcttgttttcagcgatgttataaaacaaaggcctgttttttggaattgggggtgactgggtggtttggattgaaatgtggacaaagatagcatgtgtattttgaataaaataaaaattttgtaataaaacttttaaaaatcagtgatgtaaaatcaatatttaagactataggctataaattgtttgatttcattaactagcccttttgatgcctagacatgttgtaaaaaaattgtgctatggctgccttttcttctgccccacaacacaaagggctatttctacaaggcaaagttttgtatatgtgctattctttacttcagattgagagttgggaaaaactggagtaaataatgggtttcttacttgcttaaaagcatatttatatgtgtatctcaatatatacaaggcaggttcccctataaaagtctggaatgtactgcttaattttacacttgtgtagacacgattatttgtgactgaaaagtggaataacgtgtggattttgtcaactcattatcagtctgttagcagtcctctatgtgaggcatggtggtctaattgtgaaattctccctgtatatgggtgtctgtgtgaaagacagcactttcttcctgtaaatatcttttgatatccatttatgtagaattccaatgaatatgtctttggaaaaggtaatgtatcaaagtttttattttgccaattgatctaaatgcccatataactaatcagaaatccagtttggttcagattgggattttcttttaaagaaaaaaaaagtatgcagaaaagactattggaagaatcatgtgttagtgacactttacatcaacgttgcttcaatattttggaattgaccaggctgctttctcctacctgcaagagaatgtgcctgacatttcccagtgcttactttgggctataggaagtccagcggggatagctcgagcctcttgctccctgagtcatttattccctttacctgaacagagccttacctgcaattcatagtgagagcacctgggtctgtatcctgactccactctaagtgaggtgggactgaatcactgtacctctctgggccttttcatttgaaacaagtgggttagactagattagctccaaagtcctctcttgccctaacattttatttttattttcctgtggttaccactagggtctgacacgtaaaatgtgagggatcacttagaggtttggatgttatatttttgcattgttacagcttatactccccagttgaggacctgtgtcattcttagtggccccacgacccctctgtttgtattcctgctccacttatctatacttttttgggtaatcatcccactttttttttttcttgagatggagtctcgctgtgttgccaaggctggagtacagtggtgcaatctcagctcactgcagcctcctcccgggttcaagtgattctcctgcctcagcttcccaagtagctgggattactggcgcacgccactacgcccagctaatttttgtatttttagtagagacagggttttgccatgttggccaggctggtcttgaactcttgacctcaacctgcctcagcctcccaaagtgctgggattacacgcatgagctaccgcgtccagccccactttttttctactcttgaaaaaaacaactttctagtccatgaggtactttggctccatccccctcaaaaacaaaacaaaaaatccatttaaagtgtcctcctagaaaagcctcagaactgccttcaactacatctgtcacctttatagaatattttgaaattctggaagaggatgggaaacaaaattctaatttagctagagctgtgatccccaaataagtgctgacaaaattgtctaccacagaaaggccgtccttgtcatcttgtaggcatcactgctgctaaatcacatcagtacatgccttctgtggggagatggcagggggcaggggcaggaccaggggatgggattagataaagtgtgataatgtcctttagataaaagaaatcctacgctatagaacaaggttctgtactcttgagttggtgtctgagatcacctgcacagtgttacagagattttccactccataaatcactctaaaagagtttgcataagactcggtagacctgtgctattcaatgtggcagtcaacagccatatgtggcgatgactactcaaagtttggcttgttcaaatcgagactgtgttgtacacatacaatacacaccagattttgaaggcttggtaccaaaaaggaatttaaaatatttcaccaatatttcatattgataacatgctgaaatgacactattttggatgtactaagtaaaatattaacaatttaatatatttatataattgaaattaaaattcttttcacccatttttatttttttaaaaatgtggcccctaaagaacttcaaattagacatgtggataacgttatacttctattggacagccccactctagacttacatggtgtggggtaggcagtgaaatccgtaaataggaaacgcaattctgcaaagtatctaaatagacagaaacaacacaaatatttttgctggagtcaggagcactgtgaggcacagaacatctcccagaaagcagattttttttttctgccgaaaaaccaatatatatatgtatgatcccaattaaaagacaaaagcaaatgagccccaaactgcctgtcttcagctttgcctgggagctgctacctttgctcttctagcatcttctaggtaccaaggatattagccacttgagggtgttgggcatatttgtttcattgtaggcaaaatcctcttgtggtttcccctccccaggtattgttgagtctgttcaaagctgggtgtgttgaaacactgcacaaatcctgccactcttgatgtgccgcttgtctcagccttggcagaggctgagtctgttcctgtgcccacctgtccagcaggttttgatgttggctcctgaaagagtttgtatttattttattttgcactagtcacagttgttgttaaactgtatcaaatgttttgggagattatttgcctgagatggaaagagagatggatgatttattgcttcaattgttttaaattaaaagctattctcacaa

SEQ ID NO: 197176 - DNA, 2747 bp, Homo sapiens
  Payload ID: 18881
  Gene Name: ubiquitin specific peptidase 13 (isopeptidase T-3)
  Uniprot ID: Q92995
  ENST ID: ENST00000496897
  CDS Start-End: 86-2482
gttccgaactgcacgttgcagatcgtttgcgtcctccgcggggcagagcgcagggcggaattctgaaggtggactctatgtatgcatgaatacatttttggcctttggaagggaacatgttgaaagacattttcgaaaaactggacagagtgtatacatgcacctgaaaagacatgtgcgagagaaggtaagaggggcgtctggtggagcgttaccaaaaaggaggaattccaagatttttttagatctagatactgatgacgatttaaatagcgacgattatgaatatgaagatgaagccaaacttgttatattcccagatcactatgaaatagcactaccaaatattgaggagttaccagccctggtaacaattgcttgtgatgcagttctcagctcaaaatctccatacagaaagcaggacccagacacgtgggaaaatgaattgccagtatctaaatatgccaacaacctcacccagctggacaatggagtcaggattcctccaagtggttggaagtgtgccagatgcgacctgcgagaaaacctctggttgaatctgactgacggctctgtcctgtgtggaaagtggttctttgacagctctgggggcaacgggcatgcgctggagcattacagagacatgggctacccactagccgtgaaactgggaaccatcactcctgacggggcagatgtttattcttttcaagaagaagaacctgttttggatcctcatttggccaagcacttagcgcattttggaattgatatgcttcatatgcatgggacagagaatgggctccaggacaatgacatcaagctgagggtcagtgagtgggaagtgatccaggagtcgggcacgaaactgaagccaatgtatggtcctggctacacgggtctgaagaacctgggcaacagctgctatctcagctctgtcatgcaggccatcttcagcatcccagaattccagagagcgtatgtaggaaaccttcccagaatatttgactactcgcctttagatccaacacaagatttcaacacacagatgactaagttaggacatggccttctctcaggccagtattcaaagcctccggtgaaatctgaactcattgaacaggtgatgaaggaggagcacaagccacagcagaacgggatctctccgcgcatgtttaaggcctttgtaagcaagagccacccggaattctcctctaacaggcagcaagatgcccaggaattcttcttgcacctggtgaatctagtagagaggaaccgcatcggctcagaaaacccaagcgatgtttttcgttttttggtggaagaacgcattcagtgctgtcagacccggaaagtccgctacacggagagggtggattacctgatgcagttacctgtggccatggaggcggcaaccaacaaggatgaactgatcgcttatgaactaacgagaagggaagcagaagcaaacagaagaccccttcctgagttggtacgtgccaagataccatttagtgcctgccttcaggccttctctgaaccagaaaatgttgatgatttctggagcagtgccctacaagcaaagtctgcgggtgtgaaaacatctcgctttgcttcattccctgaatacttggtagtgcagataaagaagttcacttttggtcttgactgggttcccaaaaaatttgatgtttctattgatatgccagacctacttgatatcaaccatctccgagccagggggttacagccaggagaggaagaacttccagacatcagcccccccatagtcattcctgatgactcaaaagatcgcctgatgaaccaattgatagacccatcagacatcgatgagtcatcagtgatgcagctggccgagatgggtttcccgctggaagcatgtcgcaaggctgtgtacttcactggaaatatgggcgccgaggtggccttcaactggatcattgttcacatggaagagccagattttgctgagccgctgaccatgcctggttatggaggggcagcttctgctggagcctctgtttttggtgcttctggactggataaccaacctccagaggaaatcgtagctatcatcacctccatgggatttcagcgaaatcaggctattcaggcactacgagcaacgaataataacctggaaagagcactggattggatctttagccaccctgagtttgaagaagacagtgattttgtgattgagatggagaataatgccaatgcaaacattatttctgaggccaagcccgaaggacctagagtcaaggatggatctggaacatatgagctatttgcattcatcagtcacatgggaacatccacaatgagtggtcattacatttgccatatcaaaaaggaaggaagatgggtgatttacaatgaccacaaagtttgtgcctcagaaaggccccctaaagacctgggctacatgtacttttaccgcaggataccaagctaaacctcaaatataaaaattggcgaaaagaagccatacgcctttttaatttgccaaaaaaaaaaagaagaagaagaagttgaaacaactagacatgaaggaatatatggggtatttatcgtttatttaaagagcacgatcagttgacaccttctgaaatagaactgagaagaaatttctattagtgatgatacactattatattgtagatagtttttataaatgttcaaaaagatgatgatatttaaaaacaaaaaaagtattcata

SEQ ID NO: 197177 - DNA, 509 bp, Homo sapiens
  Payload ID: 18881
  Gene Name: ubiquitin specific peptidase 13 (isopeptidase T-3)
  ENST ID: ENST00000497380
  CDS Start-End: 1-228
ggcgagctgctagtgccccacatgcccacgatccgcgtgcccaggtccggcgacagggtctacaagaacgagtgcgccttctcctacgactctcccaattctgaaggtggactctatgtatgcatgaatacatttttggcctttggaagggaacatgttgaaagacattttcgaaaaactggacagagtgtatacatgcacctgaaaagacatgtgcgagagatctagatactgatgacgatttaaatagcgacgattatgaatatgaagatgaagccaaacttgttatattcccagatcactatgaaatagcactaccaaatattgaggagttaccagccctggtaacaattgcttgtgatgcagttctcagctcaaaatctccatacagaaagcaggacccagacacgtgggaaaatgaattgccagtatctaaatatgccaacaacctcacccagctggacaatggagtcaggattcctccaagtggttggaagtgtgccagatgc

SEQ ID NO: 197178 - DNA, 899 bp, Homo sapiens
  Payload ID: 18881
  Gene Name: ubiquitin specific peptidase 13 (isopeptidase T-3)
  ENST ID: ENST00000497155
  CDS Start-End: 1-899
ttcagcatcccagaattccagagagcgtatgtaggaaaccttcccagaatatttgactactcgcctttagatccaacacaagatttcaacacacagatgactaagttaggacatggccttctctcaggccagtattcaaagcctccggtgaaatctgaactcattgaacaggtgatgaaggaggagcacaagccacagcagaacgggatctctccgcgcatgtttaaggcctttgtaagcaagagccacccggaattctcctctaacaggcagcaagatgcccaggaattcttcttgcacctggtgaatctagtagagaggaaccgcatcggctcagaaaacccaagcgatgtttttcgttttttggtggaagaacgcattcagtgctgtcagacccggaaagtccgctacacggagagggtggattacctgatgcagttacctgtggccatggaggcggcaaccaacaaggatgaactgatcgcttatgaactaacgagaagggaagcagaagcaaacagaagaccccttcctgagttggtacgtgccaagataccatttagtgcctgccttcaggccttctctgaaccagaaaatgttgatgatttctggagcagtgccctacaagcaaagtctgcgggtgtgaaaacatctcgctttgcttcattccctgaatacttggtagtgcagataaagaagttcacttttggtcttgactgggttcccaaaaaatttgatgtttctattgatatgccagacctacttgatatcaaccatctccgagccagggggttacagccaggagaggaagaacttccagacatcagcccccccatagtcattcctgatgactcaaaagcatcagacatcgatgagtcatcagtgatgcagctggccga

SEQ ID NO: 197179 - DNA, 4921 bp, Homo sapiens
  Payload ID: 18882
  Gene Name: ubiquitin specific peptidase 14 (tRNA-guanine transglycosylase)
  Uniprot ID: P54578
  ENST ID: ENST00000261601
  CDS Start-End: 92-1576
gccgccgccgcagctgctcctggtccccgtccctttgccgccctcgtcaggcccagctctcctgcgccgccgcctcccgccgcgccccgccatgccgctctactccgttactgtaaaatggggaaaggagaaatttgaaggtgtagaattgaatacagatgaacctccaatggtattcaaggctcagctgtttgcgttgactggagtccagcctgccagacagaaagttatggtgaaaggaggaacgctaaaggatgatgattggggaaacatcaaaataaaaaatggaatgactctactaatgatggggtcagcagatgctcttccagaagaaccctcagccaaaactgtcttcgtagaagacatgacagaagaacagttagcatctgctatggagttaccatgtggattgacaaaccttggtaacacttgttacatgaatgccacagttcagtgtattcgttctgtgcctgaactcaaagatgcccttaaaaggtatgcaggtgccttgagagcttcaggggaaatggcttcagcgcagtatattactgcagcccttagagatttgtttgattccatggataaaacttcttccagtattccacctattattctactgcagtttttgcacatggctttcccacagtttgccgagaaaggtgaacaaggacagtatcttcaacaggatgctaatgaatgttggatacaaatgatgcgagtattgcaacagaaattggaagcaatagaggatgattctgttaaagagacagactcctcatctgcatcggcagcgacaccttctaaaaagaaaagtttaatcgatcagttcttcggtgttgagtttgaaactaccatgaaatgtacagaatctgaagaagaagaagtcaccaaaggaaaggaaaatcaacttcagcttagctgttttatcaatcaggaagtcaagtatctttttacaggacttaaattgcgacttcaggaagaaatcaccaaacagtctccaacgttgcaaagaaatgccttgtatatcaaatcttccaagatcagccggctgcctgcttacttgaccattcagatggttcgatttttttataaagagaaggaatctgtgaatgccaaagttcttaaggatgttaaatttcctcttatgttggatatgtatgaactgtgtacaccagaacttcaagagaaaatggtgtcttttcgatccaaattcaaggatctagaagataaaaaagtgaatcagcagccaaatacaagtgacaaaaagagtagtccccagaaagaagttaagtatgaacccttttcttttgctgatgatattggctccaataattgtggatactatgacttacaagcagtactaacacaccagggaaggtctagttcttcaggtcattatgtatcatgggtgaaaaggaaacaagatgaatggattaagtttgatgatgacaaagtcagcatcgtaacaccagaagatatcttacggctttctggtggtggagactggcatatcgcttacgttctactctatgggcctcgcagagttgaaataatggaagaggaaagtgaacagtaatcttcattttagtatttatgcttagatgtgaaaataaatgttatttgttgatcatttctataatccagagctttagaggaagacacataggtgggtttatgtttcacctcatttggaacaaaagaggacagaagcagaccactctgtgcaccaacctaaaaaattacagagaagagaaaattatctttggattgtgctgccctatataaaggtggcagaaagacatttttaaaaagcttattatttcttgcattattttaaaaagttcagagttgaaatgcctttcaaccatttccttctgtggtcatttttcttgctgcctttttcacccaagattcagcagtcagatgtttactgcacacctattacctattatttgctgttcttgcatggttcaaaccaccattctgtagccacccatcctttgccttatctaacaaacatttttccaggaaggtggaaaaggaagtgttgctctcattgtgtgactcagtgctgctgtccatcccatggaaacatgggcacaatcaagtatttgtccagcctattgcaggcttttcctgactttaaaataaattgtgatcaataatagtacctttgattatacatttattattgtgtctctctctgatgtactgtggattgtacatttaactttggaatggctttgtaataatcagtcttaagaaaatgttgacaagctctggttgcttatttttagaaaatgaggacatttaataataataaaaaaaaagggattaatagcttttgacctcaagtcttttgtcttctgagtgttggagcttggctgaagacatgtttaatactgtacaatttctgaagatggttattaacactgtgctgttaagcatccatttaaaaatatttgttatcttctttgcctgcctgtattttaaaaagaaatacaaagttgtaaaagtaatggatttctttggatgctgaatgcagtgatgttatcagtcagattctttccttggctcagttgtgtttgtatttcctttcttaattccccaaatcttggctgggcacggtggctcacgcctgtaatcccagcactttgggaggctgaggcaggtggttcactggaggttgagttcgagaccagcctggccacatggtgaaaccctgtctctactaaagatataaaaattagctggatgtggtggtgcacacctgtgatcccagctacttgggaggctgaggtgggagaattgcttgaacctggaaggcagaagttgcagtgagctgagatcacaccactgcactccagcctgggtgacagagagactctgtctcaaaaaaaaaaagaaaaaattcccaaatcttaatgtctgtttcagaattttagtgattttaaagtgatagtagaaaataccaagcatatgaggtatttcaatatgataggcttcttacattttaatagttactcatctttgttccaggacccttgactgatgctagggaaaggataaagcatagaataccagccagtttggctctgattttgagttatttataataaagtttggggattatcataacatctcatatctttgtgtatgttgttttaatgctcggcagagcacaacactgatgataactattaaaaatagaaaataacagccattttactttcaaatctgatgtgatgcaatctgtgaacactaggaggggataaaataagcattgcagggaaacttatttgtaaatagcttcctcacctaaactttgacttggcaatcaatactttctactttgtggaggggattaagaatagaatgggcaggatgagaccatgaaaattataatgattcatgtatatttgtatgatgcttgtaactttgcaaagtcttttttattcattgtctcatttggtcagaacaattttattgaggacatgaatttaacaattagaatttagattttctgactgtagctactaaatgttgtagctactagaccaggtgagctaggtttagagcaaagtatataagccttgtatggactatattagaattttaaaaattgtaattaattccttatcatcattataaaaagcttgatttttttatttgatctaaaaaagcattattccaaagaattttttcaagtagaaatgggagttagttataccagtgttgtttttaactaataaggctattttagaattcagccttgcctgtaaggtctttgagaagggagaggagtaggccaaaaaaaaaaaagtcttgattcctgaatgtgccttatatgctgtgccactcacaccgaggccatcatctcaacattagagttgtgctagattactgcttgactgactagctaggttaggcctaagagtgtttaccgaataatctgcactcactcagtagcccttcttcaggattaaaaacgatgatgacctcatcttagagccctaaagggaaatgcttatgtgggaacaagaaaagtcggtggtactgtcttctgctactactacttagtgctttgctgtgtatagggtgtgttcacatatatctcagttgaatgtcacaagaatccctgaagtgattaaaagtcttgagaggtcaggcaatttttgtaaggctagaaggaaaagtgaggttttagacttcatttcttttaaagttggcaaacaaacattttctgtaatggacaagatagatagattagatagatagatagatagatagatgatgattgattgatgattgatagtaaattatttcaggctttgcaggctataaagtgctgcagctccttagctttgctgttgttatagtgtagctggagccatagacagttagttagttagttatgagtgagcacagctgggtgccagtacaattttaatgatcaagactcgtggcaggcagaacaaaccatcatttgttgatcctctgcttgaaagcacgaataagtgagaacagagcagtcatatggtttcagaaagtgttattctgggatttcaggataaattttgtaaaactactaacaaacaacacacaggaaactaatttggtataagaaacgacatatccctaaatagtgcttatttaacttcattataaatacatctacttaacaaaaaaatatattttgtgatcttgaggtcacttcgtttaggtcattatctcaacccaacctccccaaactctggtttgagccaatatgtgttctattgttctcagagcaccagccgactgtacaacaattgttataaaaatgtttattgtttaccaaaaccagtggacctcttatcaaatgctgcttggtaacaaaatctatcacagttttaataaaaagaaaaaaaaaagaagctaa

SEQ ID NO: 197180 - DNA, 2168 bp, Homo sapiens
  Payload ID: 18882
  Gene Name: ubiquitin specific peptidase 14 (tRNA-guanine transglycosylase)
  ENST ID: ENST00000383589
  CDS Start-End: 109-1455
accgcgcctccgcctcggccgccgccgcagctgctcctggtccccgtccctttgccgccctcgtcaggcccagctctcctgcgccgccgcctcccgccgcgccccgccatgccgctctactccgttactgtaaaatggggaaaggagaaatttgaaggtgtagaattgaatacagatgaacctccaatggtattcaaggctcagctgtttgcgttgactggagtccagcctgccagacagaaagttatggtgaaaggaggaacgctaaagatggagttaccatgtggattgacaaaccttggtaacacttgttacatgaatgccacagttcagtgtattcgttctgtgcctgaactcaaagatgcccttaaaaggtatgcaggtgccttgagagcttcaggggaaatggcttcagcgcagtatattactgcagcccttagagatttgtttgattccatggataaaacttcttccagtattccacctattattctactgcagtttttgcacatggctttcccacagtttgccgagaaaggtgaacaaggacagtatcttcaacaggatgctaatgaatgttggatacaaatgatgcgagtattgcaacagaaattggaagcaatagaggatgattctgttaaagagacagactcctcatctgcatcggcagcgacaccttctaaaaagaaaagtttaatcgatcagttcttcggtgttgagtttgaaactaccatgaaatgtacagaatctgaagaagaagaagtcaccaaaggaaaggaaaatcaacttcagcttagctgttttatcaatcaggaagtcaagtatctttttacaggacttaaattgcgacttcaggaagaaatcaccaaacagtctccaacgttgcaaagaaatgccttgtatatcaaatcttccaagatcagccggctgcctgcttacttgaccattcagatggttcgatttttttataaagagaaggaatctgtgaatgccaaagttcttaaggatgttaaatttcctcttatgttggatatgtatgaactgtgtacaccagaacttcaagagaaaatggtgtcttttcgatccaaattcaaggatctagaagataaaaaagtgaatcagcagccaaatacaagtgacaaaaagagtagtccccagaaagaagttaagtatgaacccttttcttttgctgatgatattggctccaataattgtggatactatgacttacaagcagtactaacacaccagggaaggtctagttcttcaggtcattatgtatcatgggtgaaaaggaaacaagatgaatggattaagtttgatgatgacaaagtcagcatcgtaacaccagaagatatcttacggctttctggtggtggagactggcatatcgcttacgttctactctatgggcctcgcagagttgaaataatggaagaggaaagtgaacagtaatcttcattttagtatttatgcttagatgtgaaaataaatgttatttgttgatcatttctataatccagagctttagaggaagacacataggtgggtttatgtttcacctcatttggaacaaaagaggacagaagcagaccactctgtgcaccaacctaaaaaattacagagaagagaaaattatctttggattgtgctgccctatataaaggtggcagaaagacatttttaaaaagcttattatttcttgcattattttaaaaagttcagagttgaaatgcctttcaaccatttccttctgtggtcatttttcttgctgcctttttcacccaagattcagcagtcagatgtttactgcacacctattacctattatttgctgttcttgcatggttcaaaccaccattctgtagccacccatcctttgccttatctaacaaacatttttccaggaaggtggaaaaggaagtgttgctctcattgtgtgactcagtgctgctgtccatcccatggaaacatgggcacaatcaagtatttgtccagcctattgcaggcttttcctgactttaaaataaattgtgatcaataatagtacctttgattatacatttattattgtgtctctctctgatgtactgtggattgtacatttaactttggaatggctttgtaataatcagtcttaagaaaatgttgacaagctctggttgctt

SEQ ID NO: 197181 - DNA, 1681 bp, Homo sapiens
  Payload ID: 18882
  Gene Name: ubiquitin specific peptidase 14 (tRNA-guanine transglycosylase)
  Uniprot ID: P54578
  ENST ID: ENST00000400266
  CDS Start-End: 164-1615
gtcatcgccagtggccggtttgaatgagactcgtcgcaccgaagccgccgccaccaccgcgcctccgcctcggccgccgccgcagctgctcctggtccccgtccctttgccgccctcgtcaggcccagctctcctgcgccgccgcctcccgccgcgccccgccatgccgctctactccgttactgtaaaatggggaaaggagaaatttgaaggtgtagaattgaatacagatgaacctccaatggtattcaaggctcagctgtttgcgttgactggagtccagcctgccagacagaaagttatggtgaaaggaggaacgctaaagggaatgactctactaatgatggggtcagcagatgctcttccagaagaaccctcagccaaaactgtcttcgtagaagacatgacagaagaacagttagcatctgctatggagttaccatgtggattgacaaaccttggtaacacttgttacatgaatgccacagttcagtgtattcgttctgtgcctgaactcaaagatgcccttaaaaggtatgcaggtgccttgagagcttcaggggaaatggcttcagcgcagtatattactgcagcccttagagatttgtttgattccatggataaaacttcttccagtattccacctattattctactgcagtttttgcacatggctttcccacagtttgccgagaaaggtgaacaaggacagtatcttcaacaggatgctaatgaatgttggatacaaatgatgcgagtattgcaacagaaattggaagcaatagaggatgattctgttaaagagacagactcctcatctgcatcggcagcgacaccttctaaaaagaaaagtttaatcgatcagttcttcggtgttgagtttgaaactaccatgaaatgtacagaatctgaagaagaagaagtcaccaaaggaaaggaaaatcaacttcagcttagctgttttatcaatcaggaagtcaagtatctttttacaggacttaaattgcgacttcaggaagaaatcaccaaacagtctccaacgttgcaaagaaatgccttgtatatcaaatcttccaagatcagccggctgcctgcttacttgaccattcagatggttcgatttttttataaagagaaggaatctgtgaatgccaaagttcttaaggatgttaaatttcctcttatgttggatatgtatgaactgtgtacaccagaacttcaagagaaaatggtgtcttttcgatccaaattcaaggatctagaagataaaaaagtgaatcagcagccaaatacaagtgacaaaaagagtagtccccagaaagaagttaagtatgaacccttttcttttgctgatgatattggctccaataattgtggatactatgacttacaagcagtactaacacaccagggaaggtctagttcttcaggtcattatgtatcatgggtgaaaaggaaacaagatgaatggattaagtttgatgatgacaaagtcagcatcgtaacaccagaagatatcttacggctttctggtggtggagactggcatatcgcttacgttctactctatgggcctcgcagagttgaaataatggaagaggaaagtgaacagtaatcttcattttagtatttatgcttagatgtgaaaataaatgttatttgttgatcatttctataatcc

SEQ ID NO: 197182 - DNA, 503 bp, Homo sapiens
  Payload ID: 18882
  Gene Name: ubiquitin specific peptidase 14 (tRNA-guanine transglycosylase)
  ENST ID: ENST00000581983
  CDS Start-End: 419-503
aggcaccgtcccctctcccggctgggtcggagccctgcgtggcaggggagcgccgtccccctgagccaccgatgggtggggggagtggagatggggaagcctctcaaagtcgtgactctgcagaatagtttctgacgctgccctggtgtgcggtgaaagtgaggagacaggctggtctcgaactcctgacctcatgatccgcccgcctcgacctcccaaagtactgggattacaggcgtgagccaccacgcccagcctgctgaagtctcagtttctttaactatgaaatgagaagttaggtttgatccagtgaaattttattcagcacctactgcatgcatgctcctcttgattagttactgtaaaatggggaaaggagaaatttgaaggtgtagaattgaatacagatgaacctccaatggtattcaaggctcagctgtttgcgttgactggagtccagcctgccagacagaaagttatggtgaaaggaggaacgctaaagg

SEQ ID NO: 197183 - DNA, 474 bp, Homo sapiens
  Payload ID: 18882
  Gene Name: ubiquitin specific peptidase 14 (tRNA-guanine transglycosylase)
  ENST ID: ENST00000580410
  CDS Start-End: 413-474
gaatgagactcgtcgcaccgaagccgccgccaccaccgcgcctccgcctcggccgccgccgcagctgctcctggtccccgtccctttgccgccctcgtcaggcccagctctcctgcgccgccgcctcccgccgcgccccgccatgccgctctactccgagacaggctggtctcgaactcctgacctcatgatccgcccgcctcgacctcccaaagtactgggattacaggcgtgagccaccacgcccagcctgctgaagtctcagtttctttaactatgaaatgagaagttaggtttgatccagtgaaattttattcagcacctactgcatgcatgctcctcttgattagttactgtaaaatggggaaaggagaaatttgaaggtgtagaattgaatacagatgaacctccaatggtattcaaggctcagctgtttgcgttgactggagtccagcctgccagacagaaagttat

SEQ ID NO: 197184 - DNA, 1803 bp, Homo sapiens
  Payload ID: 18882
  Gene Name: ubiquitin specific peptidase 14 (tRNA-guanine transglycosylase)
  Uniprot ID: P54578
  ENST ID: ENST00000582707
  CDS Start-End: 317-1696
ccctcacttgctccctccttccttcccgccacccctccaccgccttccccctcctccctcctctcgccacctctaggccccgccccggtcctgccgcccagtctcctcgctgcagtcgctccggagctgcacgggtgttttgcgtgttgctgcgtcatcgccagtggccggtttgaatgagactcgtcgcaccgaagccgccgccaccaccgcgcctccgcctcggccgccgccgcagctgctcctggtccccgtccctttgccgccctcgtcaggcccagctctcctgcgccgccgcctcccgccgcgccccgccatgccgctctactccgttactgtaaaatggggaaaggagaaatttgaaggtgtagaattgaatacagatgaacctccaatggtattcaaggctcagctgtttgcgttgactggagtccagcctgccagacagaaagttatggtgaaaggaggaacgctaaaggatgatgattggggaaacatcaaaataaaaaatatggagttaccatgtggattgacaaaccttggtaacacttgttacatgaatgccacagttcagtgtattcgttctgtgcctgaactcaaagatgcccttaaaaggtatgcaggtgccttgagagcttcaggggaaatggcttcagcgcagtatattactgcagcccttagagatttgtttgattccatggataaaacttcttccagtattccacctattattctactgcagtttttgcacatggctttcccacagtttgccgagaaaggtgaacaaggacagtatcttcaacaggatgctaatgaatgttggatacaaatgatgcgagtattgcaacagaaattggaagcaatagaggatgattctgttaaagagacagactcctcatctgcatcggcagcgacaccttctaaaaagaaaagtttaatcgatcagttcttcggtgttgagtttgaaactaccatgaaatgtacagaatctgaagaagaagaagtcaccaaaggaaaggaaaatcaacttcagcttagctgttttatcaatcaggaagtcaagtatctttttacaggacttaaattgcgacttcaggaagaaatcaccaaacagtctccaacgttgcaaagaaatgccttgtatatcaaatcttccaagatcagccggctgcctgcttacttgaccattcagatggttcgatttttttataaagagaaggaatctgtgaatgccaaagttcttaaggatgttaaatttcctcttatgttggatatgtatgaactgtgtacaccagaacttcaagagaaaatggtgtcttttcgatccaaattcaaggatctagaagataaaaaagtgaatcagcagccaaatacaagtgacaaaaagagtagtccccagaaagaagttaagtatgaacccttttcttttgctgatgatattggctccaataattgtggatactatgacttacaagcagtactaacacaccagggaaggtctagttcttcaggtcattatgtatcatgggtgaaaaggaaacaagatgaatggattaagtttgatgatgacaaagtcagcatcgtaacaccagaagatatcttacggctttctggtggtggagactggcatatcgcttacgttctactctatgggcctcgcagagttgaaataatggaagaggaaagtgaacagtaatcttcattttagtatttatgcttagatgtgaaaataaatgttatttgttgatcatttctataatccagagctttagaggaagacacataggtgggtttatgtttcac

SEQ ID NO: 197185 - DNA, 578 bp, Homo sapiens
  Payload ID: 18882
  Gene Name: ubiquitin specific peptidase 14 (tRNA-guanine transglycosylase)
  ENST ID: ENST00000583119
  CDS Start-End: 1-100
tgcgttgactggagtccagcctgccagacagaaagttatggtgaaaggaggaacgctaaaggattttcatgaaattactttttttaaaaacagggaatgactctactaatgatggggtcagcagatgctcttccagaagaaccctcagccaaaactgtcttcgtagaagacatgacagaagaacagttagcatctgctatggagttaccatgtggattgacaaaccttggtaacacttgttacatgaatgccacagttcagtgtattcgttctgtgcctgaactcaaagatgcccttaaaagcccttagagatttgtttgattccatggataaaacttcttccagtattccacctattattctactgcagtttttgcacatggctttcccacagtttgccgagaaaggtgaacaaggacagtatcttcaacaggatgctaatgaatgttggatacaaatgatgcgagtattgcaacagaaattggaagcaatagaggatgattctgttaaagagacagactcctcatctgcatcggcagcgacaccttctaaaaagaaaagtttaatcgatcagttct

SEQ ID NO: 197186 - DNA, 14950 bp, Homo sapiens
  Payload ID: 18883
  Gene Name: ubiquitin specific peptidase 15
  Uniprot ID: Q9Y4E8
  ENST ID: ENST00000353364
  CDS Start-End: 78-2936
gtgggacgccattcccataatgctctggggcgtgccgccgccgtcgctgccacctcccctaccgctagtggaagaagatggcggaaggcggagcggcggatctggacacccagcggtctgacatcgcgacgctgctcaaaacctcgctccggaaaggggacacctggtacctagtcgatagtcgctggttcaaacagtggaaaaaatatgttggctttgacagttgggacaaataccagatgggagatcaaaatgtgtatcctggacccattgataactctggacttctcaaagatggtgatgcccagtcacttaaggaacaccttattgatgaattggattacatactgttgccaactgaaggttggaataaacttgtcagctggtacacattgatggaaggtcaagagccaatagcacgaaaggtggttgaacagggtatgtttgtaaagcactgcaaagtagaagtatatctcacagaattgaagctatgtgaaaatggaaacatgaataatgttgtaactcgaagatttagcaaagctgacacaatagatacaattgaaaaggaaataagaaaaatcttcagtattccagatgaaaaggagaccagattgtggaacaaatacatgagtaacacatttgaaccactgaataaaccagacagcaccattcaggatgctggtttataccaaggacaggtattagtgatagaacagaaaaatgaagatggaacatggccaaggggtccttctactcctaatgtgaaaaactcaaattactgtcttccatcatataccgcttataagaactatgattattcggaacctggaagaaacaatgaacagccaggcctctgtggcctaagtaacttgggaaatacgtgtttcatgaactcagctattcagtgtttgagcaacacacctccacttactgagtatttcctcaatgataagtatcaagaagaactgaattttgacaatcccttaggaatgagaggtgaaatagctaaatcttatgccgaactgatcaagcaaatgtggtctggaaagtttagctacgtcaccccaagagcctttaagacacaggtaggacgttttgcacctcagttctctggatatcagcagcaagactgtcaagaactgttagctttcctattagatggattacatgaggatttgaatagaattaggaaaaaaccatatatacaattaaaagatgcagatggaaggccagataaggtggttgccgaagaagcctgggaaaaccatttaaaacgaaatgattctatcatagtagatatatttcatggccttttcaaatcaactttagtttgtcctgagtgtgctaagatttcagtaacatttgatcctttttgttacttgacacttccattgcccatgaaaaaagaacgcaccttggaagtttacttagttagaatggatccacttaccaaacctatgcagtacaaagtggttgtccccaaaattggaaacatattagatctttgtacagcattgtctgctttgtcaggaatacctgcagataagatgatagttactgatatatacaatcatagatttcacagaatattcgctatggatgaaaaccttagtagtattatggaacgggatgatatttatgtgtttgaaattaacatcaataggacagaagatacagagcacgtgattattcctgtttgcctaagagaaaaattcagacactcgagttatacccaccatactggttcttcactttttggtcagccctttcttatggctgtaccacgaaacaatactgaagacaaactttataatctcctgctcttgagaatgtgccgatatgtcaaaatatctactgaaactgaagaaactgaaggatccctacactgctgtaaggaccaaaatattaatgggaatggcccaaatggcatacatgaagaaggctcaccaagtgaaatggaaacagatgagccagatgatgaatccagccaggatcaagaacttccctcagagaatgaaaacagtcagtctgaagattcagttggaggagataatgattctgaaaatggattatgtactgaggatacttgcaaaggtcaactcacgggacacaaaaaacgattgtttacattccagttcaacaacttaggcaatactgatatcaactacatcaaagatgataccaggcatataagatttgatgataggcagcttaggctagatgaaagatcttttcttgctttggattgggatcctgatttgaaaaaaagatattttgatgaaaatgctgctgaggactttgaaaaacatgaaagtgtggagtataaacctcctaaaaaaccctttgtgaaattaaaagattgcattgaactttttacaacaaaagaaaagctaggtgctgaagatccctggtattgtccgaattgtaaagaacatcagcaagccacaaagaaattggatttatggtccctgcctccagtacttgtagtacatctcaagcgattttcttacagtcgatacatgagagacaagttggataccttagttgattttcctatcaatgacttggatatgtcggaattcttaattaatccaaatgcaggtccttgccgctataatctgattgctgtttccaaccactatggagggatgggaggaggacactatactgcttttgcaaaaaataaagatgatggaaaatggtactattttgatgacagtagtgtctccactgcatctgaagaccaaattgtgtccaaagcagcatatgtactcttctaccagagacaagacactttcagtggaactggcttttttcctcttgaccgagaaactaaaggtgcttcagctgccactggcatcccattagaaagtgatgaagatagcaatgataatgacaatgatatagaaaatgaaaactgtatgcacactaactaatgaaagtcctagaagccataaaagagacactttcctgctggtggtatctatggaaatgatgaagttacccaccacattaaaacaaaagtctgagatggggagtttcagataaccgaatgtaaatcctttatcagattttaacttgtgcagtacttgaagtgaaacacaatgaaaactttaacagaaattgtctcttaatacatttacagtcttgtatttacaagctaaatatatataggaaatcacaaataaatcccttttaagtttgctgctgttttgattaattatgtttcctttaattttttggatgtgagttgatgacaaatgttaaatttgtggatgttggtcatttattttgctctaataatactgcaagaaaactatggctgaacttagtttttggataatctagttcatgtgcattaggctgccgtatatactactatgatatttagctgcagtatcaatgtggcataaatactgcggcagcattcttcgaaaaccgcattttcaaatttatccccgtaatcaatgtgggcctattaaaaaaccaaatcatgatacaagaaacaaccttggaaaagttatttccctttgtaatacctttaaaaatccagagtattatattcattttactgccactgtggaaacaggttctagatttcatactccatctaaagtcatttttcagttacatgtaagtattatttactgctattgggatctattcttcagatattcaaaaacattttttgctttaaaatgcatatctttaattgggtgttggtccaaaattaaaatttttgctgtctgtttttctctaccccattttgtggtaatttggcaacttgagctctcccaattattgtaatataaggacagacataatagtattctgtacccatagtaataattgcatcaagcttagatgagaaatttttttcatatactggcctttaaatcattaatggacaattggctataaaggtaggtctgttaactttctttgtgtgttcctgatggaattcaccatagccttacagcttttctcagaaggtaacttgttataagagaaatggcatttgcatgttccagagtcagaacctgtacagtatataaagcataaacaccttgaatttgattttagttcaccacattcaaggatccaggatgccaaaaatatgtgtgaacatttgaaacatttttatttgctgctttttccctttgatatagttgaaagaatgtattgtaaattggcatacaatactgcctttaatagaaaacctaaatgctggggcacatttcacatatcgactacctgagaaattgctttgtgtcccactgttattaaagcaaaaagtataatgttcttcacttgaactaatcaaatacaatagattataaattgtgtattgtaaataaaagttcactctgtgagtgcacattttggtaaattatttatttatgttagcatttaaaagtttaaaaaaaatgcatttgaccaggataaatgaggtatgttgatcatggctttgctttatatcttgatattaaagctggtttatcatcctggtattttaaaagctgctttggggttttttttttcttttttttttttttaatgtaaactaacctcctgcatgacagaggttaaaattttgtctgcacttgagttcacttgagtttacatttgaaatgtgcatgtttatttatatagatttcaataaagctattcaaggccttatttagtcttttatttcttactcttaatcttttaataaaaatcccctactttatggttagatgactatatgctagactttttagttataaatagttaatactagaaaggaaattatgtcagagcaaaatgaatcctactattaaggacgttttaaagttgatttttgtccactttaatatttattcattaaacatatgtttgtgtaccaatcactgttgtagagtctggagatacagcagtaaacaaatatccttaccttcacagagcttacattctttctgccatctaccaactaatgaactatatttccatttttctgaagatttaaagaaaagtcaaagctaaatcttttaaacctatattgtggtctccatcctaattcttcagagaccactttctttttaatgcctgtcattaacttctgttcccactaaaagaagtgatgttaataatgccattgaaactgccaaactcaaatgtcatttttcagctgcaagaagtatactttaaaaatagtgcaaaaggataatacatattctaattaaaagtaggcattcagactgggcacggtggttcatgcctgtaatcccagcactttgggagactcaggcgggaggatcacttgagcccaggagtttgagaccagcctgagtaacatagtgagaacctcatctgtacaaatatatgtatttttttttaattagctgggtgtgcacacacctgtgttcccagctactggggaggctgaggtgagagaattgcttgagcccaggcagtcaaggccgcagttagccgaaatcacacccctgcactccagcctgtgcaacatagcaagactctgtctcaaaaaaaaaaaagatattcataggtaatacagggtaatgggaatatatctagactagaatttctacttctagctttgccacttagcaatcatatgactttgaacttaatctttgatagtgtttctttacctgtagaataatgatgataatagccagcatttattgagcacttactatggaccaggcactatattaaagtgtttatatgcattctctcatttaatcccacaacagctatgaggtagggatagttgtcatccccatttttcatatgaagaaaccaagatacaaagcatttaagtaatattcccaagctcacacaattgctatggggtagagccaatattctatcctcagatatatactacctctcactgtgttatagtgtctgcctcataggattgttgagagctcaaatgagatcatgtattttatgggaagagctttgtaaactttattacacactcactgatttcttcagtctaaatagaaagacatcttgaagtctaataactttgcttctaaaagtatatttagctcagtattcgagcattgaataagaaagtacccactggaatattgactaacccattcccttttaaaaattaatttcatttaatttatatacctttattacaattttaattaaatggtaaatacaatgtgacatttttttcttaccttttcatctaacttgtgtccccttctttccatttccccaaatgcaaccctgaatttcaggactttgtaaactctactctagttttgctttctgtttgtttgtttgtttgtttagagacaaggtctccctctgtcgcccaggctggagtgcagtgacataatcatagttcactgtaaccttgaactcctgggttaaagtgatcctcctgcctcagccttataatttagttttaattaacctccttgaaaaagttgcagcctggtgctttatttaaatatcttgctttctcataatctgtgttattttagtagtcctgtatttatccttgctttcctgacaactggatataaaactacacaaaacattgatttgggcacaaagaaaatcagtaagtaccaaaatagatacaacataaaggtggtggggttttttatgaactaatttgattgaagtgagtttatcttataaaataagccgggagactgaaatggagtctccttcagtggtacaccaaagggagtgtagggtgtagtaggagctctctgcctccgagaggaggaatatattagactgataacgtttaagtctgatgtatggtgacaagaaaaaggccaattttttgttttgttatttttaagttacctacagataatgcatttcattattgcctacttccaactctccctatgtagtatgtttctgatcttctgtgcttgtgcagtgtagatgagctcaccgctttaatttttaagatagaaatgtggaaaactcttgaatcatagactaggggaaggaaccagaggtcctctaaaatatcagaggagtgagaaggaaaggaagagctcctttctagggccatagaataagagtagaagtttttgctcattttttttgtttgtttttactttacaaaaaaataaaaaattttttgctctttgaataacttaacatgaggaatttggaaacaacctctcttgaaaatatattggtattcattcccaaataattcttctaagtaccacttgaccagaggatagggaaaggaggaaaaggtgagtgtatttatatccttgctagtttttgttatatattcagttgcagatctatattatatatcattttattatcagattttctagtgagaaatatatatgatggttttttaataatcattttaggtttggaggccatttcaattcaatatgtatgtgttttacgtgtttaattcgtatttactatatattaaaagaatttccaaatagctcagataagaaaactttggtttaaaattgagttattttataagctacatagaatacatcaaaattttataagctgcatagaataggctttaaaatatcagaattaggaaaataaaatatagatggtaaaaattcaaatatttatcaagacttttttcttcactaatgatggggtaaagaatttttaaatggataatataaaacagacagttcaaaaattatttttggaaaatatatgcatcgggaaacataccccacacggtgccatggtttaattattccccagctctacttttgggagcctggaacttgtcagggttgtgaaatagatctcagactattaaggacattcagaaactggctaagccattcaaggaaaatcaggaatttacgtaatatattggactacagtctcaaaggacagagagaaaatcagtcaaatgggttttgatatttttttttcctagaaatgtgtagcaaatgtgattttacaaagcagctaaaaatacaactatctctctggaattgaaaatgtgtaaaataagaccacacactttcaatatgcacaaaatatattttaaatgtttaagttgtattggtaatttactatgttctcctgtagaaaatcataattaaagttggtgctcgtgttgctaaagttttttttctcatgtcaggaacttgcagcttgttctatatagtttggtgaaacaaacaaaacagtttttatctgctgtgacatttaagtttgttgttagctggagttaaatctacatacataaaagtaaaacaataaatatggaaacatcccaacagtctttcccacaatgtgtattattacattattctcagtaatgacacatacttaacatttcccaagctgttgttttaaaccttaaacatcaccacatttctaatttttatttaaaatctttcagaattcttagattttgtaacatatcaagcacaagtctctcattaaaatttttttttaatagtatttgcttttcttttaaactccataaaggagtattcgatgttaacagacgtaactctttaatgctcctctgttcatgattaagtatgctaagttttaagtaatttagactaatgtattaaagtgttcacttatgtctagtcatatgcatacctactctcttctaaccttgagtcatttctattaaatacagcatttaatcttctttcaagtgagaaccatctttccattatatcaagtgggcaatatttaaattgtctgataagttcatccaaattaatcccatcatgcctgtttaactcatttccccaaaaagaccgcgacctccagccagtcattcagttcttgaactccctaatagaagcaccaaggattatctatttgtaatcacattgtggtgaattatcagtctcccaagaattatgtaaagcaaataggaattattttagagttgcccttattttaaaaaacaaaaaaaaagtaaagatgggaaaattacttatagtatttttttttaatttgagaaagaattcctgtaggtctcccttaaatagtgactttggtaaagctttttaatttctagaactcagagctatattcacttttgagctatgtacctattgtataagttgaagtaatactgcaaattcaaacagtaaacatcattaatcctagatatttgggtactacctacagtgagatatggtaggaaacattctacacttacaacaacttccaccatagctagctccaaacaggtcattaacctctgaattactgttttcacaaccataaaattatgctggtctcttgaaagtattagtttatgggtgtggagaggaaggcttaaatttcatttttgaagctgtcgttaaaagtatatatttttagcaaaggaattaataactaatagcattgatgagtcaagttaatatttgtttttgtttttttttttttttaattttgggcctcactcctataaaagacttggaacagaagtcttagtatgatggtaaacttgaaaattaaaattttatcagggatattagaatccaattatatgagactgcatcctcaacaggcaccttggttgcaacaccatgaaagaccttgatccagaggttctcagcaagccacacctgaattcctaacccacaaaaactgtgagataacagatgtttgtgtttttagctgctaagctttaatttgtttatgcagaaataagggaaaaggaccctagagatccttgaggaatcccactttacagatgtagaagctgagggctagaaggagaaaagtcatgtacacaaagtctggagacaactcagatagtcactacatcctcttgctctttctcatttttactctttaactggctcctcactttttagatggatggcactgggctctggagcaaaccatctgttctgtatctgttaaggcctctagagcttcattcattccttcatcaaatattttttgagtgtccactatgtgccaggcactattctagattcaagatataaagtaatatacaaaaacaaaatccagttacaaatataatttttaaagctatttgtgagcataacttcgtaacacatttagaacctttgccttcagctgacatgaattatgttgtctttttgttttttggtccagtttcattagtcattaaagtcatttgaattaaagacaataatccagactccagaggttatggcttttatgtgtttggatactgtcatagtctgctcaggctgccataacaaacacagactgggtggcttaaataacagaaatttatattttcacagttctggaggctgggaatctgagatcagggtaccagtatactgggtttctggtgagggtgcctttcctggcttacagatggctgccttctcactgtgttcttgcatggtagcagaggagggtcagagaggagagcaagctctgaggcatctcttttttataagggcactaatcccgtcatgaagccctcaccctcatgacctcatctaaacctaattatctcctaaagacttcctctccaaatactatttaaggcttcaacctgaatttggaggtgacacagttgagcccatagcagatatatttagtaacaactgtgggtacaggcatgcctcagatattgcaggttcggttcccagccaccataaatatttaaataaagtgagtcacaaattttttggtttcccagtgcatataaaaggcatatttaccctatactgtagtctattaactgcaataacattgtgcctaaaaaagatgtacatgccttaattttcaaactattgccaaaaaatgctaaataaccatcagagccttcagcaagtagtaatgtttttgctgatggacagtcttgcctcattttgatagatactcaccaggatggtggttgctgaaggttagggtggccgtggcaattttttacaataagacagtagtgaagtttgcttcatcaattgactcttccttttacaagagatttctctggcatgcagtgctatttgataatatttgatacccacagtagaacttctttccgaacttctttcacaattggagttaatcttctaaagccccgccactgcttcatcaactaagtttatggaatattctaaatcctttgttgtcttttcaacaatgttcacagcatcttcaccaggagaagactttccccccttcttttcacagatgttgagattgtcaagaaactactttccttgcccacccataagaagcaacttatcatctgttcaagttttatcataagattgcagcaatccagacacatcttcaggctccacttgtagttctcttgctattttcaccgcatctgcagttactgccgccactgaggttttgaacttctcaaagtcatgaaagttgtaattaacttctttcaaactcttgttaatgttgatattttgactcccatgaatcacaaatattctgaatgaatggcatccagaatagcaaatccttttcagaaggtttttattttgcccagatccatcagaggaatcactatctatgaaagcttttgccttataaaatgtatttcttggatgataagacttgaaagctgaagttattctttgatctatggctgcagaatggatgttgtgttagcaggcagaaaaacactaatctcatacatctccatagagctcttgggtgaccaggtgcacttgtcaatgagcagtaatattttgaaaggaatctttttctgagcaatagatctccgcagtgggcttaaaatatttagtaaaccttcctataaacggatgtgctaccatccaggctttatggttccttttatagagcaaaaacattatatttagtttaattttaaggaccctaggatttttggaatgataaatgaacattagttagcattgcattggcccctaacaagaaatcagtctctcgtttgaagccaagcatcaacttttctctagctatgaaagtcctggatgacatcttccaacataagactttcatctacattgaaagtttgtttttagtgtaactaccttcatcaatgatcttagctagatcttctggataacttgctgtagtttctactttagcagttgctgcttcaccttatgcttgtctgttgtggagacagcttgtttccttaaactccatgaatcaaccactgctagcttcagacttttcttctgcagcttccttaccttagcctccatagaattgaagagagagggccttgctctgcgttaggctttggcttaagatagtgttgtggctgatttgatctattaaaaaaaaaaaaactcaggctttctctataccacttttcttatgattcatgtgttcacttgagtagcacttttaatttcaggaactcttcctttggatatacaacttggctgtttggctcaagaggcctagctttcagcttgccttggctttcaacatgctttcctcactaagctccaatcatttatagcatttgattgagagagagagagagatgtacagctcttcacctgaacatttagaggccattggatggttattaactggcctggttttaatagtgttatgtctcagggaatagggaggcacatggagagggagagagatggggaatggccagtggagcagttggaacacacacgtctgtgccctcaaacaaaacagtaacatcaaagattactgatcacagatcaccgtaacagatacaataataatgaagacatttgaaatgtgagaagtaccaagatatgacacacacacagtaagcacattctgttaggaaaataacacctatagatgtgctcaatgtaggcttgccacaagccttgtttgtaaaaaaacaaaaacaattatcttcaaagcatgataataaagtgaagcagaataaaacaaggtatgcctggtttttgttttgttttgttttgagacaaggtctttctctgtcacccaggctggagtgcagtggcacaatctcatctcactgcagcctccagcctctgggctcaagtggtcctcccacctcagcctccgaagtagctgggtctacaggcatgtgccaccacaccacacctggctaatttttgtagagaccaggtttcaccatgttacccaggctggttttgaagtcttgaactcaggcgatccatccacctcggcctcccaaagtgctgggattacaggcatgaaccacagcacctggccatgtattttcatttaaccagtactaaataactacatgtctttggcagcctataatgtagcatcccatttttaaaaatagaagtgtgtattcagggtgcactcaataggattacatctggctggcagtcccttcctacttcagtccattatcctgctaccagaatgatcttcatggtttcatttaaaaaaaaaaaaaatgagatcctgtttctgtcttaaagttctcttctaattccttgtattaatcaggattctccagagaaacaagaccaataggatgcatatgtgtatacacatatatgtatagctctctccctcatatatacacatatcatgtatatacatatatatcatatatgtacatatatatatatatatatgagggagagaaagatttataaggaattagttcatgcacttaggctgagaagtctcatgatcttcagtcagcaggctggagacccaggaatgccaatggtgtagttcaagtccgagtccaaagggttgagaaccaggaaaaccaatgataaaagttccagtccacaagctacctggctaaagacccaggaagactgaatgtttcagttttagtgcaaaggcaggaaaagactgatgtcccagttcaatcaggcaagagaaattatccttacttgagccttttttgttctattcaggccttcaattcatgagagccaccaacattagagagggcaatctgccttactcagtctactgacttaaatgttaatctcatccaaaaacaccctcatagatatgcccagaataatgtttgaccacatatctgggcaccctgtggcccagtcaacacattaaataaaccatcacatcccttcatgtagaaaagagtggtttggaccataggctcaggagttaaaccacctctgagcctaccacttttgtgcaactcacctcacctctctgcctttcacctctctgtaaactagagcagctcccgaatgtccatctaggaaggcttggggtgagcaacctgattagaagggaacaatgtgacttaaaactgcatatttgcttagcaaacctatgacttttctcagaatatacagtttgcttgtgatggagggctattaatatttataaggaaaccaaatccccattcacttaagccatccactcctaccactgtaattgaatattacctacctttcagaataattgcaaggttttgtgtcttgatcattatgaaaaatgtggcaggtattattactaataaagaagtacccaactatgggaatgattgttccttccttatgaatgagagcagctctctgttcaatacgattcatactcaagttctaataaactttctttagcaagagagcaaagagtatggtacagtcagtccacccaggttgcctgttaacctggtgcttgaaggaaaaaaagtaagaatttgccctcatctaattcctcacttgccctcaaacatgtcatactacttgacaatggggctttcccacatttgtcccacatttgcatggtctgccttatctcttacctggcgaactcctacactccttcaagacttgctccaaaatgcacttgctagatcttctgacatcaactgccaccttgggctataagttacgtgtgtctcttcccccactagacaattacctgatggaagaatattgttcttaagatgttaagatggtgtatgtgtggcatagtatttgttcctaaatgtaaaagttattaaacaagttttctgaaa

SEQ ID NO: 197187 - DNA, 4748 bp, Homo sapiens
  Payload ID: 18883
  Gene Name: ubiquitin specific peptidase 15
  Uniprot ID: Q9Y4E8
  ENST ID: ENST00000280377
  CDS Start-End: 59-3004
atgctctggggcgtgccgccgccgtcgctgccacctcccctaccgctagtggaagaagatggcggaaggcggagcggcggatctggacacccagcggtctgacatcgcgacgctgctcaaaacctcgctccggaaaggggacacctggtacctagtcgatagtcgctggttcaaacagtggaaaaaatatgttggctttgacagttgggacaaataccagatgggagatcaaaatgtgtatcctggacccattgataactctggacttctcaaagatggtgatgcccagtcacttaaggaacaccttattgatgaattggattacatactgttgccaactgaaggttggaataaacttgtcagctggtacacattgatggaaggtcaagagccaatagcacgaaaggtggttgaacagggtatgtttgtaaagcactgcaaagtagaagtatatctcacagaattgaagctatgtgaaaatggaaacatgaataatgttgtaactcgaagatttagcaaagctgacacaatagatacaattgaaaaggaaataagaaaaatcttcagtattccagatgaaaaggagaccagattgtggaacaaatacatgagtaacacatttgaaccactgaataaaccagacagcaccattcaggatgctggtttataccaaggacaggtattagtgatagaacagaaaaatgaagatggaacatggccaaggggtccttctactcctaagtccccaggtgcatccaatttttcaactttaccaaagatctctccttcatctctatcaaataattataacaacatgaacaacagaaatgtgaaaaactcaaattactgtcttccatcatataccgcttataagaactatgattattcggaacctggaagaaacaatgaacagccaggcctctgtggcctaagtaacttgggaaatacgtgtttcatgaactcagctattcagtgtttgagcaacacacctccacttactgagtatttcctcaatgataagtatcaagaagaactgaattttgacaatcccttaggaatgagaggtgaaatagctaaatcttatgccgaactgatcaagcaaatgtggtctggaaagtttagctacgtcaccccaagagcctttaagacacaggtaggacgttttgcacctcagttctctggatatcagcagcaagactgtcaagaactgttagctttcctattagatggattacatgaggatttgaatagaattaggaaaaaaccatatatacaattaaaagatgcagatggaaggccagataaggtggttgccgaagaagcctgggaaaaccatttaaaacgaaatgattctatcatagtagatatatttcatggccttttcaaatcaactttagtttgtcctgagtgtgctaagatttcagtaacatttgatcctttttgttacttgacacttccattgcccatgaaaaaagaacgcaccttggaagtttacttagttagaatggatccacttaccaaacctatgcagtacaaagtggttgtccccaaaattggaaacatattagatctttgtacagcattgtctgctttgtcaggaatacctgcagataagatgatagttactgatatatacaatcatagatttcacagaatattcgctatggatgaaaaccttagtagtattatggaacgggatgatatttatgtgtttgaaattaacatcaataggacagaagatacagagcacgtgattattcctgtttgcctaagagaaaaattcagacactcgagttatacccaccatactggttcttcactttttggtcagccctttcttatggctgtaccacgaaacaatactgaagacaaactttataatctcctgctcttgagaatgtgccgatatgtcaaaatatctactgaaactgaagaaactgaaggatccctacactgctgtaaggaccaaaatattaatgggaatggcccaaatggcatacatgaagaaggctcaccaagtgaaatggaaacagatgagccagatgatgaatccagccaggatcaagaacttccctcagagaatgaaaacagtcagtctgaagattcagttggaggagataatgattctgaaaatggattatgtactgaggatacttgcaaaggtcaactcacgggacacaaaaaacgattgtttacattccagttcaacaacttaggcaatactgatatcaactacatcaaagatgataccaggcatataagatttgatgataggcagcttaggctagatgaaagatcttttcttgctttggattgggatcctgatttgaaaaaaagatattttgatgaaaatgctgctgaggactttgaaaaacatgaaagtgtggagtataaacctcctaaaaaaccctttgtgaaattaaaagattgcattgaactttttacaacaaaagaaaagctaggtgctgaagatccctggtattgtccgaattgtaaagaacatcagcaagccacaaagaaattggatttatggtccctgcctccagtacttgtagtacatctcaagcgattttcttacagtcgatacatgagagacaagttggataccttagttgattttcctatcaatgacttggatatgtcggaattcttaattaatccaaatgcaggtccttgccgctataatctgattgctgtttccaaccactatggagggatgggaggaggacactatactgcttttgcaaaaaataaagatgatggaaaatggtactattttgatgacagtagtgtctccactgcatctgaagaccaaattgtgtccaaagcagcatatgtactcttctaccagagacaagacactttcagtggaactggcttttttcctcttgaccgagaaactaaaggtgcttcagctgccactggcatcccattagaaagtgatgaagatagcaatgataatgacaatgatatagaaaatgaaaactgtatgcacactaactaatgaaagtcctagaagccataaaagagacactttcctgctggtggtatctatggaaatgatgaagttacccaccacattaaaacaaaagtctgagatggggagtttcagataaccgaatgtaaatcctttatcagattttaacttgtgcagtacttgaagtgaaacacaatgaaaactttaacagaaattgtctcttaatacatttacagtcttgtatttacaagctaaatatatataggaaatcacaaataaatcccttttaagtttgctgctgttttgattaattatgtttcctttaattttttggatgtgagttgatgacaaatgttaaatttgtggatgttggtcatttattttgctctaataatactgcaagaaaactatggctgaacttagtttttggataatctagttcatgtgcattaggctgccgtatatactactatgatatttagctgcagtatcaatgtggcataaatactgcggcagcattcttcgaaaaccgcattttcaaatttatccccgtaatcaatgtgggcctattaaaaaaccaaatcatgatacaagaaacaaccttggaaaagttatttccctttgtaatacctttaaaaatccagagtattatattcattttactgccactgtggaaacaggttctagatttcatactccatctaaagtcatttttcagttacatgtaagtattatttactgctattgggatctattcttcagatattcaaaaacattttttgctttaaaatgcatatctttaattgggtgttggtccaaaattaaaatttttgctgtctgtttttctctaccccattttgtggtaatttggcaacttgagctctcccaattattgtaatataaggacagacataatagtattctgtacccatagtaataattgcatcaagcttagatgagaaatttttttcatatactggcctttaaatcattaatggacaattggctataaaggtaggtctgttaactttctttgtgtgttcctgatggaattcaccatagccttacagcttttctcagaaggtaacttgttataagagaaatggcatttgcatgttccagagtcagaacctgtacagtatataaagcataaacaccttgaatttgattttagttcaccacattcaaggatccaggatgccaaaaatatgtgtgaacatttgaaacatttttatttgctgctttttccctttgatatagttgaaagaatgtattgtaaattggcatacaatactgcctttaatagaaaacctaaatgctggggcacatttcacatatcgactacctgagaaattgctttgtgtcccactgttattaaagcaaaaagtataatgttcttcacttgaactaatcaaatacaatagattataaattgtgtattgtaaataaaagttcactctgtgagtgcacattttggtaaattatttatttatgttagcatttaaaagtttaaaaaaaatgcatttgaccaggataaatgaggtatgttgatcatggctttgctttatatcttgatattaaagctggtttatcatcctggtattttaaaagctgctttggggttttttttttcttttttttttttttaatgtaaactaacctcctgcatgacagaggttaaaattttgtctgcacttgagttcacttgagtttacatttgaaatgtgcatgtttatttatatagatttcaataaagctattcaaggcctta

SEQ ID NO: 197188 - DNA, 2226 bp, Homo sapiens
  Payload ID: 18883
  Gene Name: ubiquitin specific peptidase 15
  Uniprot ID: Q9Y4E8
  ENST ID: ENST00000312635
  CDS Start-End: 19-726
taccgctagtggaagaagatggcggaaggcggagcggcggatctggacacccagcggtctgacatcgcgacgctgctcaaaacctcgctccggaaaggggacacctggtacctagtcgatagtcgctggttcaaacagtggaaaaaatatgttggctttgacagttgggacaaataccagatgggagatcaaaatgtgtatcctggacccattgataactctggacttctcaaagatggtgatgcccagtcacttaaggaacaccttattgatgaattggattacatactgttgccaactgaaggttggaataaacttgtcagctggtacacattgatggaaggtcaagagccaatagcacgaaaggtggttgaacagggtatgtttgtaaagcactgcaaagtagaagtatatctcacagaattgaagctatgtgaaaatggaaacatgaataatgttgtaactcgaagatttagcaaagctgacacaatagatacaattgaaaaggaaataagaaaaatcttcagtattccagatgaaaaggagaccagattgtggaacaaatacatgagtaacacatttgaaccactgaataaaccagacagcaccattcaggatgctggtttataccaaggacaggtattagtgatagaacagaaaaatgaagatggaacatggccaaggggtccttctactcctaaaaagccactagagcagagttgctagtgaacagtttaatttccacatacgtcacagaaagagagctaaagggctctggttatcatccacagactgaccagtcaacccctaaataacctgatattaactccacaaatgttagctagattggaccatgtgtaatctgagtcagaagtcggaatcagaagagataaatgatgcgttatcactcaacagtaatgtctgcaacagtattgtaaaattgttgtactttacctgtcgaccacatccatccttagctctctgatcaccttactatttaaggacagtccctctactctacctgtagtatttatctcaatgcttcctggtccttgctttttcttttattatctcctctctcctacatatataaatgcctagcatagtgccacacatatggtaaacaccagtttattatttttatttcttttctaatgtcatcttccccctcagcctatgaatataaacacatcttcatctttaaaaccaaaaaccatatacttcctccatttaccatccttaagcttttttttctttgacagccacctacatttaaaaggctatacttaatgttgcttgccacccattcaggatttaacaaagttcttatttgtctttcttttaacctagtttatttgacctgtctttagtatttctttttgataaccatcttctaaagaaattctctgaatttgaatgcatgatacgaccttttatgccaaggactttgcctctctgaccagtcctttgtctgtctagctcggttcctctttagggttgccacatttagttttgcaaattgtgcacagctctaggaggcatcattcatatcatatgtagtctatgtgataggccctccttggcacggtgcagtgcagcttcactaactgtttgcagcagctctactcagaccttaaatgcattgacattcactaaatttctgtcagaagacctcttttatcataccatagtaggtgttcaaaattaggtgattctatgctaatcctctcccccagctcaaactgacacaaaatatgccattctgtatttctagactagaccacttttctgaattccagatttttcataaatttcatgtaggactcaccacctcaaattaaaccaaatctttttacccctccttctcccatcccctcaacctaaactgtcttcatttcctgtattgcctatttcaagtaccatccaagagccatcctgagttcctcctccagcctttcttctcttgtctagttagtcagcaagtcttgcagattctgcctcctcacctgaagttttcaaacagtacccctttacattcttgaaaattattaaagatccaaagaacttctgttatatgggttatagctgttaatatttgtcatattcgaaattgaaataagattttaaggtattttaaaataacagtacaaaaccattgtattttgacatgaataacacttttatgaaaataactatattccaaaacaataaaattaccaaaaagtt

SEQ ID NO: 197189 - DNA, 816 bp, Homo sapiens
  Payload ID: 18883
  Gene Name: ubiquitin specific peptidase 15
  ENST ID: ENST00000548620
  CDS Start-End: 1-150
catcagcaagccacaaagaaattggatttatggtccctgcctccagtacttgtagtacatctcaagcgattttcttacagtcgatacatgagagacaagttggataccttagttgattttcctatcaaatactgcttttgcaaaaaataaagatgatggaaaatggtactattttgatgacagtagtgtctccactgcatctgaagaccaaattgtgtccaaagcagcatatgtactcttctaccagagacaagacactttcagtggaactggcttttttcctcttgaccgagaaactaaaggtgcttcagctgccactggcatcccattagaaagtgatgaagatagcaatgataatgacaatgatatagaaaatgaaaactgtatgcacactaactaatgaaagtcctagaagccataaaagagacactttcctgctggtggtatctatggaaatgatgaagttacccaccacattaaaacaaaagtctgagatggggagtttcagataaccgaatgtaaatcctttatcagattttaacttgtgcagtacttgaagtgaaacacaatgaaaactttaacagaaattgtctcttaatacatttacagtcttgtatttacaagctaaatatatataggaaatcacaaataaatcccttttaagtttgctgctgttttgattaattatgtttcctttaattttttggatgtgagttgatgacaaatgttaaatttgtggatgttggtcatttattttgctctaataatactgcaagaaaactatggctgaacttagtttttggataatctagttca

SEQ ID NO: 197190 - DNA, 579 bp, Homo sapiens
  Payload ID: 18883
  Gene Name: ubiquitin specific peptidase 15
  ENST ID: ENST00000548836
  CDS Start-End: 161-579
attatgcagtgcatgactgtatacagatggtcctcaacttaatgatggagttacagcctgctaaactcattagaaattgaaaatattgtacctagtcgatagtcgctggttcaaacagtggaaaaaatatgttggctttgacagttgggacaaataccagatgggagatcaaaatgtgtatcctggacccattgataactctggacttctcaaagatggtgatgcccagtcacttaaggaacaccttattgatgaattggattacatactgttgccaactgaaggttggaataaacttgtcagctggtacacattgatggaaggtcaagagccaatagcacgaaaggtggttgaacagggtatgtttgtaaagcactgcaaagtagaagtatatctcacagaattgaagctatgtgaaaatggaaacatgaataatgttgtaactcgaagatttagcaaagctgacacaatagatacaattgaaaaggaaataagaaaaatcttcagtattccagatgaaaaggagaccagattgtggaacaaatacatgagtaacacatttgaaccactgaataaacc

SEQ ID NO: 197191 - DNA, 533 bp, Homo sapiens
  Payload ID: 18883
  Gene Name: ubiquitin specific peptidase 15
  ENST ID: ENST00000552997
  CDS Start-End: 1-263
tagatacaattgaaaaggaaataagaaaaatcttcagtattccagatgaaaaggagaccagattgtggaacaaatacatgagtaacacatttgaaccactgaataaaccagacagcaccattcaggatgctggtttataccaaggacaggtattagtgatagaacagaaaaatgaagatggaacatggccaaggggtccttctactcctaactttgtgggccatatggtctctgtcataactataactgctgatgtagtatgaaagcagccttagacatcatgtcaagacatggcaatgcctgtgttccaataaagctttctttaaagccactagagcagagttgctagtgaacagtttaatttccacatacgtcacagaaagagagctaaagggctctggttatcatccacagactgaccagtcaacccctaaataacctgatattaactccacaaatgttagctagattggaccatgtgtaatctgagtcagaagtcggaatcagaagagataaatgatgcgttatcactc

SEQ ID NO: 197192 - DNA, 584 bp, Homo sapiens
  Payload ID: 18883
  Gene Name: ubiquitin specific peptidase 15
  ENST ID: ENST00000549523
  CDS Start-End: 60-584
aatgctctggggcgtgccgccgccgtcgctgccacctcccctaccgctagtggaagaagatggcggaaggcggagcggcggatctggacacccagcggtctgacatcgcgacgctgctcaaaacctcgctccggaaaggggacacctggtacctagtcgatagtcgctggttcaaacagtggaaaaaatatgttggctttgacagttgggacaaataccagatgggagatcaaaatgtgtatcctggacccattgataactctggacttctcaaagatggtgatgcccagtcacttaaggaacaccttattgatgaattggattacatactgttgccaactgaaggttggaataaacttgtcagctggtacacattgatggaaggtcaagagccaatagcacgaaagggagggagcatacttggaatgaaggtggttgaacagggtatgtttgtaaagcactgcaaagtagaagtatatctcacagaattgaagctatgtgaaaatggaaacatgaataatgttgtaactcgaagatttagcaaagctgacacaatagatacaattgaaaaggaaataagaaaa

SEQ ID NO: 197193 - DNA, 703 bp, Homo sapiens
  Payload ID: 18883
  Gene Name: ubiquitin specific peptidase 15
  ENST ID: ENST00000549415
  CDS Start-End: 1-474
gaaaagctaggtgctgaagatccctggtattgtccgaattgtaaagaacatcagcaagccacaaagaaattggatttatggtccctgcctccagtacttgtagtacatctcaagcgattttcttacagtcgatacatgagagacaagttggataccttagttgattttcctatcaatgacttggatatgtcggaattcttaattaatccaaatgcaggtccttgccgctataatctgattgctgtttccaaccactatggagggatgggaggaggacactatactgcttttgcaaaaaataaagatgatggaaaatggtactattttgatgacagtagtgtctccactgcatctgaagaccaaattgtgtgttgggcccataacccattaaaggccagtgagtccagaagggaagtctgctggtgtacttgtgggaagtttttctggaggaaagaaaaaatgatccttctttaacagatttctgtctacatgtgattcctggaatggcacagtggcatcttgggactgggcttgaagtgtgaaggtgtgttaaccttgagtatattcttttactttagtctttatgcctgataaccaaaactgtattcatctggggtggaaaatggccttttttctacttacttttatccctaaagcccacaagctttgcattgtaatatttgaacattaaaaacaaaaaaaa

SEQ ID NO: 197194 - DNA, 791 bp, Homo sapiens
  Payload ID: 18883
  Gene Name: ubiquitin specific peptidase 15
  ENST ID: ENST00000549237
  CDS Start-End: 1-722
gagcggcggatctggacacccagcggtctgacatcgcgacgctgctcaaaacctcgctccggaaaggggacacctggtacctagtcgatagtcgctggttcaaacagtggaaaaaatatgttggctttgacagttgggacaaataccagatgggagatcaaaatgtgtatcctggacccattgataactctggacttctcaaagatggtgatgcccagtcacttaaggaacaccttattgatgaattggattacatactgttgccaactgaaggttggaataaacttgtcagctggtacacattgatggaaggtcaagagccaatagcacgaaaggtggttgaacagggtatgtttgtaaagcactgcaaagtagaagtatatctcacagaattgaagctatgtgaaaatggaaacatgaataatgttgtaactcgaagatttagcaaagctgacacaatagatacaattgaaaaggaaataagaaaaatcttcagtattccagatgaaaaggagaccagattgtggaacaaatacatgagtaacacatttgaaccactgaataaaccagacagcaccattcaggatgctggtttataccaaggacaggtattagtgatagaacagaaaaatgaagatggaacatggccaaggggtccttctactcctaacacaatatcatttttatttattccaacaactttagtacttggctttgtgtgaaagaaaacagaattccctatgtaatacccaacacaccatactcatgcaataaatattggtgaatacagg

SEQ ID NO: 197195 - DNA, 799 bp, Homo sapiens
  Payload ID: 18883
  Gene Name: ubiquitin specific peptidase 15
  ENST ID: ENST00000546694
  CDS Start-End: 480-799
gtgtagactgacaaaatgtaaatgttgtgagtaagtcttaagatggactgttgaaaacattaataataatttttatggagttgaaaatgtgtatagaattaactacacaatagtgttagcatgtaagttaagataatattctctactatgttccctggtgatccccagctcctcatatccatattcttgggcactcttcttccatgttgtactgaggttggtctgtgtggccaatagcatatagcagtactcatggtacatcgctttcgagattaggttataaaaaaacaccgcggcttacatcttgggtgcacacgcactctagctgtctctctttctcatttctcactcggggaattcaactgcatatggcgaggacactcaggcagcctatggagaggcccacatggtgaggaactgagatctctggccaatagagaggaacggaggcctgcaacaaccatgtggttgaacagggtatgtttgtaaagcactgcaaagtagaagtatatctcacagaattgaagctatgtgaaaatggaaacatgaataatgttgtaactcgaagatttagcaaagctgacacaatagatacaattgaaaaggaaataagaaaaatcttcagtattccagatgaaaaggagaccagattgtggaacaaatacatgagtaacacatttgaaccactgaataaaccagacagcaccattcaggatgctggtttataccaaggacaggtattagtgatagaacagaaaaatgaagatggaacatggccaaggggtccttctactcctaa

SEQ ID NO: 197196 - DNA, 3004 bp, Homo sapiens
  Payload ID: 18884
  Gene Name: ubiquitin specific peptidase 16
  Uniprot ID: Q9Y5T5
  ENST ID: ENST00000334352
  CDS Start-End: 232-2703
attgctttccaggggtcactctggcttcgactccgtcgctctcaattcgtcaccaggaggaagacggagctggctgcccagcccaaaggcccatgaggggatgcagttatgggctctgtcgccgtggaacttgtttgcttcattcttatgtacctacctttgcaccttgtaatcatcctttatgcctcagattgttattttgtgtcagtaagtaatccataaagtgccaacatgggaaagaaacggacaaagggaaaaactgttccaatcgatgattcctctgaaactttagaacctgtgtgcagacacattagaaaaggattggaacaaggtaatttgaaaaaggctttagtgaatgtggaatggaatatctgccaagactgtaagactgacaataaagtgaaagataaagctgaagaagaaacagaagaaaagccttcagtttggctgtgtcttaaatgtggccatcagggctgtggcagaaattctcaggagcagcatgccttgaagcactatctgacgccaagatctgaacctcactgtctggttcttagtttggacaactggagtgtatggtgttacgtatgtgataatgaggtccagtattgtagttcaaaccagttgggtcaagtggttgattatgtcagaaaacaagccagcattacaactccaaagccagcagagaaagataatggaaatattgaacttgaaaataaaaaattagaaaaagagagtaagaatgaacaagagagagaaaagaaggaaaacatggctaaagagaatcctcccatgaattctccttgccaaataaccgtgaaaggactcagtaatttgggaaacacatgtttcttcaatgcagttatgcagaacttgtcacaaacaccagtgcttagagaactactaaaagaagtgaaaatgtctggaacaattgtaaaaattgaaccacctgatttggcattaacagaaccattagaaataaaccttgagcctccaggccctcttactttagccatgagccagtttcttaatgagatgcaagagaccaaaaagggggttgtgacaccgaaagaactcttttctcaggtctgtaaaaaagcagtgcggtttaaaggctatcagcagcaagacagccaggagctgcttcgctacttattggatgggatgagagcagaagaacaccaaagagtgagtaaaggaatacttaaagcatttggtaattctactgaaaagttggatgaagaactaaaaaataaagttaaagattatgagaagaaaaaatcaatgccaagttttgttgaccgcatctttggtggtgaactaactagtatgatcatgtgtgatcaatgcagaactgtctccttggttcatgaatctttccttgatttgtccctcccagttttagatgatcagagtggtaagaaaagtgtaaatgataaaaatctgaaaaagacagtggaggatgaagatcaagatagtgaggaagaaaaagataacgacagttacataaaagagagaagtgatattccttctggaacaagtaagcacttacagaaaaaagcaaagaaacaagccaaaaagcaagccaagaaccaacgaagacaacaaaaaattcaaggaaaagttcttcatttaaatgatatttgtactattgaccatcctgaagacagtgaatatgaagctgaaatgtcacttcaaggagaagtaaatattaaatccaaccatatttcacaagagggtgttatgcataaagaatattgtgtcaaccagaaagatttgaatggccaagcaaaaatgatcgaaagtgtaactgacaatcaaaaatccacagaggaagtagatatgaaaaatatcaacatggataatgatctggaggttttaacatcttctcccactaggaatttaaatggtgcctacctaacggaagggagcaatggagaagtggacatttccaatggtttcaaaaacctaaatttgaatgctgctcttcatcctgatgaaataaatatagagattctgaatgatagtcatactcctggaacaaaggtgtatgaggttgtaaatgaagatccagaaactgctttctgtactcttgcaaacagggaagttttcaatactgatgagtgttcaatccaacattgtttatatcagttcacccgtaatgagaaacttcgagatgcgaataaactgctttgtgaagtatgcacacggagacagtgtaatggaccaaaggcaaatataaaaggtgaaaggaagcatgtttacaccaatgccaaaaagcagatgctaatttctcttgctcctcctgttcttactcttcatttaaagagatttcagcaggctggttttaacctacgcaaagttaacaaacacataaagtttccggaaatcttagatttggctcctttttgcacccttaaatgtaagaatgttgcagaagaaaatacaagggtactctattccttatatggagttgttgaacacagtggtactatgaggtcggggcattacactgcctatgccaaggcaagaaccgcaaatagtcatctctctaatcttgttcttcacggtgatattccacaagattttgaaatggaatcaaaagggcagtggtttcacatcagcgacacacatgtgcaagctgtgcctacaactaaagtactaaactcacaagcgtacctcctattttatgagagaatactgtaataatatcaaaagcactttttctggaaacacatttatggcttttataatggctgaaataacgataaaaaaagactaattaaaatcatgttcacttaacattaaatacatgccagaagaaatcatgtttatttaaatattgaagggaaaaatacctaaaaatgtacaaaggttttatattgtcatagtggtttttattcctgctttgtttctggaaaggaaatcctgaattacttaagtactttgtgtttaatatatctgggtgatggatcacaacacatcaataaactgacttaccctaaaa

SEQ ID NO: 197197 - DNA, 581 bp, Homo sapiens
  Payload ID: 18884
  Gene Name: ubiquitin specific peptidase 16
  ENST ID: ENST00000399973
  CDS Start-End: 259-581
tttccaggggtcactctggcttcgactccgtcgctctcaattcgtcaccaggaggaagacggagctggctgcccagcccaaaggcccatgaggggatgcagttatgggctctgtcgccgtggagatagagtgtcgctttgttgcccaggctagtcttgaacttctggcctcaagccgtcctcccacctcgatctcccaaagtgttgggattacaggcattgttattttgtgtcagtaagtaatccataaagtgccaacatgggaaagaaacggacaaagggaaaaactgttccaatcgatgattcctctgaaactttagaacctgtgtgcagacacattagaaaaggattggaacaaggtaatttgaaaaaggctttagtgaatgtggaatggaatatctgccaagactgtaagactgacaataaagtgaaagataaagctgaagaagaaacagaagaaaagccttcagtttggctgtgtcttaaatgtggccatcagggctgtggcagaaattctcaggagcagcatgccttgaagcactatctgacgccaagatctgaacctcactgtctggttcttag

SEQ ID NO: 197198 - DNA, 2960 bp, Homo sapiens
  Payload ID: 18884
  Gene Name: ubiquitin specific peptidase 16
  Uniprot ID: Q9Y5T5
  ENST ID: ENST00000399975
  CDS Start-End: 191-2659
ataatgccgcgttccggaagttattgctttccaggggtcactctggcttcgactccgtcgctctcaattcgtcaccaggaggaagacggagctggctgcccagcccaaaggcccatgaggggatgcagttatgggctctgtcgccgtggattgttattttgtgtcagtaagtaatccataaagtgccaacatgggaaagaaacggacaaagggaaaaactgttccaatcgatgattcctctgaaactttagaacctgtgtgcagacacattagaaaaggattggaacaaggtaatttgaaaaaggctttagtgaatgtggaatggaatatctgccaagactgtaagactgacaataaagtgaaagataaagctgaagaagaaacagaagaaaagccttcagtttggctgtgtcttaaatgtggccatcagggctgtggcagaaattctcaggagcagcatgccttgaagcactatctgacgccaagatctgaacctcactgtctggttcttagtttggacaactggagtgtatggtgttacgtatgtgataatgaggtccagtattgtagttcaaaccagttgggtcaagtggttgattatgtcagaaaacaagccagcattacaactccaaagccagagaaagataatggaaatattgaacttgaaaataaaaaattagaaaaagagagtaagaatgaacaagagagagaaaagaaggaaaacatggctaaagagaatcctcccatgaattctccttgccaaataaccgtgaaaggactcagtaatttgggaaacacatgtttcttcaatgcagttatgcagaacttgtcacaaacaccagtgcttagagaactactaaaagaagtgaaaatgtctggaacaattgtaaaaattgaaccacctgatttggcattaacagaaccattagaaataaaccttgagcctccaggccctcttactttagccatgagccagtttcttaatgagatgcaagagaccaaaaagggggttgtgacaccgaaagaactcttttctcaggtctgtaaaaaagcagtgcggtttaaaggctatcagcagcaagacagccaggagctgcttcgctacttattggatgggatgagagcagaagaacaccaaagagtgagtaaaggaatacttaaagcatttggtaattctactgaaaagttggatgaagaactaaaaaataaagttaaagattatgagaagaaaaaatcaatgccaagttttgttgaccgcatctttggtggtgaactaactagtatgatcatgtgtgatcaatgcagaactgtctccttggttcatgaatctttccttgatttgtccctcccagttttagatgatcagagtggtaagaaaagtgtaaatgataaaaatctgaaaaagacagtggaggatgaagatcaagatagtgaggaagaaaaagataacgacagttacataaaagagagaagtgatattccttctggaacaagtaagcacttacagaaaaaagcaaagaaacaagccaaaaagcaagccaagaaccaacgaagacaacaaaaaattcaaggaaaagttcttcatttaaatgatatttgtactattgaccatcctgaagacagtgaatatgaagctgaaatgtcacttcaaggagaagtaaatattaaatccaaccatatttcacaagagggtgttatgcataaagaatattgtgtcaaccagaaagatttgaatggccaagcaaaaatgatcgaaagtgtaactgacaatcaaaaatccacagaggaagtagatatgaaaaatatcaacatggataatgatctggaggttttaacatcttctcccactaggaatttaaatggtgcctacctaacggaagggagcaatggagaagtggacatttccaatggtttcaaaaacctaaatttgaatgctgctcttcatcctgatgaaataaatatagagattctgaatgatagtcatactcctggaacaaaggtgtatgaggttgtaaatgaagatccagaaactgctttctgtactcttgcaaacagggaagttttcaatactgatgagtgttcaatccaacattgtttatatcagttcacccgtaatgagaaacttcgagatgcgaataaactgctttgtgaagtatgcacacggagacagtgtaatggaccaaaggcaaatataaaaggtgaaaggaagcatgtttacaccaatgccaaaaagcagatgctaatttctcttgctcctcctgttcttactcttcatttaaagagatttcagcaggctggttttaacctacgcaaagttaacaaacacataaagtttccggaaatcttagatttggctcctttttgcacccttaaatgtaagaatgttgcagaagaaaatacaagggtactctattccttatatggagttgttgaacacagtggtactatgaggtcggggcattacactgcctatgccaaggcaagaaccgcaaatagtcatctctctaatcttgttcttcacggtgatattccacaagattttgaaatggaatcaaaagggcagtggtttcacatcagcgacacacatgtgcaagctgtgcctacaactaaagtactaaactcacaagcgtacctcctattttatgagagaatactgtaataatatcaaaagcactttttctggaaacacatttatggcttttataatggctgaaataacgataaaaaaagactaattaaaatcatgttcacttaacattaaatacatgccagaagaaatcatgtttatttaaatattgaagggaaaaatacctaaaaatgtacaaaggttttatattgtcatagtggtttttattcctgctttgtttctggaaaggaaatcctgaattacttaagtactttgtgtttaatatatctgggtgatggatcacaacacatcaataaactgacttaccctaaaa

SEQ ID NO: 197199 - DNA, 2963 bp, Homo sapiens
  Payload ID: 18884
  Gene Name: ubiquitin specific peptidase 16
  Uniprot ID: Q9Y5T5
  ENST ID: ENST00000399976
  CDS Start-End: 191-2662
ataatgccgcgttccggaagttattgctttccaggggtcactctggcttcgactccgtcgctctcaattcgtcaccaggaggaagacggagctggctgcccagcccaaaggcccatgaggggatgcagttatgggctctgtcgccgtggattgttattttgtgtcagtaagtaatccataaagtgccaacatgggaaagaaacggacaaagggaaaaactgttccaatcgatgattcctctgaaactttagaacctgtgtgcagacacattagaaaaggattggaacaaggtaatttgaaaaaggctttagtgaatgtggaatggaatatctgccaagactgtaagactgacaataaagtgaaagataaagctgaagaagaaacagaagaaaagccttcagtttggctgtgtcttaaatgtggccatcagggctgtggcagaaattctcaggagcagcatgccttgaagcactatctgacgccaagatctgaacctcactgtctggttcttagtttggacaactggagtgtatggtgttacgtatgtgataatgaggtccagtattgtagttcaaaccagttgggtcaagtggttgattatgtcagaaaacaagccagcattacaactccaaagccagcagagaaagataatggaaatattgaacttgaaaataaaaaattagaaaaagagagtaagaatgaacaagagagagaaaagaaggaaaacatggctaaagagaatcctcccatgaattctccttgccaaataaccgtgaaaggactcagtaatttgggaaacacatgtttcttcaatgcagttatgcagaacttgtcacaaacaccagtgcttagagaactactaaaagaagtgaaaatgtctggaacaattgtaaaaattgaaccacctgatttggcattaacagaaccattagaaataaaccttgagcctccaggccctcttactttagccatgagccagtttcttaatgagatgcaagagaccaaaaagggggttgtgacaccgaaagaactcttttctcaggtctgtaaaaaagcagtgcggtttaaaggctatcagcagcaagacagccaggagctgcttcgctacttattggatgggatgagagcagaagaacaccaaagagtgagtaaaggaatacttaaagcatttggtaattctactgaaaagttggatgaagaactaaaaaataaagttaaagattatgagaagaaaaaatcaatgccaagttttgttgaccgcatctttggtggtgaactaactagtatgatcatgtgtgatcaatgcagaactgtctccttggttcatgaatctttccttgatttgtccctcccagttttagatgatcagagtggtaagaaaagtgtaaatgataaaaatctgaaaaagacagtggaggatgaagatcaagatagtgaggaagaaaaagataacgacagttacataaaagagagaagtgatattccttctggaacaagtaagcacttacagaaaaaagcaaagaaacaagccaaaaagcaagccaagaaccaacgaagacaacaaaaaattcaaggaaaagttcttcatttaaatgatatttgtactattgaccatcctgaagacagtgaatatgaagctgaaatgtcacttcaaggagaagtaaatattaaatccaaccatatttcacaagagggtgttatgcataaagaatattgtgtcaaccagaaagatttgaatggccaagcaaaaatgatcgaaagtgtaactgacaatcaaaaatccacagaggaagtagatatgaaaaatatcaacatggataatgatctggaggttttaacatcttctcccactaggaatttaaatggtgcctacctaacggaagggagcaatggagaagtggacatttccaatggtttcaaaaacctaaatttgaatgctgctcttcatcctgatgaaataaatatagagattctgaatgatagtcatactcctggaacaaaggtgtatgaggttgtaaatgaagatccagaaactgctttctgtactcttgcaaacagggaagttttcaatactgatgagtgttcaatccaacattgtttatatcagttcacccgtaatgagaaacttcgagatgcgaataaactgctttgtgaagtatgcacacggagacagtgtaatggaccaaaggcaaatataaaaggtgaaaggaagcatgtttacaccaatgccaaaaagcagatgctaatttctcttgctcctcctgttcttactcttcatttaaagagatttcagcaggctggttttaacctacgcaaagttaacaaacacataaagtttccggaaatcttagatttggctcctttttgcacccttaaatgtaagaatgttgcagaagaaaatacaagggtactctattccttatatggagttgttgaacacagtggtactatgaggtcggggcattacactgcctatgccaaggcaagaaccgcaaatagtcatctctctaatcttgttcttcacggtgatattccacaagattttgaaatggaatcaaaagggcagtggtttcacatcagcgacacacatgtgcaagctgtgcctacaactaaagtactaaactcacaagcgtacctcctattttatgagagaatactgtaataatatcaaaagcactttttctggaaacacatttatggcttttataatggctgaaataacgataaaaaaagactaattaaaatcatgttcacttaacattaaatacatgccagaagaaatcatgtttatttaaatattgaagggaaaaatacctaaaaatgtacaaaggttttatattgtcatagtggtttttattcctgctttgtttctggaaaggaaatcctgaattacttaagtactttgtgtttaatatatctgggtgatggatcacaacacatcaataaactgacttaccctaaaa

SEQ ID NO: 197200 - DNA, 1593 bp, Homo sapiens
  Payload ID: 18885
  Gene Name: ubiquitin specific peptidase 17-like family member 1
  Uniprot ID: Q7RTZ2
  ENST ID: ENST00000529559
  CDS Start-End: 1-1593
atgggggacgactcactctacttgggaggtgagtggcagttcaaccacttttcaaaactcacatcttctcggccagatgcagcttttgctgaaatccagcggacttctctccctgagaagtcaccactctcatctgagacccgtgtcgacctctgtgatgatttggctcctgtggcaagacagctcgctcccagggagaagcttcctctgagtagcaggagacctgctgcggtgggggctgggctccagaatatgggaaatacctgctacgagaacgcttccctgcagtgcctgacatacacactgccccttgccaactacatgctgtcccgggagcactctcaaacatgtcagcgtcccaagtgctgcatgctctgtactatgcaagctcacatcacatgggccctccacagtcctggccatgtcatccagccctcacaggcattggctgctggcttccatagaggcaagcaggaagatgtccatgaatttctcatgttcactgtggatgccatgaaaaaggcatgccttcccggccacaagcaggtagatcatcactgcaaggacaccaccctcatccaccaaatatttggaggctgctggagatctcaaatcaagtgtctccactgccacgggatttcagacacttttgacccttacctggacatcgccctggatatccaggcagctcagagtgtcaagcaagctttggaacagttggtgaagcccgaagaactcaatggagagaatgcctatcattgcggtctttgtctccagagggcgccggcctccaacacgttaactttacacacttctgccaaggtcctcatccttgtcttgaagagattctccgatgtcgcaggcaacaaacttgccaagaatgtgcaatatcctgagtgccttgacatgcagccatacatgtctcagcagaacacaggacctcttgtctatgtcctctatgctgtgctggtccacgctgggtggagttgtcacgacggacattacttctcctatgtcaaagctcaagaagtccagtggtataaaatggatgatgccgaggtcactgtctgtagcatcatttctgtcctgagtcaacaggcctatgtcctcttttacatccagaagagtgaatgggaaagacacagtgagagtgtgtcaagaggcagggaaccaagagccctcggcgctgaagacacagacaggcgagcaaagcaaggagagctcaagagagaccacccctgcctccaggcacccgagttggacgagcacttggtggaaagagccactcaggaaagcaccttagaccactggaaattcctgcaagagcaaaacaaaacgaagcctgagttcaacgtcggaaaagtcgaaggtaccctgcctcccaacgcacttgtgattcatcaatcaaaatacaagtgtgggatgaaaaaccatcatcctgaacagcaaagctccctgctaaacctctcttcgacgacccggacagatcaggagtccatgaacactggcacactcgcttctctgcaagggaggaccaggagagccaaagggaagaacaaacacagcaagagggctctgcttgtgtgccagtga

SEQ ID NO: 197201 - DNA, 1677 bp, Homo sapiens
  Payload ID: 18886
  Gene Name: ubiquitin specific peptidase 17-like family member 10
  ENST ID: ENST00000421288
  CDS Start-End: 1-1677
atggaggacgactcactctacttgggaggtgagtggcagttcaaccacttttcaaaactcacatcttctcggccagatgcagcttttgctgaaatccagcgtacttctctccctgagaagtcaccactctcatgtgagacccgtgtcgacctctgtgatgatttggctcctgtggcaagacagcttgctcccagggagaagcctcctctgagtagcaggagacctgctgcggtgggggctgggctccagaatatgggaaatacctgctacgtgaacgcttccctgcagtgcctgacatacaaaccgccacttgccaactacatgctgttccgggagcactctcaaacgtgtcatcgtcacaagggctgcatgctctgtactatgcaagctcacatcacaagggccctccacattcctggccatgtcatccagccctcacaggcattggctgctggcttccatagaggcaagcaggaagatgcccatgaatttctcatgttcactgtggatgccatgagaaaggcatgccttcccgggcacaagcaggtagatcgtcactctaaggacaccaccctcatccaccaaatatttggaggctactggagatctcaaatcaagtgtctccactgccacggcatttcagacacttttgacccttacctggacatcgccctggatatccaggcagctcagagtgtccagcaagctttggaacagttggtgaagcccgaagaactcaatggagagaatgcctatcattgtggtgtttgtctccagagggcgccggcctccaagacgttaactttacacaactctgccaaggtcctcatccttgtattgaagagattccccgatgtcacaggcaacaaaattgccaagaatgtgcaatatcctgagtgccttgacatgcagccatacatgtctcagcagaacacaggacctctcgtctatgtcctctatgctgtgctggtccacgctgggtggagttgtcacaacggacattactcctcttatgtcaaagctcaagaaggccagtggtataaaatggatgatgccgaggtcaccgcctctagcatcacttctgtcctgagtcaacaggcctacgtcctcttttacatccagaagagtgaatgggaaagacacagtgagagtgtgtcaagaggcagggaaccaagagcccttggcgtagaagacacagacaggcgagcaacgcaaggagagctcaagagagaccacccctgcctccaggcccccgagttggacgagcacttggtggaaagagccactcaggaaagcaccttagaccactggaaattccttcaagagcaaaacaaaacgaagcctgagttcaacgtcagaagagtcgaaggtacggtgcctcccgacgtacttgtgattcatcaatcaaaatacaagtgtcggatgaagaaccatcatcctgaacagcaaagctccctgctaaacctctcttcgacgaccccgacagatcaggagtccatgaacactggcacactcgcttccctacgagggaggaccaggagatccaaagggaagaacaaacacagcaagagggctctgcttgtgtgccagtctcagtggaagtaccgacccacacgtgacattcagtgtgtatttatgaatatgacctaccgacgtgtaggtttgcgtgtgaggtaa

SEQ ID NO: 197202 - DNA, 1593 bp, Homo sapiens
  Payload ID: 18886
  Gene Name: ubiquitin specific peptidase 17-like family member 10
  Uniprot ID: C9JJH3
  ENST ID: ENST00000417945
  CDS Start-End: 1-1593
atggaggacgactcactctacttgggaggtgagtggcagttcaaccacttttcaaaactcacatcttctcggccagatgcagcttttgctgaaatccagcgtacttctctccctgagaagtcaccactctcatgtgagacccgtgtcgacctctgtgatgatttggctcctgtggcaagacagcttgctcccagggagaagcctcctctgagtagcaggagacctgctgcggtgggggctgggctccagaatatgggaaatacctgctacgtgaacgcttccctgcagtgcctgacatacaaaccgccacttgccaactacatgctgttccgggagcactctcaaacgtgtcatcgtcacaagggctgcatgctctgtactatgcaagctcacatcacaagggccctccacattcctggccatgtcatccagccctcacaggcattggctgctggcttccatagaggcaagcaggaagatgcccatgaatttctcatgttcactgtggatgccatgagaaaggcatgccttcccgggcacaagcaggtagatcgtcactctaaggacaccaccctcatccaccaaatatttggaggctactggagatctcaaatcaagtgtctccactgccacggcatttcagacacttttgacccttacctggacatcgccctggatatccaggcagctcagagtgtccagcaagctttggaacagttggtgaagcccgaagaactcaatggagagaatgcctatcattgtggtgtttgtctccagagggcgccggcctccaagacgttaactttacacaactctgccaaggtcctcatccttgtattgaagagattccccgatgtcacaggcaacaaaattgccaagaatgtgcaatatcctgagtgccttgacatgcagccatacatgtctcagcagaacacaggacctctcgtctatgtcctctatgctgtgctggtccacgctgggtggagttgtcacaacggacattactcctcttatgtcaaagctcaagaaggccagtggtataaaatggatgatgccgaggtcaccgcctctagcatcacttctgtcctgagtcaacaggcctacgtcctcttttacatccagaagagtgaatgggaaagacacagtgagagtgtgtcaagaggcagggaaccaagagcccttggcgtagaagacacagacaggcgagcaacgcaaggagagctcaagagagaccacccctgcctccaggcccccgagttggacgagcacttggtggaaagagccactcaggaaagcaccttagaccactggaaattccttcaagagcaaaacaaaacgaagcctgagttcaacgtcagaagagtcgaaggtacggtgcctcccgacgtacttgtgattcatcaatcaaaatacaagtgtcggatgaagaaccatcatcctgaacagcaaagctccctgctaaacctctcttcgacgaccccgacagatcaggagtccatgaacactggcacactcgcttccctacgagggaggaccaggagatccaaagggaagaacaaacacagcaagagggctctgcttgtgtgccagtga

SEQ ID NO: 197203 - DNA, 1593 bp, Homo sapiens
  Payload ID: 18887
  Gene Name: ubiquitin specific peptidase 17-like family member 11
  Uniprot ID: C9JVI0
  ENST ID: ENST00000457736
  CDS Start-End: 1-1593
atggaggacgactcactctacttgggaggtgagtggcagttcaaccacttttcaaaactcacatcttctcggcccgatgcagcttttgctgaaatccagcggacttctctccctgagaagtcaccactctcatgtgagacccgtgtcgacctctgtgatgatttggctcctgtggcaagacagcttgctcccagggagaagcttcctctgagtagcaggagacctgctgcggtgggggctgggctccagaatatgggaaatacctgctacgtgaacgcttccttgcagtgcctgacatacacaccgccccttgccaactacatgctgtcccgggagcactctcaaacgtgtcatcgtcacaagggctgcatgctctgtacgatgcaagctcacatcacacgggccctccacaatcctggccacgtcatccagccctcacaggcattggctgctggcttccatagaggcaagcaggaagatgcccatgaatttctcatgttcactgtggatgccatgaaaaaggcatgccttcccgggcacaagcaggtggatcatcactctaaggacaccaccctcatccaccaaatatttggaggctactggagatctcaaatcaagtgtctccactgccacggcatttcagacacttttgacccttacctggacatcgccctggatatccaggcagctcagagtgtccagcaagctttggaacagttggtgaagcccgaagaactcaatggagagaatgcctatcattgtggtgtttgtctccagagggcgccggcctccaagacgttaactttacacacctctgccaaggtcctcatccttgtattgaagagattctccgatgtcacaggcaacaagattgccaagaatgtgcaatatcctgagtgccttgacatgcagccatacatgtctcagacgaacacaggacctctcgtctatgtcctctatgctgtgctggtccacgctgggtggagttgtcacaacggacattacttctcttatgtcaaagctcaagaaggccagtggtataaaatggatgatgccgaggtcaccgcctctagcatcacttctgtcctgagtcaacaggcctacgtcctcttttacatccagaagagtgaatgggaaagacacagtgagagtgtgtcaagaggcagggaaccaagagcccttggcgcagaagacacagacaggcgagcaacgcaaggagagctcaagagagaccacccctgcctccaggcccccgagttggacgagcacttggtggaaagagccactcaggaaagcaccttagaccactggaaattccttcaagagcaaaacaaaacgaagcctgagttcaacgtcagaaaagtcgaaggtaccctgcctcccgacgtacttgtgattcatcaatcaaaatacaagtgtgggatgaagaaccatcatcctgaacagcaaagctccctgctaaacctctcttcgacgaccccgacacatcaggagtccatgaacactggcacactcgcttccctgcgagggagggccaggagatccaaagggaagaacaaacacagcaagagggctctgcttgtgtgccagtga

SEQ ID NO: 197204 - DNA, 1677 bp, Homo sapiens
  Payload ID: 18887
  Gene Name: ubiquitin specific peptidase 17-like family member 11
  ENST ID: ENST00000613973
  CDS Start-End: 1-1677
atggaggacgactcactctacttgggaggtgagtggcagttcaaccacttttcaaaactcacatcttctcggcccgatgcagcttttgctgaaatccagcggacttctctccctgagaagtcaccactctcatgtgagacccgtgtcgacctctgtgatgatttggctcctgtggcaagacagcttgctcccagggagaagcttcctctgagtagcaggagacctgctgcggtgggggctgggctccagaatatgggaaatacctgctacgtgaacgcttccttgcagtgcctgacatacacaccgccccttgccaactacatgctgtcccgggagcactctcaaacgtgtcatcgtcacaagggctgcatgctctgtacgatgcaagctcacatcacacgggccctccacaatcctggccacgtcatccagccctcacaggcattggctgctggcttccatagaggcaagcaggaagatgcccatgaatttctcatgttcactgtggatgccatgaaaaaggcatgccttcccgggcacaagcaggtggatcatcactctaaggacaccaccctcatccaccaaatatttggaggctactggagatctcaaatcaagtgtctccactgccacggcatttcagacacttttgacccttacctggacatcgccctggatatccaggcagctcagagtgtccagcaagctttggaacagttggtgaagcccgaagaactcaatggagagaatgcctatcattgtggtgtttgtctccagagggcgccggcctccaagacgttaactttacacacctctgccaaggtcctcatccttgtattgaagagattctccgatgtcacaggcaacaagattgccaagaatgtgcaatatcctgagtgccttgacatgcagccatacatgtctcagacgaacacaggacctctcgtctatgtcctctatgctgtgctggtccacgctgggtggagttgtcacaacggacattacttctcttatgtcaaagctcaagaaggccagtggtataaaatggatgatgccgaggtcaccgcctctagcatcacttctgtcctgagtcaacaggcctacgtcctcttttacatccagaagagtgaatgggaaagacacagtgagagtgtgtcaagaggcagggaaccaagagcccttggcgcagaagacacagacaggcgagcaacgcaaggagagctcaagagagaccacccctgcctccaggcccccgagttggacgagcacttggtggaaagagccactcaggaaagcaccttagaccactggaaattccttcaagagcaaaacaaaacgaagcctgagttcaacgtcagaaaagtcgaaggtaccctgcctcccgacgtacttgtgattcatcaatcaaaatacaagtgtgggatgaagaaccatcatcctgaacagcaaagctccctgctaaacctctcttcgacgaccccgacacatcaggagtccatgaacactggcacactcgcttccctgcgagggagggccaggagatccaaagggaagaacaaacacagcaagagggctctgcttgtgtgccagtctcagtggaagtaccgacccacacgtgacattcagtgtgtatttctgaatatgacctaccgacgtgtaggtttgcgtgtgaggtaa

SEQ ID NO: 197205 - DNA, 1593 bp, Homo sapiens
  Payload ID: 18888
  Gene Name: ubiquitin specific peptidase 17-like family member 12
  Uniprot ID: C9JPN9
  ENST ID: ENST00000415041
  CDS Start-End: 1-1593
atggaggaagactcactctacttgggaggtgagtggcagttcaaccacttttcaaaactcacatcttctcggcccgatgcagcttttgctgaaatccagcggacttctctccctgagaagtcaccactctcatgtgagacccgtgtcgacctctgtgatgatttggctcctgtggcaagacagcttgctcccagggagaagcttcctctgagtaacaggagacctgctgcggtgggggctgggctccagaatatgggaaatacctgctacgtgaacgcttccttgcagtgcctgacatacacaccgccccttgccaactacatgctgtcccgggagcactctcaaacgtgtcatcgtcacaagggctgcatgctctgtacgatgcaagctcacatcacacgggccctccacaatcctggccacgtcatccagccctcacaggcattggctgctggcttccatagaggcaagcaggaagatgcccatgaatttctcatgttcactgtggatgccatgaaaaaggcatgccttcccgggcacaagcaggtggatcatcactctaaggacaccaccctcatccaccaaatatttggaggctactggagatctcaaatcaagtgtctccactgccacggcatttcagacacttttgacccttacctggacatcgccctggatatccaggcagctcagagtgtccagcaagctttggaacagttggtgaagcccgaagaactcaatggagagaatgcctatcattgtggtgtttgtctccagagggcgccggcctccaagatgttaactttactcacctctgccaaggtcctcatccttgtattgaagagattctccgatgtcacaggcaacaagattgccaagaatgtgcaatatcctgagtgccttgacatgcagccatacatgtctcagccgaacacaggacctctcgtctatgtcctctatgctgtgctggtccacgctgggtggagttgtcacaacggacattacttctcttatgtcaaagctcaagaaggccagtggtataaaatggatgatgccgaggtcaccgcctctagcatcacttctgtcctgagtcaacaggcctacgtcctcttttacatccagaagagtgaatgggaaagacacagtgagagtgtgtcaagaggcagagaaccaagagcccttggcgcagaagacacagacaggcgagcaacgcaaggagagctcaagagagaccacccctgcctccaggcccccgagttggacgagcacttggtggaaagagccactcaggaaagcaccttagaccactggaaattccttcaagagcaaaacaaaacgaagcctgagttcaacgtcagaaaagtcgaaggtaccctgcctcccgacgtacttgtgattcatcaatcaaaatacaagtgtgggatgaagaaccatcatcctgaacagcaaagctccctgctaaaactctcttcgacgaccccgacacatcaggagtccatgaacactggcacactcgcttccctgcgagggagggccaggagatccaaagggaagaacaaacacagcaagagggctctgcttgtgtgccagtga

SEQ ID NO: 197206 - DNA, 1593 bp, Homo sapiens
  Payload ID: 18889
  Gene Name: ubiquitin specific peptidase 17-like family member 13
  Uniprot ID: C9JLJ4
  ENST ID: ENST00000429667
  CDS Start-End: 1-1593
atggaggaggactcactctacttgggtggtgagtggcagttcaaccacttttcaaaactcacatcttctcggctcgatgcagcttttgctgaaatccagcggacttctctccctgagaagtcaccactctcatgtgagacccgtgtcgacctctgtgatgatttggttcctgaggcaagacagcttgctcccagggagaagcttcctctgagtagcaggagacctgctgcggtgggggctgggctccagaatatgggaaatacctgctacgtgaacgcttccttgcagtgcctgacatacacaccgccccttgccaactacatgctgtcccgggagcactctcaaacgtgtcatcgtcacaagggctgcatgctctgtactatgcaagctcacatcacacgggccctccacaatcctggccacgtcatccagccctcacaggcattggctgctggcttccatagaggcaagcaggaagatgcccatgaatttctcatgttcactgtggatgccatgaaaaaggcatgccttcccgggcacaagcaggtagatcatccctctaaggacaccaccctcatccaccaaatatttggaggctactggagatctcaaatcaagtgtctccactgccacggcatttcagacacttttgacccttacctggacatcgccctggatatccaggcagctcagagtgtccagcaagctttggaacagttggtgaagcccgaagaactcaatggagagaatgcctatcattgtggtgtttgtctccagagggcgccggcctccaagacgttaactttacacacctctgccaaggtcctcatccttgtattgaagagattctccgatgtgacaggcaacaagattgccaagaatgtgcaatatcctgagtgccttgacatgcagccatacatgtctcagcagaacacaggacctcttgtctatgtcctctatgctgtgctggtccacgctgggtggagttgtcacaacggacattacttctcttatgtcaaagctcaagaaggccaatggtataaaatggatgatgccgaggtcaccgccgctagcatcacttctgtcctgagtcaacaggcctacgtcctcttttacatccagaagagtgaatgggaaagacacagtgagagtgtgtcaagaggcagggaaccaagagcccttggcgcagaagacacagacaggcgagcaacgcaaggagagctcaagagagaccacccctgcctccaggcccccgagttggacgagcacttggtggaaagagccactcaggaaagcaccttagaccgctggaaattccttcaagagcaaaacaaaacgaagcctgagttcaacgtcagaaaagtcgaaggtaccctgcctcccgacgtacttgtgattcatcaatcaaaatacaagtgtgggatgaagaaccatcatcctgaacagcaaagctccctgctaaacctctcttcgtcgaccccgacacatcaggagtccatgaacactggcacactcgcttccctgcgagggagggccaggagatccaaagggaagaacaaacacagcaagagggctctgcttgtgtgccagtga

SEQ ID NO: 197207 - DNA, 1677 bp, Homo sapiens
  Payload ID: 18889
  Gene Name: ubiquitin specific peptidase 17-like family member 13
  ENST ID: ENST00000616303
  CDS Start-End: 1-1677
atggaggaggactcactctacttgggtggtgagtggcagttcaaccacttttcaaaactcacatcttctcggctcgatgcagcttttgctgaaatccagcggacttctctccctgagaagtcaccactctcatgtgagacccgtgtcgacctctgtgatgatttggttcctgaggcaagacagcttgctcccagggagaagcttcctctgagtagcaggagacctgctgcggtgggggctgggctccagaatatgggaaatacctgctacgtgaacgcttccttgcagtgcctgacatacacaccgccccttgccaactacatgctgtcccgggagcactctcaaacgtgtcatcgtcacaagggctgcatgctctgtactatgcaagctcacatcacacgggccctccacaatcctggccacgtcatccagccctcacaggcattggctgctggcttccatagaggcaagcaggaagatgcccatgaatttctcatgttcactgtggatgccatgaaaaaggcatgccttcccgggcacaagcaggtagatcatccctctaaggacaccaccctcatccaccaaatatttggaggctactggagatctcaaatcaagtgtctccactgccacggcatttcagacacttttgacccttacctggacatcgccctggatatccaggcagctcagagtgtccagcaagctttggaacagttggtgaagcccgaagaactcaatggagagaatgcctatcattgtggtgtttgtctccagagggcgccggcctccaagacgttaactttacacacctctgccaaggtcctcatccttgtattgaagagattctccgatgtgacaggcaacaagattgccaagaatgtgcaatatcctgagtgccttgacatgcagccatacatgtctcagcagaacacaggacctcttgtctatgtcctctatgctgtgctggtccacgctgggtggagttgtcacaacggacattacttctcttatgtcaaagctcaagaaggccaatggtataaaatggatgatgccgaggtcaccgccgctagcatcacttctgtcctgagtcaacaggcctacgtcctcttttacatccagaagagtgaatgggaaagacacagtgagagtgtgtcaagaggcagggaaccaagagcccttggcgcagaagacacagacaggcgagcaacgcaaggagagctcaagagagaccacccctgcctccaggcccccgagttggacgagcacttggtggaaagagccactcaggaaagcaccttagaccgctggaaattccttcaagagcaaaacaaaacgaagcctgagttcaacgtcagaaaagtcgaaggtaccctgcctcccgacgtacttgtgattcatcaatcaaaatacaagtgtgggatgaagaaccatcatcctgaacagcaaagctccctgctaaacctctcttcgtcgaccccgacacatcaggagtccatgaacactggcacactcgcttccctgcgagggagggccaggagatccaaagggaagaacaaacacagcaagagggctctgcttgtgtgccagtctcagtggaagtaccgacccacacgtgacattcagtgtgtatttctgaatatgacctaccgacgtgtaggtttgcgtgtgaggtaa

SEQ ID NO: 197208 - DNA, 1590 bp, Homo sapiens
  Payload ID: 18890
  Gene Name: ubiquitin specific peptidase 17-like family member 15
  Uniprot ID: C9J2P7
  ENST ID: ENST00000456464
  CDS Start-End: 1-1590
atggaggacgactcactctacttgggaggtgagtggcagttcaaccacttttcaaaactcacatcttctcggcccgatgcagcttttgctgaaatccagcggacttctctccctgagaagtcaccactctcatgtgagacccgtgtcgacctctgtgatgatttggctcctgtggcaagacagcttgctcccagggagaagcttcctctgagtagcaggagacctgctgcggtgggggctgggctccagaatatgggaaatacctgctacgtgaacgcttccttgcagtgcctgacatacacaccgccccttgccaactacatgctgtcccgggagcactctcaaacgtgtcatcgtcacaagggctgcatgctctgtacgatgcaagctcacatcacacgggccctccacaatcctggccacgtcatccagccctcacaggcattggctgctggcttccatagaggcaagcaggaagatgcccatgaatttctcatgttcactgtggatgccatgaaaaaggcatgccttcccgggcacaagcaggtggatcatcactctaaggacaccaccctcatccaccaaatatttggaggctactggagatctcaaatcaagtgtctccactgccacggcatttcagacacttttgacccttacctggacatcgccctggatatccaggcagctcagagtgtccagcaagctttggaacagttggtgaagcccgaagaactcaatggagagaatgcctatcattgtggtgtttgtctccagagggcgccggcctccaagacgttaactttacacacctctgccaaggtcctcatccttgtattgaagagattctccgatgtcacaggcaacaagattgacaagaatgtgcaatatcctgagtgccttgacatgaagctatacatgtctcagacgaactcaggacctctcgtctatgtcctctatgctgtgctggtccacgctgggtggagttgtcacaacggacattacttctcttatgtcaaagctcaagaaggccagtggtataaaatggatgatgccgaggtcaccgcctctagcatcacttctgtcctgagtcaacaggcctacgtcctcttttacatccagaagagtgaatgggaaagacacagtgagagtgtgtcaagaggcagggaaccaagagcccttggcgcagaagacacagacaggcgagcaacgcaaggagagctcaagagagaccacccctgcctccaggcccccgagttggacgagcacttggtggaaagagccactcaggaaagcaccttagaccactggaaattccttcaagagcaaaacaaaacgaagcctgagttcaacgtcagaaaagtcgaaggtaccctgcctcccgacgtacttgtgattcatcaatcaaaatacaagtgtgggatgaagaaccatcatcctgaacagcaaagctccctgctaaacctctcttcgacgaccccgacacatcaggagtccatgaacactggcacactcgcttccctgcgagggagggccaggagatccaaagggaagaacaaacacagcaagagggctctgcttgtgtgccag

SEQ ID NO: 197209 - DNA, 1680 bp, Homo sapiens
  Payload ID: 18890
  Gene Name: ubiquitin specific peptidase 17-like family member 15
  ENST ID: ENST00000614248
  CDS Start-End: 1-1680
atggaggacgactcactctacttgggaggtgagtggcagttcaaccacttttcaaaactcacatcttctcggcccgatgcagcttttgctgaaatccagcggacttctctccctgagaagtcaccactctcatgtgagacccgtgtcgacctctgtgatgatttggctcctgtggcaagacagcttgctcccagggagaagcttcctctgagtagcaggagacctgctgcggtgggggctgggctccagaatatgggaaatacctgctacgtgaacgcttccttgcagtgcctgacatacacaccgccccttgccaactacatgctgtcccgggagcactctcaaacgtgtcatcgtcacaagggctgcatgctctgtacgatgcaagctcacatcacacgggccctccacaatcctggccacgtcatccagccctcacaggcattggctgctggcttccatagaggcaagcaggaagatgcccatgaatttctcatgttcactgtggatgccatgaaaaaggcatgccttcccgggcacaagcaggtggatcatcactctaaggacaccaccctcatccaccaaatatttggaggctactggagatctcaaatcaagtgtctccactgccacggcatttcagacacttttgacccttacctggacatcgccctggatatccaggcagctcagagtgtccagcaagctttggaacagttggtgaagcccgaagaactcaatggagagaatgcctatcattgtggtgtttgtctccagagggcgccggcctccaagacgttaactttacacacctctgccaaggtcctcatccttgtattgaagagattctccgatgtcacaggcaacaagattgacaagaatgtgcaatatcctgagtgccttgacatgaagctatacatgtctcagacgaactcaggacctctcgtctatgtcctctatgctgtgctggtccacgctgggtggagttgtcacaacggacattacttctcttatgtcaaagctcaagaaggccagtggtataaaatggatgatgccgaggtcaccgcctctagcatcacttctgtcctgagtcaacaggcctacgtcctcttttacatccagaagagtgaatgggaaagacacagtgagagtgtgtcaagaggcagggaaccaagagcccttggcgcagaagacacagacaggcgagcaacgcaaggagagctcaagagagaccacccctgcctccaggcccccgagttggacgagcacttggtggaaagagccactcaggaaagcaccttagaccactggaaattccttcaagagcaaaacaaaacgaagcctgagttcaacgtcagaaaagtcgaaggtaccctgcctcccgacgtacttgtgattcatcaatcaaaatacaagtgtgggatgaagaaccatcatcctgaacagcaaagctccctgctaaacctctcttcgacgaccccgacacatcaggagtccatgaacactggcacactcgcttccctgcgagggagggccaggagatccaaagggaagaacaaacacagcaagagggctctgcttgtgtgccagtggtctcagtggaagtaccgacccacacgtgacattcagtgtgtatttctgaatatgacctaccgacgtgtaggtttgcgtgtgaggtaa

SEQ ID NO: 197210 - DNA, 1680 bp, Homo sapiens; identical to SEQ ID NO: 197209
  Payload ID: 18890
  Gene Name: ubiquitin specific peptidase 17-like family member 15
  ENST ID: ENST00000621432
  CDS Start-End: 1-1680

SEQ ID NO: 197211 - DNA, 1593 bp, Homo sapiens
  Payload ID: 18891
  Gene Name: ubiquitin specific peptidase 17-like family member 17
  Uniprot ID: D6RBQ6
  ENST ID: ENST00000511568
  CDS Start-End: 1-1593
atggaggacgactcactctacttgggaggtgagtggcagttcaaccacttttcaaaactcacatcttctcggcccgatgcagcttttgctgaaatccagcggacttctctccctgagaagtcaccactctcatgtgagacccgtgtcgacctctgtgatgatttggctcctgtggcaagacagcttgctcccagggagaagcttcctctgagtagcaggagacctgctgcggtgggggctgggctccagaatatgggaaatacctgctacgtgaacgcttccttgcagtgcctgacatacacaccgccccttgccaactacatgctgtcccgggagcactctcaaacgtgtcatcgtcacaagggctgcatgctctgtacgatgcaagctcacatcacacgggccctccacaatcctggccacgtcatccagccctcacaggcattggctgctggcttccatagaggcaagcaggaagatgcccatgaatttctcatgttcactgtggatgccatgaaaaaggcatgccttcccgggcacaagcaggtagatcatcactctaaggacaccaccctcatccaccaaatatttggaggctactggagatctcaaatcaagtgtctccactgccacggcatttcagacacttttgacccttacctggacatcgccctggatatccaggcagctcagagtgtccagcaagctttggaacagttggtgaagcccgaagaactcaatggagagaatgcctatcattgtggtgtttgtctccagagggcgccggcctccaagacgttaactttacacacctctgccaaggtcctcatccttgtattgaagagattctccgatgtgacaggcaacaagattgccaagaatgtgcaatatcctgagtgccttgacatgcagccatacatgtctcagcagaacacaggacctcttgtctatgtcctctatgctgtgctggtccacgctgggtggagttgtcacaacggacattacttctcttatgtcaaagctcaagaaggccaatggtataaaatggatgatgccgaggtcaccgccgctagcatcacttctgtcctgagtcaacaggcctacgtcctcttttacatccagaagagtgaatgggaaagacacagtgagagtgtgtcaagaggcagggaaccaagagcccttggcgcagaagacacagacaggcgagcaacgcaaggagagctcaagagagaccacccctgcctccaggcccccgagttggacgagcacttggtggaaagagccactcaggaaagcaccttagaccactggaaattccttcaagagcaaaacaaaacgaagcctgagttcaacgtcagaaaagtcgaaggtaccctgcctcccgacgtacttgtgattcatcaatcaaaatacaagtgtgggatgaagaaccatcatcctgaacagcaaagctccctgctaaacctctcttcgtcgaccccgacacatcaggagtccatgaacactggcacactcgcttccctgcgagggagggccaggagatccaaagggaagaacaaacacagcaagagggctctgcttgtgtgccagtga

SEQ ID NO: 197212 - DNA, 1677 bp, Homo sapiens
  Payload ID: 18891
  Gene Name: ubiquitin specific peptidase 17-like family member 17
  ENST ID: ENST00000614762
  CDS Start-End: 1-1677
atggaggacgactcactctacttgggaggtgagtggcagttcaaccacttttcaaaactcacatcttctcggcccgatgcagcttttgctgaaatccagcggacttctctccctgagaagtcaccactctcatgtgagacccgtgtcgacctctgtgatgatttggctcctgtggcaagacagcttgctcccagggagaagcttcctctgagtagcaggagacctgctgcggtgggggctgggctccagaatatgggaaatacctgctacgtgaacgcttccttgcagtgcctgacatacacaccgccccttgccaactacatgctgtcccgggagcactctcaaacgtgtcatcgtcacaagggctgcatgctctgtacgatgcaagctcacatcacacgggccctccacaatcctggccacgtcatccagccctcacaggcattggctgctggcttccatagaggcaagcaggaagatgcccatgaatttctcatgttcactgtggatgccatgaaaaaggcatgccttcccgggcacaagcaggtagatcatcactctaaggacaccaccctcatccaccaaatatttggaggctactggagatctcaaatcaagtgtctccactgccacggcatttcagacacttttgacccttacctggacatcgccctggatatccaggcagctcagagtgtccagcaagctttggaacagttggtgaagcccgaagaactcaatggagagaatgcctatcattgtggtgtttgtctccagagggcgccggcctccaagacgttaactttacacacctctgccaaggtcctcatccttgtattgaagagattctccgatgtgacaggcaacaagattgccaagaatgtgcaatatcctgagtgccttgacatgcagccatacatgtctcagcagaacacaggacctcttgtctatgtcctctatgctgtgctggtccacgctgggtggagttgtcacaacggacattacttctcttatgtcaaagctcaagaaggccaatggtataaaatggatgatgccgaggtcaccgccgctagcatcacttctgtcctgagtcaacaggcctacgtcctcttttacatccagaagagtgaatgggaaagacacagtgagagtgtgtcaagaggcagggaaccaagagcccttggcgcagaagacacagacaggcgagcaacgcaaggagagctcaagagagaccacccctgcctccaggcccccgagttggacgagcacttggtggaaagagccactcaggaaagcaccttagaccactggaaattccttcaagagcaaaacaaaacgaagcctgagttcaacgtcagaaaagtcgaaggtaccctgcctcccgacgtacttgtgattcatcaatcaaaatacaagtgtgggatgaagaaccatcatcctgaacagcaaagctccctgctaaacctctcttcgtcgaccccgacacatcaggagtccatgaacactggcacactcgcttccctgcgagggagggccaggagatccaaagggaagaacaaacacagcaagagggctctgcttgtgtgccagtctcagtggaagtaccgacccacacgtgacattcagtgtgtatttctgaatatgacctaccgacgtgtaggtttgcgtgtgaggtaa

SEQ ID NO: 197213 - DNA, 1593 bp, Homo sapiens
  Payload ID: 18892
  Gene Name: ubiquitin specific peptidase 17-like family member 18
  Uniprot ID: D6R9N7
  ENST ID: ENST00000504209
  CDS Start-End: 1-1593
atggaggacgactcactctacttgggaggtgagtggcagttcaaccacttttcaaaactcacatcttctcggcccgatgcagcttttgctgaaatccagcggacttctctccctgagaagtcaccactctcatgtgagacccgtgtcgacctctgtgatgatttggctcctgtggcaagacagcttgctcccagggagaagcttcctctgagtagcaggagacctgctgcggtgggggctgggctccagaatatgggaaatacctgctacgtgaacgcttccttgcagtgcctgacatacacaccgccccttgccaactacatgctgtcccgggagcactctcaaacgtgtcatcgtcacaagggctgtatgctctgtacgatgcaagctcacatcacacgggccctccacaatcctggccacgtcatccagccctcacaggcattggctgctggcttccatagaggcaagcaggaagatgcccatgaatttctcatgttcactgtggatgccatgaaaaaggcatgccttcccgggcacaagcaggtggatcatcactctaaggacaccaccctcatccaccaaatatttggaggctactggagatctcaaatcaagtgtctccactgccacggcatttcagacacttttgacccttacctggacatcgccctggatatccaggcagctcagagtgtccagcaagctttggaacagttggtgaagcccgaagaactcaatggagagaatgcctatcattgtggtgtttgtctccagagggcgccggcctccaagacgttaactttacacacctctgccaaggtcctcatccttgtattgaagagattctccgatgtcacaggcaacaagattgccaagaatgtgcaatatcctgagtgccttgacatgcagccatacatgtctcagacgaacacaggacctctcgtctatgtcctctatgctgtgctggtccacgctgggtggagttgtcacaacggacattacttctcttatgtcaaagctcaagaaggccagtggtataaaatggatgatgccgaggtcaccgcctctagcatcacttctgtcctgagtcaacaggcctacgtcctcttttacatccagaagagtgaatgggaaagacacagtgagagtgtgtcaagaggcagggaaccaagagcccttggcgcagaagacacagacaggcgagcaaagcaaggagagctcaagagagaccacccctgcctccaggcccccgagttggacgagcacttggtggaaagagccactcaggaaagcaccttagaccactggaaattccttcaagagcaaaacaaaacgaagcctgagttcaacgtcagaaaagtcgaaggtaccctgcctcccgacgtacttgtgattcatcaatcaaaatacaagtgtgggatgaagaaccatcatcctgaacagcaaagctccctgctaaacctctcttcgacgaccccgacacatcaggagtccatgaacactggcacactcgcttccctgcgagggagggccaggagatccaaagggaagaacaaacacagcaagagggctctgcttgtgtgccagtga

SEQ ID NO: 197214 - DNA, 1677 bp, Homo sapiens
  Payload ID: 18892
  Gene Name: ubiquitin specific peptidase 17-like family member 18
  ENST ID: ENST00000619296
  CDS Start-End: 1-1677
atggaggacgactcactctacttgggaggtgagtggcagttcaaccacttttcaaaactcacatcttctcggcccgatgcagcttttgctgaaatccagcggacttctctccctgagaagtcaccactctcatgtgagacccgtgtcgacctctgtgatgatttggctcctgtggcaagacagcttgctcccagggagaagcttcctctgagtagcaggagacctgctgcggtgggggctgggctccagaatatgggaaatacctgctacgtgaacgcttccttgcagtgcctgacatacacaccgccccttgccaactacatgctgtcccgggagcactctcaaacgtgtcatcgtcacaagggctgtatgctctgtacgatgcaagctcacatcacacgggccctccacaatcctggccacgtcatccagccctcacaggcattggctgctggcttccatagaggcaagcaggaagatgcccatgaatttctcatgttcactgtggatgccatgaaaaaggcatgccttcccgggcacaagcaggtggatcatcactctaaggacaccaccctcatccaccaaatatttggaggctactggagatctcaaatcaagtgtctccactgccacggcatttcagacacttttgacccttacctggacatcgccctggatatccaggcagctcagagtgtccagcaagctttggaacagttggtgaagcccgaagaactcaatggagagaatgcctatcattgtggtgtttgtctccagagggcgccggcctccaagacgttaactttacacacctctgccaaggtcctcatccttgtattgaagagattctccgatgtcacaggcaacaagattgccaagaatgtgcaatatcctgagtgccttgacatgcagccatacatgtctcagacgaacacaggacctctcgtctatgtcctctatgctgtgctggtccacgctgggtggagttgtcacaacggacattacttctcttatgtcaaagctcaagaaggccagtggtataaaatggatgatgccgaggtcaccgcctctagcatcacttctgtcctgagtcaacaggcctacgtcctcttttacatccagaagagtgaatgggaaagacacagtgagagtgtgtcaagaggcagggaaccaagagcccttggcgcagaagacacagacaggcgagcaaagcaaggagagctcaagagagaccacccctgcctccaggcccccgagttggacgagcacttggtggaaagagccactcaggaaagcaccttagaccactggaaattccttcaagagcaaaacaaaacgaagcctgagttcaacgtcagaaaagtcgaaggtaccctgcctcccgacgtacttgtgattcatcaatcaaaatacaagtgtgggatgaagaaccatcatcctgaacagcaaagctccctgctaaacctctcttcgacgaccccgacacatcaggagtccatgaacactggcacactcgcttccctgcgagggagggccaggagatccaaagggaagaacaaacacagcaagagggctctgcttgtgtgccagtctcagtggaagtaccgacccacacgtgacattcagtgtgtatttctgaatatgacctaccgacgtgtaggtttgcgtgtgaggtaa

SEQ ID NO: 197215 - DNA, 1593 bp, Homo sapiens
  Payload ID: 18893
  Gene Name: ubiquitin specific peptidase 17-like family member 19
  Uniprot ID: D6RCP7
  ENST ID: ENST00000515566
  CDS Start-End: 1-1593
atggaggaagactcactctacttgggaggtgagtggcagttcaaccacttttcaaaactcacatcttctcggcccgatgcagcttttgctgaaatccagcggacttctctccctgagaagtcaccactctcatgtgagacccgtgtcgacctctgtgatgatttggctcctgtggcaagacagcttgctcccagggagaagcttcctctgagtagcaggagacctgctgcggtgggggctgggctccagaatatgggaaatacctgctacgtgaacgcttccttgcagtgcctgacatacacaccgccccttgccaactacatgctgtcccgggagcactctcaaacgtgtcatcgtcacaagggctgtatgctctgtacgatgcaagctcacatcacacgggccctccacaatcctggccacgtcatccagccctcacaggcattggctgctggcttccatagaggcaagcaggaagatgcccatgaatttctcatgttcactgtggatgccatgaaaaaggcatgccttcccgggcacaagcaggtggatcatcactctaaggacaccaccctcatccaccaaatatttggaggctactggagatctcaaatcaagtgtctccactgccacggcatttcagacacttttgacccttacctggacatcgccctggatatccaggcagctcagagtgtccagcaagctttggaacagttggtgaagcccgaagaactcaatggagagaatgcctatcattgtggtgtttgtctccagagggcgccggcctccaagacgttaactttacacacctctgccaaggtcctcatccttgtattgaagagattctccgatgtcacaggcaacaagattgccaagaatgtgcaatatcctgagtgccttgacatgcagccatacatgtctcagacgaacacaggacctctcgtctatgtcctctatgctgtgctggtccacgctgggtggagttgtcacaacggacattacttctcttatgtcaaagctcaagaaggccagtggtataaaatggatgatgccgaggtcaccgcctctagcatcacttctgtcctgagtcaacaggcctacgtcctcttttacatccagaagagtgaatgggaaagacacagtgagagtgtgtcaagaggcagagaaccaagagcccttggcgcagaagacacagacaggcgagcaacgcaaggagagctcaagagagaccacccctgcctccaggcccccgagttggacgagcacttggtggaaagagccactcaggaaagcaccttagaccactggaaattccttcaagagcaaaacaaaacgaagcctgagttcaacgtcagaaaagtcgaaggtaccctgcctcccgacgtacttgtgattcatcaatcaaaatacaagtgtgggatgaagaaccatcatcctgaacagcaaagctccctgctaaaactctcttcgacgaccccgacacatcaggagtccatgaacactggcacactcgcttccctgcgagggagggccaggagatccaaagggaagaacaaacacagcaagagggctctgcttgtgtgccagtga

SEQ ID NO: 197216 - DNA, 1677 bp, Homo sapiens
  Payload ID: 18893
  Gene Name: ubiquitin specific peptidase 17-like family member 19
  ENST ID: ENST00000615989
  CDS Start-End: 1-1677
atggaggaagactcactctacttgggaggtgagtggcagttcaaccacttttcaaaactcacatcttctcggcccgatgcagcttttgctgaaatccagcggacttctctccctgagaagtcaccactctcatgtgagacccgtgtcgacctctgtgatgatttggctcctgtggcaagacagcttgctcccagggagaagcttcctctgagtagcaggagacctgctgcggtgggggctgggctccagaatatgggaaatacctgctacgtgaacgcttccttgcagtgcctgacatacacaccgccccttgccaactacatgctgtcccgggagcactctcaaacgtgtcatcgtcacaagggctgtatgctctgtacgatgcaagctcacatcacacgggccctccacaatcctggccacgtcatccagccctcacaggcattggctgctggcttccatagaggcaagcaggaagatgcccatgaatttctcatgttcactgtggatgccatgaaaaaggcatgccttcccgggcacaagcaggtggatcatcactctaaggacaccaccctcatccaccaaatatttggaggctactggagatctcaaatcaagtgtctccactgccacggcatttcagacacttttgacccttacctggacatcgccctggatatccaggcagctcagagtgtccagcaagctttggaacagttggtgaagcccgaagaactcaatggagagaatgcctatcattgtggtgtttgtctccagagggcgccggcctccaagacgttaactttacacacctctgccaaggtcctcatccttgtattgaagagattctccgatgtcacaggcaacaagattgccaagaatgtgcaatatcctgagtgccttgacatgcagccatacatgtctcagacgaacacaggacctctcgtctatgtcctctatgctgtgctggtccacgctgggtggagttgtcacaacggacattacttctcttatgtcaaagctcaagaaggccagtggtataaaatggatgatgccgaggtcaccgcctctagcatcacttctgtcctgagtcaacaggcctacgtcctcttttacatccagaagagtgaatgggaaagacacagtgagagtgtgtcaagaggcagagaaccaagagcccttggcgcagaagacacagacaggcgagcaacgcaaggagagctcaagagagaccacccctgcctccaggcccccgagttggacgagcacttggtggaaagagccactcaggaaagcaccttagaccactggaaattccttcaagagcaaaacaaaacgaagcctgagttcaacgtcagaaaagtcgaaggtaccctgcctcccgacgtacttgtgattcatcaatcaaaatacaagtgtgggatgaagaaccatcatcctgaacagcaaagctccctgctaaaactctcttcgacgaccccgacacatcaggagtccatgaacactggcacactcgcttccctgcgagggagggccaggagatccaaagggaagaacaaacacagcaagagggctctgcttgtgtgccagtctcagtggaagtaccgacccacacgtgacattcagtgtgtatttctgaatatgacctaccgacgcgtaggtttgcgtgtgaggtaa

SEQ ID NO: 197217 - DNA, 1910 bp, Homo sapiens
  Payload ID: 18894
  Gene Name: ubiquitin specific peptidase 17-like family member 2
  Uniprot ID: Q6R6M4
  ENST ID: ENST00000333796
  CDS Start-End: 318-1910
tattatatgtgcctatcaccctgaggagtaatttgattcaggtgttctagaagtcatgatgtgggctgtgtctgttgaattcccagcgatgcaaggggacacaccctgtgactcattccttaattgagtgctgatatttgattggtttatcgcacacctgatgggtgggtggggtgttcgcggttggtgggggtgagttatataagggctgatgcggccagagagctcgtcatttgaagactctcttggaagagatagcgtcttgctgcaacctgcagtcccagcagaaaaaccttgtgatccttgttgcgggcgacatggaggacgactcactctacttgggaggtgagtggcagttcaaccacttttcaaaactcacatcttctcggccagatgcagcttttgctgaaatccagcggacttctctccctgagaagtcaccactctcatctgaggcccgtgtcgacctctgtgatgatttggctcctgtggcaagacagcttgctcccaggaagaagcttcctctgagtagcaggagacctgctgcggtgggggctgggctccagaatatgggaaatacctgctacgagaacgcttccctgcagtgcctgacatacacaccgccccttgccaactacatgctgtcccgggagcactctcaaacatgtcagcgtcccaagtgctgcatgctctgtactatgcaagctcacatcacatgggccctccacagtcctggtcatgtcatccagccctcacaggcattggctgctggcttccatagaggcaagcaggaagatgcccatgaatttctcatgttcactgtggatgccatgaaaaaggcatgccttcccggccacaagcaggtagatcatcactctaaggacaccaccctcatccaccaaatatttggaggctgctggagatctcaaatcaagtgtctccactgccacgggatttcagacacttttgacccttacctggacatcgccctggatatccaggcagctcagagtgtcaagcaagctttggaacagttggtgaagcccgaagaactcaatggagagaatgcctatcattgcggtctttgtctccagagggcgccggcctccaagacgttaactttacacacttctgccaaggtcctcatccttgtcttgaagagattctccgatgtcacaggcaacaaacttgccaagaatgtgcaatatcctgagtgccttgacatgcagccatacatgtctcagcagaacacaggacctcttgtctatgtcctctatgctgtgctggtccacgctgggtggagttgtcacgacggacattacttctcttatgtcaaagctcaagaaggccagtggtataaaatggatgatgccaaggtcactgcctgtagcatcacttctgtcctgagtcaacaggcctatgtcctcttttacatccagaagagtgaatgggaaagacacagtgagagtgtgtcaagaggcagggaaccaagagccctcggcgctgaagacacagacaggcgagcaacgcaaggagagctcaagagagaccacccctgcctccaggcacccgagttggacgagcgcttggtggaaagagccactcaggaaagcaccttagaccactggaaattcccccaagagcaaaacaaaacgaagcctgagttcaacgtcagaaaagtcgaaggtaccctgcctcccaacgtacttgtgattcatcaatcgaaatacaagtgtgggatgaaaaaccatcatcctgaacagcaaagctccctgctaaacctctcttcgacgacccggacagatcaggagtccgtgaacactggcaccctcgcttctctgcaagggaggaccaggagatccaaagggaagaacaaacacagcaagagggctctgcttgtgtgccagtga

SEQ ID NO: 197218 - DNA, 1593 bp, Homo sapiens
  Payload ID: 18895
  Gene Name: ubiquitin specific peptidase 17-like family member 20
  Uniprot ID: D6RJB6
  ENST ID: ENST00000506151
  CDS Start-End: 1-1593
atggaggacgactcactctacttgggaggtgagtggcagttcaaccacttttcaaaactcacatcttctcggcccgatgcagcttttgctgaaatccagcggacttctctccctgagaagtcaccactctcatgtgagacccgtgtcgacctctgtgatgatttggctcctgtggcaagacagcttgctcccagggagaagcttcctctgagtagcaggagacctgctgcggtgggggctgggctccagaatatgggaaatacctgctacgtgaacgcttccttgcagtgcctgacatacacaccgccccttgccaactacatgctgtcccgggagcactctcaaacgtgtcatcgtcacaagggctgcatgctctgtacgatgcaagctcacatcacacgggccctccacaatcctggccacgtcatccagccctcacaggcattggctgctggcttccatagaggcaagcaggaagatgcccatgaatttctcatgttcactgtggatgccatgaaaaaggcatgccttcccgggcacaagcaggtggatcatcactctaaggacaccaccctcatccaccaaatatttggaggctactggagatctcaaatcaagtgtctccactgccacggcatttcagacacttttgacccttacctggacatcgccctggatatccaggcagctcagagtgtccagcaagctttggaacagttggtgaagcccgaagaactcaatggagagaatgcctatcattgtggtgtttgtctccagagggcgccggcctccaagacgttaactttacacacctctgccaaggtcctcatccttgtattgaagagattctccgatgtcacaggcaacaagattgccaagaatgtgcaatatcctgagtgccttgacatgcagccatacatgtctcagccgaacacaggacctctcgtctatgtcctctatgctgtgctggtccacgctgggtggagttgtcacaacggacattacttctcttatgtcaaagctcaagaaggccagtggtataaaatggatgatgccgaggtcaccgcctctagcatcacttctgtcctgagtcaacaggcctacgtcctcttttacatccagaagagtgaatgggaaagacacagtgagagtgtgtcaagaggcagagaaccaagagcccttggcgcagaagacacagacaggcgagcaacgcaaggagagctcaagagagaccacccctgcctccaggcccccgagttggacgagcacttggtggaaagagccactcaggaaagcaccttagaccactggaaattccttcaagagcaaaacaaaacgaagcctgagttcaacgtcagaaaagtcgaaggtaccctgcctcccgacgtacttgtgattcatcaatcaaaatacaagtgtgggatgaagaaccatcatcctgaacagcaaagctccctgctaaacctctcttcgacgaccccgacacatcaggagtccatgaacactggcacactcgcttccctgcgagggagggccaggagatccaaagggaagaacaaacacagcaagagggctctgcttgtgtgccagtga

SEQ ID NO: 197219 - DNA, 1677 bp, Homo sapiens
  Payload ID: 18895
  Gene Name: ubiquitin specific peptidase 17-like family member 20
  ENST ID: ENST00000613757
  CDS Start-End: 1-1677
atggaggacgactcactctacttgggaggtgagtggcagttcaaccacttttcaaaactcacatcttctcggcccgatgcagcttttgctgaaatccagcggacttctctccctgagaagtcaccactctcatgtgagacccgtgtcgacctctgtgatgatttggctcctgtggcaagacagcttgctcccagggagaagcttcctctgagtagcaggagacctgctgcggtgggggctgggctccagaatatgggaaatacctgctacgtgaacgcttccttgcagtgcctgacatacacaccgccccttgccaactacatgctgtcccgggagcactctcaaacgtgtcatcgtcacaagggctgcatgctctgtacgatgcaagctcacatcacacgggccctccacaatcctggccacgtcatccagccctcacaggcattggctgctggcttccatagaggcaagcaggaagatgcccatgaatttctcatgttcactgtggatgccatgaaaaaggcatgccttcccgggcacaagcaggtggatcatcactctaaggacaccaccctcatccaccaaatatttggaggctactggagatctcaaatcaagtgtctccactgccacggcatttcagacacttttgacccttacctggacatcgccctggatatccaggcagctcagagtgtccagcaagctttggaacagttggtgaagcccgaagaactcaatggagagaatgcctatcattgtggtgtttgtctccagagggcgccggcctccaagacgttaactttacacacctctgccaaggtcctcatccttgtattgaagagattctccgatgtcacaggcaacaagattgccaagaatgtgcaatatcctgagtgccttgacatgcagccatacatgtctcagccgaacacaggacctctcgtctatgtcctctatgctgtgctggtccacgctgggtggagttgtcacaacggacattacttctcttatgtcaaagctcaagaaggccagtggtataaaatggatgatgccgaggtcaccgcctctagcatcacttctgtcctgagtcaacaggcctacgtcctcttttacatccagaagagtgaatgggaaagacacagtgagagtgtgtcaagaggcagagaaccaagagcccttggcgcagaagacacagacaggcgagcaacgcaaggagagctcaagagagaccacccctgcctccaggcccccgagttggacgagcacttggtggaaagagccactcaggaaagcaccttagaccactggaaattccttcaagagcaaaacaaaacgaagcctgagttcaacgtcagaaaagtcgaaggtaccctgcctcccgacgtacttgtgattcatcaatcaaaatacaagtgtgggatgaagaaccatcatcctgaacagcaaagctccctgctaaacctctcttcgacgaccccgacacatcaggagtccatgaacactggcacactcgcttccctgcgagggagggccaggagatccaaagggaagaacaaacacagcaagagggctctgcttgtgtgccagtctcagtggaagtaccgacccacacgtgacattcagtgtgtatttctgaatatgacctaccgacgtgtaggtttgcgtgtgaggtaa

SEQ ID NO: 197220 - DNA, 1593 bp, Homo sapiens
  Payload ID: 18896
  Gene Name: ubiquitin specific peptidase 17-like family member 21
  Uniprot ID: D6R901
  ENST ID: ENST00000506414
  CDS Start-End: 1-1593
atggaggaagactcactctacttgggaggtgagtggcagttcaaccacttttcaaaactcacatcttctcggcccgatgcagcttttgctgaaatccagcggacttctctccctgagaagtcaccactctcatgtgagacccgtgtcgacctctgtgatgatttggctcctgtggcaagacagcttgctcccagggagaagcttcctctgagtaacaggagacctgctgcggtgggggctgggctccagaatatgggaaatacctgctacgtgaacgcttccttgcagtgcctgacatacacaccgccccttgccaactacatgctgtcccgggagcactctcaaacgtgtcatcgtcacaagggctgcatgctctgtacgatgcaagctcacatcacacgggccctccacaatcctggccacgtcatccagccctcacaggcattggctgctggcttccatagaggcaagcaggaagatgcccatgaatttctcatgttcactgtggatgccatgaaaaaggcatgccttcccgggcacaagcaggtggatcatcactctaaggacaccaccctcatccaccaaatatttggaggctactggagatctcaaatcaagtgtctccactgccacggcatttcagacacttttgacccttacctggacatcgccctggatatccaggcagctcagagtgtccagcaagctttggaacagttggtgaagcccgaagaactcaatggagagaatgcctatcattgtggtgtttgtctccagagggcgccggcctccaagatgttaactttactcacctctgccaaggtcctcatccttgtattgaagagattctccgatgtcacaggcaacaagattgccaagaatgtgcaatatcctgagtgccttgacatgcagccatacatgtctcagccgaacacaggacctctcgtctatgtcctctatgctgtgctggtccacgctgggtggagttgtcacaacggacattacttctcttatgtcaaagctcaagaaggccagtggtataaaatggatgatgccgaggtcaccgcctctagcatcacttctgtcctgagtcaacaggcctacgtcctcttttacatccagaagagtgaatgggaaagacacagtgagagtgtgtcaagaggcagagaaccaagagcccttggcgcagaagacacagacaggcgagcaacgcaaggagagctcaagagagaccacccctgcctccaggcccccgagttggacgagcacttggtggaaagagccactcaggaaagcaccttagaccactggaaattccttcaagagcaaaacaaaacgaagcctgagttcaacgtcagaaaagtcgaaggtaccctgcctcccgacgtacttgtgattcatcaatcaaaatacaagtgtgggatgaagaaccatcatcctgaacagcaaagctccctgctaaacctctcttcgtcgaccccgacacatcaggagtccatgaacactggcacactcgcttccctgcgagggagggccaggagatccaaagggaagaacaaacacagcaagagggctctgcttgtgtgccagtga

SEQ ID NO: 197221 - DNA, 1677 bp, Homo sapiens
  Payload ID: 18896
  Gene Name: ubiquitin specific peptidase 17-like family member 21
  ENST ID: ENST00000621388
  CDS Start-End: 1-1677
atggaggaagactcactctacttgggaggtgagtggcagttcaaccacttttcaaaactcacatcttctcggcccgatgcagcttttgctgaaatccagcggacttctctccctgagaagtcaccactctcatgtgagacccgtgtcgacctctgtgatgatttggctcctgtggcaagacagcttgctcccagggagaagcttcctctgagtaacaggagacctgctgcggtgggggctgggctccagaatatgggaaatacctgctacgtgaacgcttccttgcagtgcctgacatacacaccgccccttgccaactacatgctgtcccgggagcactctcaaacgtgtcatcgtcacaagggctgcatgctctgtacgatgcaagctcacatcacacgggccctccacaatcctggccacgtcatccagccctcacaggcattggctgctggcttccatagaggcaagcaggaagatgcccatgaatttctcatgttcactgtggatgccatgaaaaaggcatgccttcccgggcacaagcaggtggatcatcactctaaggacaccaccctcatccaccaaatatttggaggctactggagatctcaaatcaagtgtctccactgccacggcatttcagacacttttgacccttacctggacatcgccctggatatccaggcagctcagagtgtccagcaagctttggaacagttggtgaagcccgaagaactcaatggagagaatgcctatcattgtggtgtttgtctccagagggcgccggcctccaagatgttaactttactcacctctgccaaggtcctcatccttgtattgaagagattctccgatgtcacaggcaacaagattgccaagaatgtgcaatatcctgagtgccttgacatgcagccatacatgtctcagccgaacacaggacctctcgtctatgtcctctatgctgtgctggtccacgctgggtggagttgtcacaacggacattacttctcttatgtcaaagctcaagaaggccagtggtataaaatggatgatgccgaggtcaccgcctctagcatcacttctgtcctgagtcaacaggcctacgtcctcttttacatccagaagagtgaatgggaaagacacagtgagagtgtgtcaagaggcagagaaccaagagcccttggcgcagaagacacagacaggcgagcaacgcaaggagagctcaagagagaccacccctgcctccaggcccccgagttggacgagcacttggtggaaagagccactcaggaaagcaccttagaccactggaaattccttcaagagcaaaacaaaacgaagcctgagttcaacgtcagaaaagtcgaaggtaccctgcctcccgacgtacttgtgattcatcaatcaaaatacaagtgtgggatgaagaaccatcatcctgaacagcaaagctccctgctaaacctctcttcgtcgaccccgacacatcaggagtccatgaacactggcacactcgcttccctgcgagggagggccaggagatccaaagggaagaacaaacacagcaagagggctctgcttgtgtgccagtctcagtggaagtaccgacccacacgtgacattcagtgtgtatttctgaatatgacctaccgacgtgtaggtttgcgtgtgaggtaa

SEQ ID NO: 197222 - DNA, 1593 bp, Homo sapiens
  Payload ID: 18897
  Gene Name: ubiquitin specific peptidase 17-like family member 22
  Uniprot ID: D6RA61
  ENST ID: ENST00000511280
  CDS Start-End: 1-1593
atggaggacgactcactctacttgggaggtgagtggcagttcaaccacttttcaaaactcacatcttctcggcccgatgcagcttttgctgaaatccagcggacttctctccctgagaagtcaccactctcatgtgagacccgtgtcgacctctgtgatgatttggctcctgtggcaagacagcttgctcccagggagaagcttcctctgagtagcaggagacctgctgcggtgggggctgggctccagaatatgggaaatacctgctacgtgaacgcttccttgcagtgcctgacatacacaccgccccttgccaactacatgctgtcccgggagcactctcaaacgtgtcatcgtcacaagggctgcatgctctgtacgatgcaagctcacatcacacgggccctccacaatcctggccacgtcatccagccctcacaggcattggctgctggcttccatagaggcaagcaggaagatgcccatgaatttctcatgttcactgtggatgccatgaaaaaggcatgccttcccgggcacaagcaggtggatcatcactctaaggacaccaccctcatccaccaaatatttggaggctactggagatctcaaatcaagtgtctccactgccacggcatttcagacacttttgacccttacctggacatcgccctggatatccaggcagctcagagtgtccagcaagctttggaacagttggtgaagcccgaagaactcaatggagagaatgcctatcattgtggtgtttgtctccagagggcgccggcctccaagacgttaactttacacacctctgccaaggtcctcatccttgtattgaagagattctccgatgtcacaggcaacaagattgccaagaatgtgcaatatcctgagtgccttgacatgcagccatacatgtctcagcagaacacaggacctctcgtctatgtcctctatgctgtgctggtccacgctgggtggagttgtcacaacggacattacttctcttatgtcaaagctcaagaaggccagtggtataaaatggatgatgccgaggtcaccgcctctagcatcacttctgtcctgagtcaacaggcctacgtcctcttttacatccagaagagtgaatgggaaagacacagtgagagtgtgtcaagaggcagagaaccaagagcccttggcgcagaagacacagacaggcgagcaacgcaaggagagctcaagagagaccacccctgcctccaggcccccgagttggacgagcacttggtggaaagagccactcaggaaagcaccttagaccactggaaattccttcaagagcaaaacaaaacgaagcctgagttcaacgtcagaaaagtcgaaggtaccctgcctcccgacgtacttgtgattcatcaatcaaaatacaagtgtgggatgaagaaccatcatcctgaacagcaaagctccctgctaaaactctcttcgacgaccccgacacatcaggagtccatgaacactggcacactcgcttccctgcgagggagggccaggagatccaaagggaagaacaaacacagcaagagggctctgcttgtgtgccagtga

SEQ ID NO: 197223 - DNA, 1677 bp, Homo sapiens
  Payload ID: 18897
  Gene Name: ubiquitin specific peptidase 17-like family member 22
  ENST ID: ENST00000622009
  CDS Start-End: 1-1677
atggaggacgactcactctacttgggaggtgagtggcagttcaaccacttttcaaaactcacatcttctcggcccgatgcagcttttgctgaaatccagcggacttctctccctgagaagtcaccactctcatgtgagacccgtgtcgacctctgtgatgatttggctcctgtggcaagacagcttgctcccagggagaagcttcctctgagtagcaggagacctgctgcggtgggggctgggctccagaatatgggaaatacctgctacgtgaacgcttccttgcagtgcctgacatacacaccgccccttgccaactacatgctgtcccgggagcactctcaaacgtgtcatcgtcacaagggctgcatgctctgtacgatgcaagctcacatcacacgggccctccacaatcctggccacgtcatccagccctcacaggcattggctgctggcttccatagaggcaagcaggaagatgcccatgaatttctcatgttcactgtggatgccatgaaaaaggcatgccttcccgggcacaagcaggtggatcatcactctaaggacaccaccctcatccaccaaatatttggaggctactggagatctcaaatcaagtgtctccactgccacggcatttcagacacttttgacccttacctggacatcgccctggatatccaggcagctcagagtgtccagcaagctttggaacagttggtgaagcccgaagaactcaatggagagaatgcctatcattgtggtgtttgtctccagagggcgccggcctccaagacgttaactttacacacctctgccaaggtcctcatccttgtattgaagagattctccgatgtcacaggcaacaagattgccaagaatgtgcaatatcctgagtgccttgacatgcagccatacatgtctcagcagaacacaggacctctcgtctatgtcctctatgctgtgctggtccacgctgggtggagttgtcacaacggacattacttctcttatgtcaaagctcaagaaggccagtggtataaaatggatgatgccgaggtcaccgcctctagcatcacttctgtcctgagtcaacaggcctacgtcctcttttacatccagaagagtgaatgggaaagacacagtgagagtgtgtcaagaggcagagaaccaagagcccttggcgcagaagacacagacaggcgagcaacgcaaggagagctcaagagagaccacccctgcctccaggcccccgagttggacgagcacttggtggaaagagccactcaggaaagcaccttagaccactggaaattccttcaagagcaaaacaaaacgaagcctgagttcaacgtcagaaaagtcgaaggtaccctgcctcccgacgtacttgtgattcatcaatcaaaatacaagtgtgggatgaagaaccatcatcctgaacagcaaagctccctgctaaaactctcttcgacgaccccgacacatcaggagtccatgaacactggcacactcgcttccctgcgagggagggccaggagatccaaagggaagaacaaacacagcaagagggctctgcttgtgtgccagtctcagtggaagtaccgacccacacgtgacattcagtgtgtatttctgaatatgacctaccgacgtgtaggtttgcgtgtgaggtaa

SEQ ID NO: 197224 - DNA, 551 bp, Homo sapiens
  Payload ID: 18898
  Gene Name: ubiquitin specific peptidase 17-like family member 23
  Uniprot ID: D6RBM5
  ENST ID: ENST00000506619
  CDS Start-End: 1-551
atggaggacgactcactctacttgggaggtgagtggcagttcaaccacttttcaaaactcacatcttctcggcccgatgcagcttttgctgaaatccagcggacttctctccctgagaagtcaccactctcatgtgagacccgtgtcgacctctgtgatgatttggctcctgtggcaagacagcttgctcccagggagaagcttcctctgagtagcaggagacctgctgcggtgggggctgggctccagaatatgggaaatacctgctacgtgaacgcttccttgcagtgcctgacatacacaccgccccttgccaactacatgctgtcccgggagcactctcaaacgtgtcatcgtcacaagggctgcatgctctgtacgatgcaagctcacatcacacgggccctccacaatcctggccacgtcatccagccctcacaggcattggctgctggcttccatagaggcaagcaggaagatgcccatgaatttctcatgttcactgtggatgccatggaaaaggcatgccttcccgggcacaagcaggtaga

SEQ ID NO: 197225 - DNA, 1593 bp, Homo sapiens
  Payload ID: 18899
  Gene Name: ubiquitin specific peptidase 17-like family member 24
  Uniprot ID: Q0WX57
  ENST ID: ENST00000504481
  CDS Start-End: 1-1593
atggaggacgactcactctacttgagaggtgagtggcagttcaaccacttttcaaaactcacatcttctcggcccgatgcagcttttgctgaaatccagcggacttctctccctgagaagtcaccactctcatgtgagacccgtgtcgacctctgtgatgatttggctcctgtggcaagacagcttgctcccagggagaagcttcctctgagtagcaggagacctgctgcggtgggggctgggctccagaatatgggaaatacctgctacgtgaacgcttccttgcagtgcctgacatacacaccgccccttgccaactacatgctgtcccgggagcactctcaaacgtgtcatcgtcacaagggctgcatgctctgtactatgcaagctcacatcacacgggccctccacaatcctggccacgtcatccagccctcacaggcattggctgctggcttccatagaggcaagcaggaagatgcccatgaatttctcatgttcactgtggatgccatgaaaaaggcatgccttcccgggcacaagcaggtagatcatcactctaaggacaccaccctcatccaccaaatatttggaggctactggagatctcaaatcaagtgtctccactgccacggcatttcagacacttttgacccttacctggacatcgccctggatatccaggcagctcagagtgtccagcaagctttggaacagttggtgaagcccgaagaactcaatggagagaatgcctatcattgtggtgtttgtctccagagggcgccggcctccaagacgttaactttacacacctctgccaaggtcctcatccttgtattgaagagattctccgatgtcacaggcaacaagattgccaagaatgtgcaatatcctgagtgccttgacatgcagccatacatgtctcagccgaacacaggacctctcgtctatgtcctctatgctgtgctggtccacgctgggtggagttgtcacaacggacattacttctcttatgtcaaagctcaagaaggccagtggtataaaatggatgatgccgaggtcaccgcctctagcatcacttctgtcctgagtcaacaggcctacgtcctcttttacatccagaagagtgaatgggaaagacacagtgagagtgtgtcaagaggcagggaaccaagagcccttggcgcagaagacaccgacaggcgagcaacgcaaggagagctcaagagagaccacccctgcctccaggcccccgagttggacgagcacttggtggaaagagccactcaggaaagcaccttagaccactggaaattccttcaagagcaaaacaaaacgaagcctgagttcaacgtcagaaaagtcgaaggtaccctgcctcccgacgtacttgtgattcatcaatcaaaatacaagtgtgggatgaagaaccatcatcctgaacagcaaagctccctgctaaacctctcttcgtcgaccccgacacatcaggagtccatgaacactggcacactcgcttccctgcgagggagggccaggagatccaaagggaagaacaaacacagcaagagggctctgcttgtgtgccagtga

SEQ ID NO: 197226 - DNA, 1677 bp, Homo sapiens
  Payload ID: 18899
  Gene Name: ubiquitin specific peptidase 17-like family member 24
  ENST ID: ENST00000622713
  CDS Start-End: 1-1677
atggaggacgactcactctacttgagaggtgagtggcagttcaaccacttttcaaaactcacatcttctcggcccgatgcagcttttgctgaaatccagcggacttctctccctgagaagtcaccactctcatgtgagacccgtgtcgacctctgtgatgatttggctcctgtggcaagacagcttgctcccagggagaagcttcctctgagtagcaggagacctgctgcggtgggggctgggctccagaatatgggaaatacctgctacgtgaacgcttccttgcagtgcctgacatacacaccgccccttgccaactacatgctgtcccgggagcactctcaaacgtgtcatcgtcacaagggctgcatgctctgtactatgcaagctcacatcacacgggccctccacaatcctggccacgtcatccagccctcacaggcattggctgctggcttccatagaggcaagcaggaagatgcccatgaatttctcatgttcactgtggatgccatgaaaaaggcatgccttcccgggcacaagcaggtagatcatcactctaaggacaccaccctcatccaccaaatatttggaggctactggagatctcaaatcaagtgtctccactgccacggcatttcagacacttttgacccttacctggacatcgccctggatatccaggcagctcagagtgtccagcaagctttggaacagttggtgaagcccgaagaactcaatggagagaatgcctatcattgtggtgtttgtctccagagggcgccggcctccaagacgttaactttacacacctctgccaaggtcctcatccttgtattgaagagattctccgatgtcacaggcaacaagattgccaagaatgtgcaatatcctgagtgccttgacatgcagccatacatgtctcagccgaacacaggacctctcgtctatgtcctctatgctgtgctggtccacgctgggtggagttgtcacaacggacattacttctcttatgtcaaagctcaagaaggccagtggtataaaatggatgatgccgaggtcaccgcctctagcatcacttctgtcctgagtcaacaggcctacgtcctcttttacatccagaagagtgaatgggaaagacacagtgagagtgtgtcaagaggcagggaaccaagagcccttggcgcagaagacaccgacaggcgagcaacgcaaggagagctcaagagagaccacccctgcctccaggcccccgagttggacgagcacttggtggaaagagccactcaggaaagcaccttagaccactggaaattccttcaagagcaaaacaaaacgaagcctgagttcaacgtcagaaaagtcgaaggtaccctgcctcccgacgtacttgtgattcatcaatcaaaatacaagtgtgggatgaagaaccatcatcctgaacagcaaagctccctgctaaacctctcttcgtcgaccccgacacatcaggagtccatgaacactggcacactcgcttccctgcgagggagggccaggagatccaaagggaagaacaaacacagcaagagggctctgcttgtgtgccagtctcagtggaagtaccgacccacacgtgacattcagtgtgtatttctgaatatgacctaccgacgtgtaggtttgcgtgtgaggtaa

SEQ ID NO: 197227 - DNA, 1593 bp, Homo sapiens; identical to SEQ ID NO: 197225
  Payload ID: 18900
  Gene Name: ubiquitin specific peptidase 17-like family member 25
  Uniprot ID: Q0WX57
  ENST ID: ENST00000509271
  CDS Start-End: 1-1593

SEQ ID NO: 197228 - DNA, 1677 bp, Homo sapiens; identical to SEQ ID NO: 197226
  Payload ID: 18900
  Gene Name: ubiquitin specific peptidase 17-like family member 25
  ENST ID: ENST00000621472
  CDS Start-End: 1-1677

SEQ ID NO: 197229 - DNA, 1593 bp, Homo sapiens; identical to SEQ ID NO: 197225
  Payload ID: 18901
  Gene Name: ubiquitin specific peptidase 17-like family member 26
  Uniprot ID: Q0WX57
  ENST ID: ENST00000509660
  CDS Start-End: 1-1593

SEQ ID NO: 197230 - DNA, 1677 bp, Homo sapiens; identical to SEQ ID NO: 197226
  Payload ID: 18901
  Gene Name: ubiquitin specific peptidase 17-like family member 26
  ENST ID: ENST00000610514
  CDS Start-End: 1-1677

SEQ ID NO: 197231 - DNA, 1593 bp, Homo sapiens; identical to SEQ ID NO: 197225
  Payload ID: 18902
  Gene Name: ubiquitin specific peptidase 17-like family member 27
  Uniprot ID: Q0WX57
  ENST ID: ENST00000515574
  CDS Start-End: 1-1593

SEQ ID NO: 197232 - DNA, 1593 bp, Homo sapiens; identical to SEQ ID NO: 197225
  Payload ID: 18903
  Gene Name: ubiquitin specific peptidase 17-like family member 28
  Uniprot ID: Q0WX57
  ENST ID: ENST00000504543
  CDS Start-End: 1-1593

SEQ ID NO: 197233 - DNA, 1593 bp, Homo sapiens; identical to SEQ ID NO: 197225
  Payload ID: 18904
  Gene Name: ubiquitin specific peptidase 17-like family member 29
  Uniprot ID: Q0WX57
  ENST ID: ENST00000511681
  CDS Start-End: 1-1593

SEQ ID NO: 197234 - DNA, 1593 bp, Homo sapiens
  Payload ID: 18905
  Gene Name: ubiquitin specific peptidase 17-like family member 3
  Uniprot ID: A6NCW0
  ENST ID: ENST00000530484
  CDS Start-End: 1-1593
atgggggatgactcactctacttgggaggtgagtggcagttcaaccacttttcaaaactcacatcttctcggccagatgcagcttttgctgaaatccagcggacttctctccctgagaagtcaccactctcatctgagacccgtgtcgacctctgtgatgatttggctcctgtggcaagacagctcgctcccagggagaagcttcctctgagtagcaggagacctgctgcggtgggggctgggctccagaatatgggaaatacctgctacgagaacgcttccctgcagtgcctgacatacacactgccccttgccaactacatgctgtcccgggagcactctcaaacatgtcagcgtcccaagtgctgcatgctctgtactatgcaagctcacatcacatgggccctccacagtcctggccatgtcatccagccctcacaggcattggcttctggcttccatagaggcaagcaggaagatgtccatgaatttctcatgttcactgtggatgccatgaaaaaggcatgccttcccggccacaagcaggtagatcatcactctaaggacaccaccctcatccaccaaatatttggaggctgctggagatctcaaatcaagtgtctccactgccacgggatttcagacacttttgacccttacctggacatcgccctggatatccaggcagctcagagtgtcaagcaagctttggaacagttggtgaagcccgaagaactcaatggagagaatgcctatcattgcggtctttgtctccagagggcgccggcctccaacacgttaactttacacacttctgccaaggtcctcatccttgtcttgaagagattctccgatgtcgcaggcaacaaacttgccaagaatgtgcaatatcctgagtgccttgacatgcagccatacatgtctcagcagaacacaggacctcttgtctatgtcctctatgctgtgctggtccacgctgggtggagttgtcacgacggacattacttctcttatgtcaaagctcaagaaggccagtggtataaaatggatgatgccgaggtcactgtctgtagcatcacttctgtcctgagtcaacaggcctatgtcctcttttacatccagaagagtgaatgggaaagacacagtgagagtgtgtcaagaggcagggaaccaagagccctcggcgctgaagacacagacaggcgagcaaagcaaggagagctcaagagagaccacccctgcctccaggcacccgagttggacgagcacttggtggaaagagccactcaggaaagcaccttagaccactggaaattcctccaagagcaaaacaaaacgaagcctgagttcaacgtcggaaaagtcgaaggtaccctgcctcccaacgcacttgtgattcatcaatcaaaatacaagtgtgggatgaaaaaccatcatcctgaacagcaaagctccctgctaaacctctcttcgacgacccggacagatcaggagtccatgaacactggcacactcgcttctctgcaagggaggaccaggagagccaaagggaagaacaaacacagcaagagggctctgcttgtgtgccagtga

SEQ ID NO: 197235 - DNA, 1593 bp, Homo sapiens; identical to SEQ ID NO: 197225
  Payload ID: 18906
  Gene Name: ubiquitin specific peptidase 17-like family member 30
  Uniprot ID: Q0WX57
  ENST ID: ENST00000504104
  CDS Start-End: 1-1593

SEQ ID NO: 197236 - DNA, 1593 bp, Homo sapiens
  Payload ID: 18907
  Gene Name: ubiquitin specific peptidase 17-like family member 4
  Uniprot ID: A6NCW7
  ENST ID: ENST00000526929
  CDS Start-End: 1-1593
atgggggacgactcactctacttgggaggtgagtggcagttcaaccacttttcaaaactcacatcttctcggccagatgcagcttttgctgaaatccagcggacttctctccctgagaagtcaccactctcatctgagacccgtgtcgacctctgtgatgatttggctcctgtggcaagacagctcgctcccagggagaagcttcctctgagtagcaggagacctgctgcggtgggggctgggctccagaatatgggaaatacctgctacgagaacgcttccctgcagtgcctgacatacacactgccccttgccaactacatgctgtcccgggagcactctcaaacatgtcagcgtcccaagtgctgcatgctctgtactatgcaagctcacatcacatgggccctccacagtcctggccatgtcatccagccctcacaggcattggctgctggcttccatagaggcaagcaggaagatgtccatgaatttctcatgttcactgtggatgccatgaaaaaggcatgccttcccggccacaagcaggtagatcatcactctaaggacaccaccctcatccaccaaatatttggaggctgctggagatctcaaatcaagtgtctccactgccacgggatttcagacacttttgacccttacctggacatcgccctggatatccaggcagctcagagtgtcaagcaagctttggaacagttggtgaagcccgaagaactcaatggagagaatgcctatcattgcggtctttgtctccagagggcgccggcctccaacacgttaactttacacacttctgccaaggtcctcatccttgtcttgaagagattctccgatgtcgcaggcaacaaacttgccaagaatgtgcaatatcctgagtgccttgacatgcagccatacatgtctcagcagaacacaggacctcttgtctatgtcctctatgctgtgctggtccacgctgggtggagttgtcacgacggatattacttctcttatgtcaaagctcaagaaggccagtggtataaaatggatgatgccgaggtcactgtctgtagcatcacttctgtcctgagtcaacaggcctatgtcctcttttacatccagaagagtgaatgggaaagacacagtgagagtgtgtcaagaggcagggaaccaagagcccttggcgctgaagacacagacaggccagcaacgcaaggagagctcaagagagaccacccttgcctccaggtacccgagttggacgagcacttggtggaaagagccactgaggaaagcaccttagaccactggaaattcccccaagagcaaaacaaaatgaagcctgagttcaacgtcagaaaagttgaaggtaccctgcctcccaacgtacttgtgattcatcaatcaaaatacaagtgtgggatgaaaaaccaccatcctgaacagcaaagctccctgctaaacctctcttcgatgaactcgacagatcaggagtccatgaacactggcacactcgcttctctgcaagggaggaccaggagatccaaagggaagaacaaacacagcaagagatctctgcttgtgtgccagtga

SEQ ID NO: 197237 - DNA, 1593 bp, Homo sapiens
  Payload ID: 18908
  Gene Name: ubiquitin specific peptidase 17-like family member 5
  Uniprot ID: A8MUK1
  ENST ID: ENST00000507227
  CDS Start-End: 1-1593
atggaggacgactcactctacttgagaggtgagtggcagttcaaccacttttcaaaactcacatcttctcggcccgatgcagcttttgctgaaatccagcggacttctctccctgagaagtcaccactctcatgtgagacccgtgtcgacctctgtgatgatttggctcctgtggcaagacagcttgctcccagggagaagcttcctctgagtagcaggagacctgctgcggtgggggctgggctccagaatatgggaaatacctgctacgtgaacgcttccttgcagtgcctgacatacacaccgccccttgccaactacatgctgtcccgggagcactctcaaacgtgtcatcgtcacaagggctgcatgctctgtactatgcaagctcacatcacacgggccctccacaatcctggccacgtcatccagccctcacaggcattggctgctggcttccatagaggcaagcaggaagatgcccatgaatttctcatgttcactgtggatgccatgaaaaaggcatgccttcccgggcacaagcaggtagatcatcactctaaggacaccaccctcatccaccaaatatttggaggctactggagatctcaaatcaagtgtctccactgccacggcatttcagacacttttgacccttacctggacatcgccctggatatccaggcagctcagagtgtccagcaagctttggaacagttggcgaagcccgaagaactcaatggagagaatgcctatcattgtggtgtttgtctccagagggcgccggcctccaagacgttaactttacacacctctgccaaggtcctcatccttgtattgaagagattctccgatgtcacaggcaacaagattgccaagaatgtgcaatatcctgagtgccttgacatgcagccatacatgtctcagccgaacacaggacctctcgtctatgtcctctatgctgtgctggtccacgctgggtggagttgtcacaacggacattacttctcttatgtcaaagctcaagaaggccagtggtataaaatggatgatgccgaggtcaccgcctctagcatcacttctgtcctgagtcaacaggcctacgtcctcttttacatccagaagagtgaatgggaaagacacagtgagagtgtgtcaagaggcagggaaccaagagcccttggcgcagaagacaccgacaggcgagcaacgcaaggagagctcaagagagaccacccctgcctccaggcccccgagttggacgagcacttggtggaaagagccactcaggaaagcaccttagaccactggaaattccttcaagagcaaaacaaaacgaagcctgagttcaacgtcagaaaagtcgaaggtaccctgcctcccgacgtacttgtgattcatcaatcaaaatacaagtgtgggatgaagaaccatcatcctgaacagcaaagctccctgctaaacctctcttcgtcgaccccgacacatcaggagtccatgaacactggcacactcgcttccctgcgagggagggccaggagatccaaagggaagaacaaacacagcaagagggctctgcttgtgtgccagtga

SEQ ID NO: 197238 - DNA, 2028 bp, Homo sapiens
  Payload ID: 18909
  Gene Name: ubiquitin specific peptidase 17-like family member 7
  Uniprot ID: P0C7H9
  ENST ID: ENST00000530447
  CDS Start-End: 436-2028
acacacacacacacacacagacacacacacggtttcataggtaaagatttcttccctgacattcttttacctaaaataaggcaactgtgtggccactgtcccaacccggttacactcatattacatgtgtctatcagcctgaggagtaatttgattcaggtgttctagaagtcatgatgtgggctgtgtctgttgaattcccagcgatgcaaggggacacaccctgtgactcattccttaattgagtgctgatatttgattggtttatcgcacacctgatgggtgggtggggtgttcgcggttggagggggtgagttatataagggctgatgcggccagagagctggtcatttgaagactctctcggaagagatagcgtcttgctgcaacctgcggtcccagcagaaaaaccttgtgatccttgttgcgggcgacatggaagacgactcactctatttgggaggtgactggcagttcaatcacttttcaaaactcacatcttctcggctagatgcagcttttgctgaaatccagcggacttctctctctgaaaagtcaccactctcatctgagacccgtttcgacctctgtgatgatttggctcctgtggcaagacagcttgctcccagggagaagcttcctctgagtagcaggagacctgctgcggtgggggctgggctccagaagataggaaataccttctatgtgaacgtttccctgcagtgcctgacatacacactgccgctttccaactacatgctgtcccgggaggactctcaaacgtgtcatcttcacaagtgctgcatgttctgtactatgcaagctcacatcacatgggccctccacagtcctggccatgtcatccagccctcacaggtattggctgctggcttccatagaggtgagcaggaggatgcccatgaatttctcatgtttactgtggatgccatgaaaaaggcatgccttcccgggcacaagcagctagatcatcactccaaggacaccaccctcatccaccaaatatttggagcgtattggagatctcaaatcaagtatctccactgccacggcgtttcagacacctttgacccttacctggacatcgccctggatatccaggcagctcagagtgtcaagcaagctttggaacagttggtgaagcccaaagaactcaatggagagaatgcctatcattgtggtctttgtctccagaaggcgcctgcctccaagacgttaactttacccacttctgccaaggtcctcattcttgtattgaagagattctccgatgtcacaggcaacaaacttgccaagaatgtgcaatatcctaagtgccgtgacatgcagccatacatgtctcagcagaacacaggacctcttgtctatgtcctctatgctgtgctggtccacgctgggtggagttgtcacaacggacattacttctcttatgtcaaagctcaagaaggccagtggtataaaatggatgatgccgaggtcactgcctctggcatcacctctgtcctgagtcaacaggcctatgtcctcttttacatccagaagagtgaatgggaaagacacagtgagagtgtgtcaagaggcagggaaccaagagcccttggtgctgaagacacagacaggccagcaacgcaaggagagctcaagagagaccacccttgcctccaggtacccgagttggacgagcacttggtggaaagagccactcaggaaagcaccttagaccactggaaattcccccaagagcaaaacaaaacgaagcctgagttcaacgtcagaaaagttgaaggtaccctgcctcccaacgtacttgtgattcatcaatcaaaatacaagtgtggtatgaaaaaccatcatcctgaacagcaaagctccctgctaaacctctcttcgacgaaaccgacagatcaggagtccatgaacactggcacactcgcttctctgcaagggagcaccaggagatccaaagggaataacaaacacagcaagagatctctgcttgtgtgccagtga

SEQ ID NO: 197239 - DNA, 1593 bp, Homo sapiens
  Payload ID: 18910
  Gene Name: ubiquitin specific peptidase 17-like family member 8
  ENST ID: ENST00000625190
  CDS Start-End: 1-1593
atgggggatgactcactctacttgggaggtgagtggcagttcaaccacttttcaaaactcacatcttctcggccagatgcagcttttgctgaaatccagcggacttctctccctgagaagtcaccactctcatctgagacccgtgtcgacctctgtgatgatttggctcctgtggcaagacagctcgctcccagggagaagcttcctctgagtagcaggagacctgctgcggtgggggctgggctccagaatatgggaaatacctgctacgagaacgcttccctgcagtgcctgacatacacactgccccttgccaactacatgctgtcccgggagcactctcaaacatgtcagcgtcccaagtgctgcatgctctgtactatgcaagctcacatcacatgggccctccacagtcctggccatgtcatccagccctcacaggcattggcttctggcttccatagaggcaagcaggaagatgtccatgaatttctcatgttcactgtggatgccatgaaaaaggcatgccttcccggccacaagcaggtagatcatcactctaaggacaccaccctcatccaccaaatatttggaggctgctggagatctcaaatcaagtgtctccactgccacgggatttcagacacttttgacccttacctggacatcgccctggatatccaggcagctcagagtgtcaagcaagctttggaacagttggtgaagcccgaagaactcaatggagagaatgcctatcattgcggtctttgtctccagagggcgccggcctccaacacgttaactttacacacttctgccaaggtcctcatccttgtcttgaagagattctgcgatgtcacaggcaacaaacttgccaagaatgtgcaatatcctgagtgccttgacatgcagccatacatgtctcagcagaacacaggacctcttgtctatgtcctctatgctgtgctggtccacgctgggtggagttgtcacaacggatattacttctcttatgtcaaagctcaagaaggccagtggtataaaatggatgatgccgaggtcactgcctgtagcatcacttctgtcctgagtcaacaggcctatgtcctcttttacatccagaagagtgaatgggaaagacacagtgagagtgtgtcaagaggcagggaaccaagagcccttggcgctgaagacacagacaggccagcaacgcaaggagagctcaagagagaccacccttgcctccaggtacccgagttggacgagcacttggtggaaagagccactgaggaaagcaccttagaccactggaaattcccccaagagcaaaacaaaatgaagcctgagttcaacgtcagaaaagttgaaggtaccctgcctcccaacgtacttgtgattcatcaatcaaaatacaagtgtgggatgaaaaaccaccatcctgaacagcaaagctccctgctaaacctctcttcgatgaactcgacagatcaggagtccatgaacactggcacactcgcttctctgcaagggaggaccaggagatccaaagggaagaacaaacacagcaagagatctctgcttgtgtgccagtga

SEQ ID NO: 197240 - DNA, 1593 bp, Homo sapiens
  Payload ID: 18910
  Gene Name: ubiquitin specific peptidase 17-like family member 8
  Uniprot ID: P0C7I0
  ENST ID: ENST00000527080
  CDS Start-End: 1-1593
atggaggacgactcactctacttgggaggtgagtggcagttcaaccacttttcaaaactcacatctcctcggccagatgcagcttttgctgaaatccagcggacttctctccctgagaagtcaccactctcatctgagacccgtgtcgacctctgtgatgatttggctcctgtggcaagacagcttgctcccagggagaagcttcctctgagtagcaggagacctgctgctgtgggggctggtctccagaatatgggaaatacctgctacttgaatgcttccctgcagtgcctgacatacacaccgccccttgccaactacatgctgtcccgggagcactctcaaacatgtcagcgtcccaagtgctgcatgctctgtactatgcaagctcacatcacatgggccctccacagtcctggccatgtcatccagccctcacaggcattggctgctggcttccatagaggcaagcaggaagatgcccatgaatttctcatgttcactgtggatgccatgaaaaaggcatgccttcccggccacaagcaggtagatcatcactctaaggacaccaccctcatccaccaaatatttggaggctgctggagatctcaaatcaagtgtctccactgccacgggatttcagacacttttgacccttacctggacatcgccctggatatccaggcagctcagagtgtcaagcaagctttggaacagttggtgaagcccgaagaactcaatggagagaatgcctatccttgcggtctttgtctccagagggcgccggcctccaacacgttaactttacacacttctgccaaggtcctcatccttgtcttgaagagattctgcgatgtcacaggcaacaaacttgccaagaatgtgcaatatcctgagtgccttgacatgcagccatacatgtctcagcagaacacaggacctcttgtctatgtcctctatgctgtgctggtccacgctgggtggagttgtcacaacggatattacttctcttatgtcaaagctcaagaaggccagtggtataaaatggatgatgccgaggtcactgcctgtagcatcacttctgtcctgagtcaacaggcctatgtcctcttttacatccagaagagtgaatgggaaagacacagtgagagtgtgtcaagaggcagggaaccaagagcccttggcgctgaagacacagacaggccagcaacgcaaggagagctcaagagagaccacccttgcctccaggtacccgagttggacgagcacttggtggaaagagccactgaggaaagcaccttagaccactggaaattcccccaagagcaaaacaaaatgaagcctgagttcaacgtcagaaaagttgaaggtaccctgcctcccaacgtacttgtgattcatcaatcaaaatacaagtgtgggatgaaaaaccaccatcctgaacagcaaagctccctgctaaacctctcttcgatgaactcgacagatcaggagtccatgaacactggcacactcgcttctctgcaagggaggaccaggagatccaaagggaagaacaaacacagcaagagatctctgcttgtgtgccagtga

SEQ ID NO: 197241 - DNA, 2129 bp, Homo sapiens
  Payload ID: 18911
  Gene Name: ubiquitin specific peptidase 18
  Uniprot ID: Q9UMW8
  ENST ID: ENST00000215794
  CDS Start-End: 431-1549
gacagaatgagactccgtctcaaaaaaaaaaaaaaaaaaaaaaagcgagggctggaagtctggagcaggtgcgcggctgcaacggcagccgcgggaagctcgggccggcagggtttccccgcacgctggcgcccagctcccggcgcggaggccgctgtaagtttcgctttccattcagtggaaaacgaaagctgggcggggtgccacgagcgcggggccagaccaaggcgggcccggagcggaacttcggtcccagctcggtccccggctcagtcccgacgtggaactcagcagcggaggctggacgcttgcatggcgcttgagagattccatcgtgcctggctcacataagcgcttcctggaagtgaagtcgtgctgtcctgaacgcgggccaggcagctgcggcctgggggttttggagtgatcacgaatgagcaaggcgtttgggctcctgaggcaaatctgtcagtccatcctggctgagtcctcgcagtccccggcagatcttgaagaaaagaaggaagaagacagcaacatgaagagagagcagcccagagagcgtcccagggcctgggactaccctcatggcctggttggtttacacaacattggacagacctgctgccttaactccttgattcaggtgttcgtaatgaatgtggacttcaccaggatattgaagaggatcacggtgcccaggggagctgacgagcagaggagaagcgtccctttccagatgcttctgctgctggagaagatgcaggacagccggcagaaagcagtgcggcccctggagctggcctactgcctgcagaagtgcaacgtgcccttgtttgtccaacatgatgctgcccaactgtacctcaaactctggaacctgattaaggaccagatcactgatgtgcacttggtggagagactgcaggccctgtatacgatccgggtgaaggactccttgatttgcgttgactgtgccatggagagtagcagaaacagcagcatgctcaccctcccactttctctttttgatgtggactcaaagcccctgaagacactggaggacgccctgcactgcttcttccagcccagggagttatcaagcaaaagcaagtgcttctgtgagaactgtgggaagaagacccgtgggaaacaggtcttgaagctgacccatttgccccagaccctgacaatccacctcatgcgattctccatcaggaattcacagacgagaaagatctgccactccctgtacttcccccagagcttggatttcagccagatccttccaatgaagcgagagtcttgtgatgctgaggagcagtctggagggcagtatgagctttttgctgtgattgcgcacgtgggaatggcagactccggtcattactgtgtctacatccggaatgctgtggatggaaaatggttctgcttcaatgactccaatatttgcttggtgtcctgggaagacatccagtgtacctacggaaatcctaactaccactggcaggaaactgcatatcttctggtttacatgaagatggagtgctaatggaaatgcccaaaaccttcagagattgacacgctgtcattttccatttccgttcctggatctacggagtcttctaagagattttgcaatgaggagaagcattgttttcaaactatataactgagccttatttataattagggatattatcaaaatatgtaaccatgaggcccctcaggtcctgatcagtcagaatggatgctttcaccagcagacccggccatgtggctgctcggtcctgggtgctcgctgctgtgcaagacattagccctttagttatgagcctgtgggaacttcaggggttcccagtggggagagcagtggcagtgggaggcatctgggggccaaaggtcagtggcagggggtatttcagtattatacaactgctgtgaccagacttgtatactggctgaatatcagtgctgtttgtaatttttcactttgagaaccaacattaattccatatgaatcaagtgttttgtaactgctattcatttattcagcaaatatttattgatcatctcttctccataagatagtgtgataaacacagtcatgaataaagttattttccacaaaa

SEQ ID NO: 197242 - DNA, 1905 bp, Homo sapiens
  Payload ID: 18912
  Gene Name: ubiquitin specific peptidase 19
  ENST ID: ENST00000306026
  CDS Start-End: 200-1905
ggaaccggaacggagagcgggttgccagggcccgaagagggctggctgcggcggtctcgctcggctgtccgttccttgctggagaatttggccacaaagagttgccaagatagctgggccaggaagaaagcgccgcagccctgacccagacgctgttgccgaccccggggcactctggctgtcgaccaagcggctcaagatgtctggcggggccagtgccacaggcccaaggagagggcccccaggactggaggacaccactagtaagaagaagcagaaggatcgagcaaaccaggagagcaaggatggagatcctaggaaagagacagggtctcgatatgttgcccaggctggtcttgaacctctggcctcaggtgatccttctgcctcagcctcccatgcagctgggatcacaggctcacgccaccgtacccggctgttctttccttcatcgtcagggtcagcatccactcctcaagaggagcagaccaaagaggagttgttgctcgattggaggcagagtgcagaagaggtgattgtcaagcttcgtgtgggagtaggtcccctgcagctggaggatgtagatgctgctttcacagatacagactgtgtggtgcggtttgcaggtggtcagcagtggggtggtgtcttctatgctgagataaaaagctcttgtgctaaagtgcaaacccgcaagggcagtctcctgcacctgacactgcccaaaaaggtgcctatgctcacgtggccctccctcctgaagaaacctctagggacccaggagctggtgccggggctgcggtgccaggagaatgggcaggaactgtctcccattgccctggagccaggccctgagccccaccgggctaagcaggaggcccggaaccagaagcgggcccagggccgtggtgaggtaggcgcaggggctggccccggggcccaggcagggcccagcgccaagagggctgtgcatctctgcagagggccagagggggacgggtccagggatgaccctggaccccggggtgatgccccacccttcgtggctgacccagccacccaggttgaggctgatgaacagctttgcataccaccgctgaactcccaaacctgcctcctgggctcagaggagaatttagcccctttggcaggagagaaagcagtgcctcccgggaatgacccagtctctccagccatggtccggagcagaaaccctgggaaagatgactgtgccaaggaggagatggcagtggcagcagatgctgcaaccttggtggatgagcccgagtcgatggtgaacctggcgtttgtcaagaatgactcgtatgagaagggcccggattcagtggtggtgcacgtgtacgtgaaggagatctgcagggacacctcaagagtacttttccgtgagcaggacttcacgctcatcttccagaccagggatggaaacttcctgaggctgcacccgggctgtgggccccacaccaccttccgttggcaggtgaagctcaggaatctgattgagccagagcagtgcaccttctgtttcacggcttctcgcatcgacatctgccttcgtaagaggcagagtcagcgctgggggggcctggaggccccggctgcacgaggtgcagtgggtggtgcaaaggttgccgtgccgacaggtccaacccctctggattcaaccccaccaggaggtgctccccaccccctgacaggccaggaggaggcccgggctgtggagaaggataaatccaaggcacgatctgaggacacagggctagacagtgtggcaacccgcacacccatggagcatgtaaccccaaagccagagacacacctggcctcgcccaagcctacatgcatggtgcctcccatgccccacagcccagttagtggagacagcgt

SEQ ID NO: 197243 - DNA, 4559 bp, Homo sapiens
  Payload ID: 18912
  Gene Name: ubiquitin specific peptidase 19
  Uniprot ID: O94966
  ENST ID: ENST00000398888
  CDS Start-End: 320-4276
agcttggcgctccgcctccctcggccttagctagaagtcgaaacaaaacaagccgctaaggcggtggcggcggcgccgggacgggggaggggcgcgccggaaccggaaccgacctgcgccggaaccggaacggagagcgggttgccagggcccgaagagggctggctgcggcggtctcgctcggctgtccgttccttgctggagaatttggccacaaagagttgccaagatagctgggccaggaagaaagcgccgcagccctgacccagacgctgttgccgaccccggggcactctggctgtcgaccaagcggctcaagatgtctggcggggccagtgccacaggcccaaggagagggcccccaggactggaggacaccactagtaagaagaagcagaaggatcgagcaaaccaggagagcaaggatggagatcctaggaaagagacagggtctcgatatgttgcccaggctggtcttgaacctctggcctcaggtgatccttctgcctcagcctcccatgcagctgggatcacaggctcacgccaccgtacccggctgttctttccttcatcgtcagggtcagcatccactcctcaagaggagcagaccaaagagggagcttgtgaagaccctcatgatctcttggctactcccactccagagttgttgctcgattggaggcagagtgcagaagaggtgattgtcaagcttcgtgtgggagtaggtcccctgcagctggaggatgtagatgctgctttcacagatacagactgtgtggtgcggtttgcaggtggtcagcagtggggtggtgtcttctatgctgagataaaaagctcttgtgctaaagtgcaaacccgcaagggcagtctcctgcacctgacactgcccaaaaaggtgcctatgctcacgtggccctccctcctggttgaggctgatgaacagctttgcataccaccgctgaactcccaaacctgcctcctgggctcagaggagaatttagcccctttggcaggagagaaagcagtgcctcccgggaatgacccagtctctccagccatggtccggagcagaaaccctgggaaagatgactgtgccaaggaggagatggcagtggcagcagatgctgcaaccttggtggatgagcccgagtcgatggtgaacctggcgtttgtcaagaatgactcgtatgagaagggcccggattcagtggtggtgcacgtgtacgtgaaggagatctgcagggacacctcaagagtacttttccgtgagcaggacttcacgctcatcttccagaccagggatggaaacttcctgaggctgcacccgggctgtgggccccacaccaccttccgttggcaggtgaagctcaggaatctgattgagccagagcagtgcaccttctgtttcacggcttctcgcatcgacatctgccttcgtaagaggcagagtcagcgctgggggggcctggaggccccggctgcacgagtgggtggtgcaaaggttgccgtgccgacaggtccaacccctctggattcaaccccaccaggaggtgctccccaccccctgacaggccaggaggaggcccgggctgtggagaaggataaatccaaggcacgatctgaggacacagggctagacagtgtggcaacccgcacacccatggagcatgtaaccccaaagccagagacacacctggcctcgcccaagcctacatgcatggtgcctcccatgccccacagcccagttagtggagacagcgtggaggaggaggaagaggaagagaagaaggtgtgtctgccaggcttcactggccttgtcaatttaggcaacacctgcttcatgaacagcgtcattcagtctctgtccaacactcgggaactccgggacttcttccatgaccgctcctttgaggctgagatcaactacaacaacccactagggactggtgggcgtctggccattggctttgccgtgctgcttcgggcgctgtggaagggcacccaccatgccttccagccttccaagttgaaggccattgtggcgagtaaggccagccagttcacaggctatgcacagcatgatgcccaggagttcatggctttcctgctggatgggctgcacgaggacctgaatcgcattcagaacaagccctacacagagaccgtggattcagatgggcggcccgatgaggtggtagctgaggaagcatggcagcggcacaagatgaggaatgactctttcatcgtggacctatttcaggggcagtacaagtcgaagctggtgtgccctgtgtgtgccaaggtctccatcacttttgacccgtttctttatctgccggtgcccttgccacaaaagcaaaaggttctccctgtcttttattttgcccgagagccccacagcaagcccatcaagttcctggtgagcgtcagcaaggagaactccactgcgagcgaagtattggactccctctctcagagtgttcatgtgaagcctgagaacctgcgtttggcggaggtaattaagaatcgttttcatcgtgtgttcctaccctcccactcactggacactgtgtccccatctgatacgctcctctgctttgagctgctatcctcagagttggctaaggagcgggtagtggtgctagaggtgcaacagcgcccccaggtgcccagcgtccccatctccaagtgtgcagcctgccagcggaagcaacagtcggaggatgaaaagctgaagcgctgtacccggtgctaccgtgtgggctactgcaaccagctctgccagaaaacccactggcctgaccacaagggcctctgccgacctgagaacattggctaccccttcctggtcagtgtacctgcctcacgcctcacttatgcccgcctcgctcagttgctagagggctatgcccggtactctgtgagtgtattccagccaccctttcagccaggccgcatggccttggagtctcagagccctggctgcaccacactgctctccacaggttccctggaggctggggacagcgagagagaccccattcagccacctgagctccagctggtgacccctatggctgagggggacacagggcttccccgggtgtgggcagcccctgaccggggtcctgtgcccagcaccagtggaatttcttctgagatgctggccagtgggcccattgaggttggctccttgccagctggcgagagggtgtcccgacccgaagctgctgtgcctgggtaccagcatccaagtgaagctatgaatgcccacacaccccagttcttcatctataaaattgattcatccaaccgagagcagcggctagaggacaaaggagacaccccactggagctgggtgacgactgtagcctggctctcgtctggcggaacaatgagcgcttgcaggagtttgtgttggtagcctccaaggagctggaatgtgctgaggatccaggctctgccggtgaggctgcccgggccggccacttcaccctggaccagtgcctcaacctcttcacacggcctgaggtgctggcacccgaggaggcctggtactgcccacagtgcaaacagcaccgtgaggcctccaagcagctgttgctatggcgcctgccaaatgttctcatcgtgcagctcaagcgcttctcctttcgtagttttatctggcgtgacaagatcaatgacttggtggagttccctgttaggaacctggacctgagcaagttctgcattggtcagaaagaggagcagctgcccagctacgatctatatgctgtcatcaaccactatggaggcatgattggtggccactacactgcctgtgcacgcctgcccaatgatcgtagcagtcagcgcagtgacgtgggctggcgcttgtttgatgacagcacagtgacaacggtagacgagagccaggttgtgacgcgttatgcctatgtactcttctaccgccggcggaactctcctgtggagaggccccccagggcaggtcactctgagcaccacccagacctaggccctgcagctgaggctgctgccagccaggcttcccggatttggcaggagctggaggctgaggaggagccggtgcctgaggggtctgggcccctgggtccctgggggccccaagactgggtgggccccctaccacgtggccctaccacaccagatgagggctgcctccggtactttgtcctgggcaccgtggcggctttggtggccctcgtgctcaacgtgttctatcctctggtatcccagagtcgctggagatgagctcgcctgcaggcagctgctgtgagctggcctacctgcctgccccaggccatgcctgcctttgttgtggggaacacctctgggctttgggcctcagcttatgcatctggtgggagagggtggggaggttgtggcccctgcaggggcagagtatcctagggtgtgtatccatctggctgtctgtccattcatcctgctgctctgacccttggcctcaggcttggccctgcccaagctacttcctgtacttaaaagtgttaataaaaccagactattcaggccc

SEQ ID NO: 197244 - DNA, 4622 bp, Homo sapiens
  Payload ID: 18912
  Gene Name: ubiquitin specific peptidase 19
  ENST ID: ENST00000398892
  CDS Start-End: 261-4337
ggcggtggcggcggcgccgggacgggggaggggcgcgccggaaccggaaccgacctgcgccggaaccggaacggagagcgggttgccagggcccgaagagggctggctgcggcggtctcgctcggctgtccgttccttgctggagaatttggccacaaagagttgccaagatagctgggccaggaagaaagcgccgcagccctgacccagacgctgttgccgaccccggggcactctggctgtcgaccaagcggctcaagatgtctggcggggccagtgccacaggcccaaggagagggcccccaggactggaggacaccactagtaagaagaagcagaaggatcgagcaaaccaggagagcaaggatggagatcctaggaaagcatccactcctcaagaggagcagaccaaagaggagttgttgctcgattggaggcagagtgcagaagaggtgattgtcaagcttcgtgtgggagtaggtcccctgcagctggaggatgtagatgctgctttcacagatacagactgtgtggtgcggtttgcaggtggtcagcagtggggtggtgtcttctatgctgagataaaaagctcttgtgctaaagtgcaaacccgcaagggcagtctcctgcacctgacactgcccaaaaaggtgcctatgctcacgtggccctccctcctgaaacctctagggacccaggagctggtgccggggctgcggtgccaggagaatgggcaggaactgtctcccattgccctggagccaggccctgagccccaccgggctaagcaggaggcccggaaccagaagcgggcccagggccgtggtgaggtaggcgcaggggctggccccggggcccaggcagggcccagcgccaagagggctgtgcatctctgcagagggccagagggggacgggtccagggatgaccctggaccccggggtgatgccccacccttcgtggctgacccagccacccaggttgaggctgatgaacagctttgcataccaccgctgaactcccaaacctgcctcctgggctcagaggagaatttagcccctttggcaggagagaaagcagtgcctcccgggaatgacccagtctctccagccatggtccggagcagaaaccctgggaaagatgactgtgccaaggaggagatggcagtggcagcagatgctgcaaccttggtggatgagcccgagtcgatggtgaacctggcgtttgtcaagaatgactcgtatgagaagggcccggattcagtggtggtgcacgtgtacgtgaaggagatctgcagggacacctcaagagtacttttccgtgagcaggacttcacgctcatcttccagaccagggatggaaacttcctgaggctgcacccgggctgtgggccccacaccaccttccgttggcaggtgaagctcaggaatctgattgagccagagcagtgcaccttctgtttcacggcttctcgcatcgacatctgccttcgtaagaggcagagtcagcgctgggggggcctggaggccccggctgcacgaggtgcagtgggtggtgcaaaggttgccgtgccgacaggtccaacccctctggattcaaccccaccaggaggtgctccccaccccctgacaggccaggaggaggcccgggctgtggagaaggataaatccaaggcacgatctgaggacacagggctagacagtgtggcaacccgcacacccatggagcatgtaaccccaaagccagagacacacctggcctcgcccaagcctacatgcatggtgcctcccatgccccacagcccagttagtggagacagcgtggaggaggaggaagaggaagagaagaaggtgtgtctgccaggcttcactggccttgtcaatttaggcaacacctgcttcatgaacagcgtcattcagtctctgtccaacactcgggaactccgggacttcttccatgaccgctcctttgaggctgagatcaactacaacaacccactagggactggtgggcgtctggccattggctttgccgtgctgcttcgggcgctgtggaagggcacccaccatgccttccagccttccaagttgaaggccattgtggcgagtaaggccagccagttcacaggctatgcacagcatgatgcccaggagttcatggctttcctgctggatgggctgcacgaggacctgaatcgcattcagaacaagccctacacagagaccgtggattcagatgggcggcccgatgaggtggtagctgaggaagcatggcagcggcacaagatgaggaatgactctttcatcgtggacctatttcaggggcagtacaagtcgaagctggtgtgccctgtgtgtgccaaggtctccatcacttttgacccgtttctttatctgccggtgcccttgccacaaaagcaaaaggttctccctgtcttttattttgcccgagagccccacagcaagcccatcaagttcctggtgagcgtcagcaaggagaactccactgcgagcgaagtattggactccctctctcagagtgttcatgtgaagcctgagaacctgcgtttggcggaggtaattaagaatcgttttcatcgtgtgttcctaccctcccactcactggacactgtgtccccatctgatacgctcctctgctttgagctgctatcctcagagttggctaaggagcgggtagtggtgctagaggtgcaacagcgcccccaggtgcccagcgtccccatctccaagtgtgcagcctgccagcggaagcaacagtcggaggatgaaaagctgaagcgctgtacccggtgctaccgtgtgggctactgcaaccagctctgccagaaaacccactggcctgaccacaagggcctctgccgacctgagaacattggctaccccttcctggtcagtgtacctgcctcacgcctcacttatgcccgcctcgctcagttgctagagggctatgcccggtactctgtgagtgtattccagccaccctttcagccaggccgcatggccttggagtctcagagccctggctgcaccacactgctctccacaggttccctggaggctggggacagcgagagagaccccattcagccacctgagctccagctggtgacccctatggctgagggggacacagggcttccccgggtgtgggcagcccctgaccggggtcctgtgcccagcaccagtggaatttcttctgagatgctggccagtgggcccattgaggttggctccttgccagctggcgagagggtgtcccgacccgaagctgctgtgcctgggtaccagcatccaagtgaagctatgaatgcccacacaccccagttcttcatctataaaattgattcatccaaccgagagcagcggctagaggacaaaggagacaccccactggagctgggtgacgactgtagcctggctctcgtctggcggaacaatgagcgcttgcaggagtttgtgttggtagcctccaaggagctggaatgtgctgaggatccaggctctgccggtgaggctgcccgggccggccacttcaccctggaccagtgcctcaacctcttcacacggcctgaggtgctggcacccgaggaggcctggtactgcccacagtgcaaacagcaccgtgaggcctccaagcagctgttgctatggcgcctgccaaatgttctcatcgtgcagctcaagcgcttctcctttcgtagttttatctggcgtgacaagatcaatgacttggtggagttccctgttaggaacctggacctgagcaagttctgcattggtcagaaagaggagcagctgcccagctacgatctatatgctgtcatcaaccactatggaggcatgattggtggccactacactgcctgtgcacgcctgcccaatgatcgtagcagtcagcgcagtgacgtgggctggcgcttgtttgatgacagcacagtgacaacggtagacgagagccaggttgtgacgcgttatgcctatgtactcttctaccgccggcggaactctcctgtggagaggccccccagggcaggtcactctgagcaccacccagacctaggccctgcagctgaggctgctgccagccaggcttcccggatttggcaggagctggaggctgaggaggagccggtgcctgaggggtctgggcccctgggtccctgggggccccaagactgggtgggccccctaccacgtggccctaccacaccagatgagggctgcctccggtactttgtcctgggcaccgtggcggctttggtggccctcgtgctcaacgtgttctatcctctggtatcccagagtcgctggagatgagctcgcctgcaggcagctgctgtgagctggcctacctgcctgccccaggccatgcctgcctttgttgtggggaacacctctgggctttgggcctcagcttatgcatctggtgggagagggtggggaggttgtggcccctgcaggggcagagtatcctagggtgtgtatccatctggctgtctgtccattcatcctgctgctctgacccttggcctcaggcttggccctgcccaagctacttcctgtacttaaaagtgttaataaaaccagactattcaggcccaa

SEQ ID NO: 197245 - DNA, 3907 bp, Homo sapiens
  Payload ID: 18912
  Gene Name: ubiquitin specific peptidase 19
  ENST ID: ENST00000398896
  CDS Start-End: 1-3541
atccactcctcaagaggagcagaccaaagaggagttgttgctcgattggaggcagagtgcagaagaggtgattgtcaagcttcgtgtgggagtaggtcccctgcagctggaggatgtagatgctgctttcacagatacagactgtgtggtgcggtttgcaggtggtcagcagtggggtggtgtcttctatgctgagataaaaagctcttgtgctaaagtgcaaacccgcaagggcagtctcctgcacctgacactgcccaaaaaggtgcctatgctcacgtggccctccctcctggttgaggctgatgaacagctttgcataccaccgctgaactcccaaacctgcctcctgggctcagaggagaatttagcccctttggcaggagagaaagcagtgcctcccgggaatgacccagtctctccagccatggtccggagcagaaaccctgggaaagatgactgtgccaaggaggagatggcagtggcagcagatgctgcaaccttggtggatgagcccgagtcgatggtgaacctggcgtttgtcaagaatgactcgtatgagaagggcccggattcagtggtggtgcacgtgtacgtgaaggagatctgcagggacacctcaagagtacttttccgtgagcaggacttcacgctcatcttccagaccagggatggaaacttcctgaggctgcacccgggctgtgggccccacaccaccttccgttggcaggtgaagctcaggaatctgattgagccagagcagtgcaccttctgtttcacggcttctcgcatcgacatctgccttcgtaagaggcagagtcagcgctgggggggcctggaggccccggctgcacgaggtgcagtgggtggtgcaaaggttgccgtgccgacaggtccaacccctctggattcaaccccaccaggaggtgctccccaccccctgacaggccaggaggaggcccgggctgtggagaaggataaatccaaggcacgatctgaggacacagggctagacagtgtggcaacccgcacacccatggagcatgtaaccccaaagccagagacacacctggcctcgcccaagcctacatgcatggtgcctcccatgccccacagcccagttagtggagacagcgtggaggaggaggaagaggaagagaagaaggtgtgtctgccaggcttcactggccttgtcaatttaggcaacacctgcttcatgaacagcgtcattcagtctctgtccaacactcgggaactccgggacttcttccatgaccgctcctttgaggctgagatcaactacaacaacccactagggactggtgggcgtctggccattggctttgccgtgctgcttcgggcgctgtggaagggcacccaccatgccttccagccttccaagttgaaggccattgtggcgagtaaggccagccagttcacaggctatgcacagcatgatgcccaggagttcatggctttcctgctggatgggctgcacgaggacctgaatcgcattcagaacaagccctacacagagaccgtggattcagatgggcggcccgatgaggtggtagctgaggaagcatggcagcggcacaagatgaggaatgactctttcatcgtggacctatttcaggggcagtacaagtcgaagctggtgtgccctgtgtgtgccaaggtctccatcacttttgacccgtttctttatctgccggtgcccttgccacaaaagcaaaaggttctccctgtcttttattttgcccgagagccccacagcaagcccatcaagttcctggtgagcgtcagcaaggagaactccactgcgagcgaagtattggactccctctctcagagtgttcatgtgaagcctgagaacctgcgtttggcggaggtaattaagaatcgttttcatcgtgtgttcctaccctcccactcactggacactgtgtccccatctgatacgctcctctgctttgagctgctatcctcagagttggctaaggagcgggtagtggtgctagaggtgcaacagcgcccccaggtgcccagcgtccccatctccaagtgtgcagcctgccagcggaagcaacagtcggaggatgaaaagctgaagcgctgtacccggtgctaccgtgtgggctactgcaaccagctctgccagaaaacccactggcctgaccacaagggcctctgccgacctgagaacattggctaccccttcctggtcagtgtacctgcctcacgcctcacttatgcccgcctcgctcagttgctagagggctatgcccggtactctgtgagtgtattccagccaccctttcagccaggccgcatggccttggagtctcagagccctggctgcaccacactgctctccacaggttccctggaggctggggacagcgagagagaccccattcagccacctgagctccagctggtgacccctatggctgagggggacacagggcttccccgggtgtgggcagcccctgaccggggtcctgtgcccagcaccagtggaatttcttctgagatgctggccagtgggcccattgaggttggctccttgccagctggcgagagggtgtcccgacccgaagctgctgtgcctgggtaccagcatccaagtgaagctatgaatgcccacacaccccagttcttcatctataaaattgattcatccaaccgagagcagcggctagaggacaaaggagacaccccactggagctgggtgacgactgtagcctggctctcgtctggcggaacaatgagcgcttgcaggagtttgtgttggtagcctccaaggagctggaatgtgctgaggatccaggctctgccggtgaggctgcccgggccggccacttcaccctggaccagtgcctcaacctcttcacacggcctgaggtgctggcacccgaggaggcctggtactgcccacagtgcaaacagcaccgtgaggcctccaagcagctgttgctatggcgcctgccaaatgttctcatcgtgcagctcaagcgcttctcctttcgtagttttatctggcgtgacaagatcaatgacttggtggagttccctgttaggaacctggacctgagcaagttctgcattggtcagaaagaggagcagctgcccagctacgatctatatgctgtcatcaaccactatggaggcatgattggtggccactacactgcctgtgcacgcctgcccaatgatcgtagcagtcagcgcagtgacgtgggctggcgcttgtttgatgacagcacagtgacaacggtagacgagagccaggttgtgacgcgttatgcctatgtactcttctaccgccggcggaactctcctgtggagaggccccccagggcaggtcactctgagcaccacccagacctaggccctgcagctgaggctgctgccagccagggactaggccctggccaggcccccgaggtggcccccacgcggacagcccctgaacgcttcgccccccctgtggatcggccagcccccacctacagcaacatggaggaggtggattagcaggtccctggctgatgggggggactgggtttgggacacccacacagagggccagctccttgccgcttctccttctctaacccagaggacactggctctgtcaatgggaagctgaggggtatgatttgggtgtggagacctctcaggttgggacttcttgtcagcttggacccctgaccagtgggctttggcttctccagccgcctccagtgctgcgtgatttgattctgttgtaccttcaattcttctgacccgcattataaacattataattttattctaaaaattgtaattttttttgcattttggaagtgactgctgctgtttaaatatattttaaaaataaataataagtaagtagactta

SEQ ID NO: 197246 - DNA, 4474 bp, Homo sapiens
  Payload ID: 18912
  Gene Name: ubiquitin specific peptidase 19
  ENST ID: ENST00000398898
  CDS Start-End: 143-4108
cattaggctgtccgttccttgctggagaatttggccacaaagagttgccaagatagctgggccaggaagaaagcgccgcagccctgacccagacgctgttgccgaccccggggcactctggctgtcgaccaagcggctcaagatgtctggcggggccagtgccacaggcccaaggagagggcccccaggactggaggacaccactagtaagaagaagcagaaggatcgagcaaaccaggagagcaaggatggagatcctaggaaagcatccactcctcaagaggagcagaccaaagaggagttgttgctcgattggaggcagagtgcagaagaggtgattgtcaagcttcgtgtgggagtaggtcccctgcagctggaggatgtagatgctgctttcacagatacagactgtgtggtgcggtttgcaggtggtcagcagtggggtggtgtcttctatgctgagataaaaagctcttgtgctaaagtgcaaacccgcaagggcagtctcctgcacctgacactgcccaaaaaggtgcctatgctcacgtggccctccctcctgaaacctctagggacccaggagctggtgccggggctgcggtgccaggagaatgggcaggaactgtctcccattgccctggagccaggccctgagccccaccgggctaagcaggaggcccggaaccagaagcgggcccagggccgtggtgaggtaggcgcaggggctggccccggggcccaggcagggcccagcgccaagagggctgtgcatctctgcagagggccagagggggacgggtccagggatgaccctggaccccggggtgatgccccacccttcgtggctgacccagccacccaggttgaggctgatgaacagctttgcataccaccgctgaactcccaaacctgcctcctgggctcagaggagaatttagcccctttggcaggagagaaagcagtgcctcccgggaatgacccagtctctccagccatggtccggagcagaaaccctgggaaagatgactgtgccaaggaggagatggcagtggcagcagatgctgcaaccttggtggatgagcccgagtcgatggtgaacctggcgtttgtcaagaatgactcgtatgagaagggcccggattcagtggtggtgcacgtgtacgtgaaggagatctgcagggacacctcaagagtacttttccgtgagcaggacttcacgctcatcttccagaccagggatggaaacttcctgaggctgcacccgggctgtgggccccacaccaccttccgttggcaggtgaagctcaggaatctgattgagccagagcagtgcaccttctgtttcacggcttctcgcatcgacatctgccttcgtaagaggcagagtcagcgctgggggggcctggaggccccggctgcacgaggtgcagtgggtggtgcaaaggttgccgtgccgacaggtccaacccctctggattcaaccccaccaggaggtgctccccaccccctgacaggccaggaggaggcccgggctgtggagaaggataaatccaaggcacgatctgaggacacagggctagacagtgtggcaacccgcacacccatggagcatgtaaccccaaagccagagacacacctggcctcgcccaagcctacatgcatggtgcctcccatgccccacagcccagttagtggagacagcgtggaggaggaggaagaggaagagaagaaggtgtgtctgccaggcttcactggccttgtcaatttaggcaacacctgcttcatgaacagcgtcattcagtctctgtccaacactcgggaactccgggacttcttccatgaccgctcctttgaggctgagatcaactacaacaacccactagggactggtgggcgtctggccattggctttgccgtgctgcttcgggcgctgtggaagggcacccaccatgccttccagccttccaagttgaaggccattgtggcgagtaaggccagccagttcacaggctatgcacagcatgatgcccaggagttcatggctttcctgctggatgggctgcacgaggacctgaatcgcattcagaacaagccctacacagagaccgtggattcagatgggcggcccgatgaggtggtagctgaggaagcatggcagcggcacaagatgaggaatgactctttcatcgtggacctatttcaggggcagtacaagtcgaagctggtgtgccctgtgtgtgccaaggtctccatcacttttgacccgtttctttatctgccggtgcccttgccacaaaagcaaaaggttctccctgtcttttattttgcccgagagccccacagcaagcccatcaagttcctggtgagcgtcagcaaggagaactccactgcgagcgaagtattggactccctctctcagagtgttcatgtgaagcctgagaacctgcgtttggcggaggtaattaagaatcgttttcatcgtgtgttcctaccctcccactcactggacactgtgtccccatctgatacgctcctctgctttgagctgctatcctcagagttggctaaggagcgggtagtggtgctagaggtgcaacagcgcccccaggtgcccagcgtccccatctccaagtgtgcagcctgccagcggaagcaacagtcggaggatgaaaagctgaagcgctgtacccggtgctaccgtgtgggctactgcaaccagctctgccagaaaacccactggcctgaccacaagggcctctgccgacctgagaacattggctaccccttcctggtcagtgtacctgcctcacgcctcacttatgcccgcctcgctcagttgctagagggctatgcccggtactctgtgagtgtattccagccaccctttcagccaggccgcatggccttggagtctcagagccctggctgcaccacactgctctccacaggttccctggaggctggggacagcgagagagaccccattcagccacctgagctccagctggtgacccctatggctgagggggacacagggcttccccgggtgtgggcagcccctgaccggggtcctgtgcccagcaccagtggaatttcttctgagatgctggccagtgggcccattgaggttggctccttgccagctggcgagagggtgtcccgacccgaagctgctgtgcctgggtaccagcatccaagtgaagctatgaatgcccacacaccccagttcttcatctataaaattgattcatccaaccgagagcagcggctagaggacaaaggagacaccccactggagctgggtgacgactgtagcctggctctcgtctggcggaacaatgagcgcttgcaggagtttgtgttggtagcctccaaggagctggaatgtgctgaggatccaggctctgccggtgaggctgcccgggccggccacttcaccctggaccagtgcctcaacctcttcacacggcctgaggtgctggcacccgaggaggcctggtactgcccacagtgcaaacagcaccgtgaggcctccaagcagctgttgctatggcgcctgccaaatgttctcatcgtgcagctcaagcgcttctcctttcgtagttttatctggcgtgacaagatcaatgacttggtggagttccctgttaggaacctggacctgagcaagttctgcattggtcagaaagaggagcagctgcccagctacgatctatatgctgtcatcaaccactatggaggcatgattggtggccactacactgcctgtgcacgcctgcccaatgatcgtagcagtcagcgcagtgacgtgggctggcgcttgtttgatgacagcacagtgacaacggtagacgagagccaggttgtgacgcgttatgcctatgtactcttctaccgccggcggaactctcctgtggagaggccccccagggcaggtcactctgagcaccacccagacctaggccctgcagctgaggctgctgccagccagggactaggccctggccaggcccccgaggtggcccccacgcggacagcccctgaacgcttcgccccccctgtggatcggccagcccccacctacagcaacatggaggaggtggattagcaggtccctggctgatgggggggactgggtttgggacacccacacagagggccagctccttgccgcttctccttctctaacccagaggacactggctctgtcaatgggaagctgaggggtatgatttgggtgtggagacctctcaggttgggacttcttgtcagcttggacccctgaccagtgggctttggcttctccagccgcctccagtgctgcgtgatttgattctgttgtaccttcaattcttctgacccgcattataaacattataattttattctaaaaattgtaattttttttgcattttggaagtgactgctgctgtttaaatatattttaaaaataaataataagtaagtagactta

SEQ ID NO: 197247 - DNA, 4706 bp, Homo sapiens
  Payload ID: 18912
  Gene Name: ubiquitin specific peptidase 19
  Uniprot ID: O94966
  ENST ID: ENST00000417901
  CDS Start-End: 190-4344
cggagagcgggttgccagggcccgaagagggctggctgcggcggtctcgctcggctgtccgttccttgctggagaatttggccacaaagagttgccaagatagctgggccaggaagaaagcgccgcagccctgacccagacgctgttgccgaccccggggcactctggctgtcgaccaagcggctcaagatgtctggcggggccagtgccacaggcccaaggagagggcccccaggactggaggacaccactagtaagaagaagcagaaggatcgagcaaaccaggagagcaaggatggagatcctaggaaagagacagggtctcgatatgttgcccaggctggtcttgaacctctggcctcaggtgatccttctgcctcagcctcccatgcagctgggatcacaggctcacgccaccgtacccggctgttctttccttcatcgtcagggtcagcatccactcctcaagaggagcagaccaaagagggagcttgtgaagaccctcatgatctcttggctactcccactccagagttgttgctcgattggaggcagagtgcagaagaggtgattgtcaagcttcgtgtgggagtaggtcccctgcagctggaggatgtagatgctgctttcacagatacagactgtgtggtgcggtttgcaggtggtcagcagtggggtggtgtcttctatgctgagataaaaagctcttgtgctaaagtgcaaacccgcaagggcagtctcctgcacctgacactgcccaaaaaggtgcctatgctcacgtggccctccctcctgaagaaacctctagggacccaggagctggtgccggggctgcggtgccaggagaatgggcaggaactgtctcccattgccctggagccaggccctgagccccaccgggctaagcaggaggcccggaaccagaagcgggcccagggccgtggtgaggtaggcgcaggggctggccccggggcccaggcagggcccagcgccaagagggctgtgcatctctgcagagggccagagggggacgggtccagggatgaccctggaccccggggtgatgccccacccttcgtggctgacccagccacccaggttgaggctgatgaacagctttgcataccaccgctgaactcccaaacctgcctcctgggctcagaggagaatttagcccctttggcaggagagaaagcagtgcctcccgggaatgacccagtctctccagccatggtccggagcagaaaccctgggaaagatgactgtgccaaggaggagatggcagtggcagcagatgctgcaaccttggtggatgagcccgagtcgatggtgaacctggcgtttgtcaagaatgactcgtatgagaagggcccggattcagtggtggtgcacgtgtacgtgaaggagatctgcagggacacctcaagagtacttttccgtgagcaggacttcacgctcatcttccagaccagggatggaaacttcctgaggctgcacccgggctgtgggccccacaccaccttccgttggcaggtgaagctcaggaatctgattgagccagagcagtgcaccttctgtttcacggcttctcgcatcgacatctgccttcgtaagaggcagagtcagcgctgggggggcctggaggccccggctgcacgaggtgcagtgggtggtgcaaaggttgccgtgccgacaggtccaacccctctggattcaaccccaccaggaggtgctccccaccccctgacaggccaggaggaggcccgggctgtggagaaggataaatccaaggcacgatctgaggacacagggctagacagtgtggcaacccgcacacccatggagcatgtaaccccaaagccagagacacacctggcctcgcccaagcctacatgcatggtgcctcccatgccccacagcccagttagtggagacagcgtggaggaggaggaagaggaagagaagaaggtgtgtctgccaggcttcactggccttgtcaatttaggcaacacctgcttcatgaacagcgtcattcagtctctgtccaacactcgggaactccgggacttcttccatgaccgctcctttgaggctgagatcaactacaacaacccactagggactggtgggcgtctggccattggctttgccgtgctgcttcgggcgctgtggaagggcacccaccatgccttccagccttccaagttgaaggccattgtggcgagtaaggccagccagttcacaggctatgcacagcatgatgcccaggagttcatggctttcctgctggatgggctgcacgaggacctgaatcgcattcagaacaagccctacacagagaccgtggattcagatgggcggcccgatgaggtggtagctgaggaagcatggcagcggcacaagatgaggaatgactctttcatcgtggacctatttcaggggcagtacaagtcgaagctggtgtgccctgtgtgtgccaaggtctccatcacttttgacccgtttctttatctgccggtgcccttgccacaaaagcaaaaggttctccctgtcttttattttgcccgagagccccacagcaagcccatcaagttcctggtgagcgtcagcaaggagaactccactgcgagcgaagtattggactccctctctcagagtgttcatgtgaagcctgagaacctgcgtttggcggaggtaattaagaatcgttttcatcgtgtgttcctaccctcccactcactggacactgtgtccccatctgatacgctcctctgctttgagctgctatcctcagagttggctaaggagcgggtagtggtgctagaggtgcaacagcgcccccaggtgcccagcgtccccatctccaagtgtgcagcctgccagcggaagcaacagtcggaggatgaaaagctgaagcgctgtacccggtgctaccgtgtgggctactgcaaccagctctgccagaaaacccactggcctgaccacaagggcctctgccgacctgagaacattggctaccccttcctggtcagtgtacctgcctcacgcctcacttatgcccgcctcgctcagttgctagagggctatgcccggtactctgtgagtgtattccagccaccctttcagccaggccgcatggccttggagtctcagagccctggctgcaccacactgctctccacaggttccctggaggctggggacagcgagagagaccccattcagccacctgagctccagctggtgacccctatggctgagggggacacagggcttccccgggtgtgggcagcccctgaccggggtcctgtgcccagcaccagtggaatttcttctgagatgctggccagtgggcccattgaggttggctccttgccagctggcgagagggtgtcccgacccgaagctgctgtgcctgggtaccagcatccaagtgaagctatgaatgcccacacaccccagttcttcatctataaaattgattcatccaaccgagagcagcggctagaggacaaaggagacaccccactggagctgggtgacgactgtagcctggctctcgtctggcggaacaatgagcgcttgcaggagtttgtgttggtagcctccaaggagctggaatgtgctgaggatccaggctctgccggtgaggctgcccgggccggccacttcaccctggaccagtgcctcaacctcttcacacggcctgaggtgctggcacccgaggaggcctggtactgcccacagtgcaaacagcaccgtgaggcctccaagcagctgttgctatggcgcctgccaaatgttctcatcgtgcagctcaagcgcttctcctttcgtagttttatctggcgtgacaagatcaatgacttggtggagttccctgttaggaacctggacctgagcaagttctgcattggtcagaaagaggagcagctgcccagctacgatctatatgctgtcatcaaccactatggaggcatgattggtggccactacactgcctgtgcacgcctgcccaatgatcgtagcagtcagcgcagtgacgtgggctggcgcttgtttgatgacagcacagtgacaacggtagacgagagccaggttgtgacgcgttatgcctatgtactcttctaccgccggcggaactctcctgtggagaggccccccagggcaggtcactctgagcaccacccagacctaggccctgcagctgaggctgctgccagccagggactaggccctggccaggcccccgaggtggcccccacgcggacagcccctgaacgcttcgccccccctgtggatcggccagcccccacctacagcaacatggaggaggtggattagcaggtccctggctgatgggggggactgggtttgggacacccacacagagggccagctccttgccgcttctccttctctaacccagaggacactggctctgtcaatgggaagctgaggggtatgatttgggtgtggagacctctcaggttgggacttcttgtcagcttggacccctgaccagtgggctttggcttctccagccgcctccagtgctgcgtgatttgattctgttgtaccttcaattcttctgacccgcattataaacattataattttattctaaaaattgtaattttttttgcattttggaagtgactgctgctgtttaaatatattttaaaaataaataataagtaagtaga

SEQ ID NO: 197248 - DNA, 4719 bp, Homo sapiens
  Payload ID: 18912
  Gene Name: ubiquitin specific peptidase 19
  Uniprot ID: O94966
  ENST ID: ENST00000453664
  CDS Start-End: 320-4438
agcttggcgctccgcctccctcggccttagctagaagtcgaaacaaaacaagccgctaaggcggtggcggcggcgccgggacgggggaggggcgcgccggaaccggaaccgacctgcgccggaaccggaacggagagcgggttgccagggcccgaagagggctggctgcggcggtctcgctcggctgtccgttccttgctggagaatttggccacaaagagttgccaagatagctgggccaggaagaaagcgccgcagccctgacccagacgctgttgccgaccccggggcactctggctgtcgaccaagcggctcaagatgtctggcggggccagtgccacaggcccaaggagagggcccccaggactggaggacaccactagtaagaagaagcagaaggatcgagcaaaccaggagagcaaggatggagatcctaggaaagagacagggtctcgatatgttgcccaggctggtcttgaacctctggcctcaggtgatccttctgcctcagcctcccatgcagctgggatcacaggctcacgccaccgtacccggctgttctttccttcatcgtcagggtcagcatccactcctcaagaggagcagaccaaagagggagcttgtgaagaccctcatgatctcttggctactcccactccagagttgttgctcgattggaggcagagtgcagaagaggtgattgtcaagcttcgtgtgggagtaggtcccctgcagctggaggatgtagatgctgctttcacagatacagactgtgtggtgcggtttgcaggtggtcagcagtggggtggtgtcttctatgctgagataaaaagctcttgtgctaaagtgcaaacccgcaagggcagtctcctgcacctgacactgcccaaaaagaagaaacctctagggacccaggagctggtgccggggctgcggtgccaggagaatgggcaggaactgtctcccattgccctggagccaggccctgagccccaccgggctaagcaggaggcccggaaccagaagcgggcccagggccgtggtgaggtaggcgcaggggctggccccggggcccaggcagggcccagcgccaagagggctgtgcatctctgcagagggccagagggggacgggtccagggatgaccctggaccccggggtgatgccccacccttcgtggctgacccagccacccaggttgaggctgatgaacagctttgcataccaccgctgaactcccaaacctgcctcctgggctcagaggagaatttagcccctttggcaggagagaaagcagtgcctcccgggaatgacccagtctctccagccatggtccggagcagaaaccctgggaaagatgactgtgccaaggaggagatggcagtggcagcagatgctgcaaccttggtggatgagcccgagtcgatggtgaacctggcgtttgtcaagaatgactcgtatgagaagggcccggattcagtggtggtgcacgtgtacgtgaaggagatctgcagggacacctcaagagtacttttccgtgagcaggacttcacgctcatcttccagaccagggatggaaacttcctgaggctgcacccgggctgtgggccccacaccaccttccgttggcaggtgaagctcaggaatctgattgagccagagcagtgcaccttctgtttcacggcttctcgcatcgacatctgccttcgtaagaggcagagtcagcgctgggggggcctggaggccccggctgcacgagtgggtggtgcaaaggttgccgtgccgacaggtccaacccctctggattcaaccccaccaggaggtgctccccaccccctgacaggccaggaggaggcccgggctgtggagaaggataaatccaaggcacgatctgaggacacagggctagacagtgtggcaacccgcacacccatggagcatgtaaccccaaagccagagacacacctggcctcgcccaagcctacatgcatggtgcctcccatgccccacagcccagttagtggagacagcgtggaggaggaggaagaggaagagaagaaggtgtgtctgccaggcttcactggccttgtcaatttaggcaacacctgcttcatgaacagcgtcattcagtctctgtccaacactcgggaactccgggacttcttccatgaccgctcctttgaggctgagatcaactacaacaacccactagggactggtgggcgtctggccattggctttgccgtgctgcttcgggcgctgtggaagggcacccaccatgccttccagccttccaagttgaaggccattgtggcgagtaaggccagccagttcacaggctatgcacagcatgatgcccaggagttcatggctttcctgctggatgggctgcacgaggacctgaatcgcattcagaacaagccctacacagagaccgtggattcagatgggcggcccgatgaggtggtagctgaggaagcatggcagcggcacaagatgaggaatgactctttcatcgtggacctatttcaggggcagtacaagtcgaagctggtgtgccctgtgtgtgccaaggtctccatcacttttgacccgtttctttatctgccggtgcccttgccacaaaagcaaaaggttctccctgtcttttattttgcccgagagccccacagcaagcccatcaagttcctggtgagcgtcagcaaggagaactccactgcgagcgaagtattggactccctctctcagagtgttcatgtgaagcctgagaacctgcgtttggcggaggtaattaagaatcgttttcatcgtgtgttcctaccctcccactcactggacactgtgtccccatctgatacgctcctctgctttgagctgctatcctcagagttggctaaggagcgggtagtggtgctagaggtgcaacagcgcccccaggtgcccagcgtccccatctccaagtgtgcagcctgccagcggaagcaacagtcggaggatgaaaagctgaagcgctgtacccggtgctaccgtgtgggctactgcaaccagctctgccagaaaacccactggcctgaccacaagggcctctgccgacctgagaacattggctaccccttcctggtcagtgtacctgcctcacgcctcacttatgcccgcctcgctcagttgctagagggctatgcccggtactctgtgagtgtattccagccaccctttcagccaggccgcatggccttggagtctcagagccctggctgcaccacactgctctccacaggttccctggaggctggggacagcgagagagaccccattcagccacctgagctccagctggtgacccctatggctgagggggacacagggcttccccgggtgtgggcagcccctgaccggggtcctgtgcccagcaccagtggaatttcttctgagatgctggccagtgggcccattgaggttggctccttgccagctggcgagagggtgtcccgacccgaagctgctgtgcctgggtaccagcatccaagtgaagctatgaatgcccacacaccccagttcttcatctataaaattgattcatccaaccgagagcagcggctagaggacaaaggagacaccccactggagctgggtgacgactgtagcctggctctcgtctggcggaacaatgagcgcttgcaggagtttgtgttggtagcctccaaggagctggaatgtgctgaggatccaggctctgccggtgaggctgcccgggccggccacttcaccctggaccagtgcctcaacctcttcacacggcctgaggtgctggcacccgaggaggcctggtactgcccacagtgcaaacagcaccgtgaggcctccaagcagctgttgctatggcgcctgccaaatgttctcatcgtgcagctcaagcgcttctcctttcgtagttttatctggcgtgacaagatcaatgacttggtggagttccctgttaggaacctggacctgagcaagttctgcattggtcagaaagaggagcagctgcccagctacgatctatatgctgtcatcaaccactatggaggcatgattggtggccactacactgcctgtgcacgcctgcccaatgatcgtagcagtcagcgcagtgacgtgggctggcgcttgtttgatgacagcacagtgacaacggtagacgagagccaggttgtgacgcgttatgcctatgtactcttctaccgccggcggaactctcctgtggagaggccccccagggcaggtcactctgagcaccacccagacctaggccctgcagctgaggctgctgccagccagggactaggccctggccaggcccccgaggtggcccccacgcggacagcccctgaacgcttcgccccccctgtggatcggccagcccccacctacagcaacatggaggaggtggattagcaggtccctggctgatgggggggactgggtttgggacacccacacagagggccagctccttgccgcttctccttctctaacccagaggacactggctctgtcaatgggaagctgaggggtatgatttgggtgtggagacctctcaggttgggacttcttgtcagcttggacccctgaccagtgggctttggcttctccagccgcctccagtgctgcgtgatttgattctgttgtaccttcaattcttctgacccgcattataaacattataattttattct

SEQ ID NO: 197249 - DNA, 4677 bp, Homo sapiens
  Payload ID: 18912
  Gene Name: ubiquitin specific peptidase 19
  Uniprot ID: O94966
  ENST ID: ENST00000434032
  CDS Start-End: 213-4472
accgacctgcgccggaaccggaacggagagcgggttgccagggcccgaagagggctggctgcggcggtctcgctcggctgtccgttccttgctggagaatttggccacaaagagttgccaagatagctgggccaggaagaaagcgccgcagccctgacccagacgctgttgccgaccccggggcactctggctgtcgaccaagcggctcaagatgtctggcggggccagtgccacaggcccaaggagagggcccccaggactggaggacaccactagtaagaagaagcagaaggatcgagcaaaccaggagagcaaggatggagatcctaggaaagagacagggtctcgatatgttgcccaggctggtcttgaacctctggcctcaggtgatccttctgcctcagcctcccatgcagctgggatcacaggctcacgccaccgtacccggctgttctttccttcatcgtcagggtcagcatccactcctcaagaggagcagaccaaagagggagcttgtgaagaccctcatgatctcttggctactcccactccagagttgttgctcgattggaggcagagtgcagaagaggtgattgtcaagcttcgtgtgggagtaggtcccctgcagctggaggatgtagatgctgctttcacagatacagactgtgtggtgcggtttgcaggtggtcagcagtggggtggtgtcttctatgctgagataaaaagctcttgtgctaaagtgcaaacccgcaagggcagtctcctgcacctgacactgcccaaaaaggtgcctatgctcacgtggccctccctcctgaagaaacctctagggacccaggagctggtgccggggctgcggtgccaggagaatgggcaggaactgtctcccattgccctggagccaggccctgagccccaccgggctaagcaggaggcccggaaccagaagcgggcccagggccgtggtgaggtaggcgcaggggctggccccggggcccaggcagggcccagcgccaagagggctgtgcatctctgcagagggccagagggggacgggtccagggatgaccctggaccccggggtgatgccccacccttcgtggctgacccagccacccaggttgaggctgatgaacagctttgcataccaccgctgaactcccaaacctgcctcctgggctcagaggagaatttagcccctttggcaggagagaaagcagtgcctcccgggaatgacccagtctctccagccatggtccggagcagaaaccctgggaaagatgactgtgccaaggaggagatggcagtggcagcagatgctgcaaccttggtggatgagcccgagtcgatggtgaacctggcgtttgtcaagaatgactcgtatgagaagggcccggattcagtggtggtgcacgtgtacgtgaaggagatctgcagggacacctcaagagtacttttccgtgagcaggacttcacgctcatcttccagaccagggatggaaacttcctgaggctgcacccgggctgtgggccccacaccaccttccgttggcaggtgaagctcaggaatctgattgagccagagcagtgcaccttctgtttcacggcttctcgcatcgacatctgccttcgtaagaggcagagtcagcgctgggggggcctggaggccccggctgcacgagtgggtggtgcaaaggttgccgtgccgacaggtccaacccctctggattcaaccccaccaggaggtgctccccaccccctgacaggccaggaggaggcccgggctgtggagaaggataaatccaaggcacgatctgaggacacagggctagacagtgtggcaacccgcacacccatggagcatgtaaccccaaagccagagacacacctggcctcgcccaagcctacatgcatggtgcctcccatgccccacagcccagttagtggagacagcgtggaggaggaggaagaggaagagaagaaggtgtgtctgccaggcttcactggccttgtcaatttaggcaacacctgcttcatgaacagcgtcattcagtctctgtccaacactcgggaactccgggacttcttccatgaccgctcctttgaggctgagatcaactacaacaacccactagggactggtgggcgtctggccattggctttgccgtgctgcttcgggcgctgtggaagggcacccaccatgccttccagccttccaagttgaaggccattgtggcgagtaaggccagccagttcacaggctatgcacagcatgatgcccaggagttcatggctttcctgctggatgggctgcacgaggacctgaatcgcattcagaacaagccctacacagagaccgtggattcagatgggcggcccgatgaggtggtagctgaggaagcatggcagcggcacaagatgaggaatgactctttcatcgtggacctatttcaggggcagtacaagtcgaagctggtgtgccctgtgtgtgccaaggtctccatcacttttgacccgtttctttatctgccggtgcccttgccacaaaagcaaaaggttctccctgtcttttattttgcccgagagccccacagcaagcccatcaagttcctggtgagcgtcagcaaggagaactccactgcgagcgaagtattggactccctctctcagagtgttcatgtgaagcctgagaacctgcgtttggcggaggtaattaagaatcgttttcatcgtgtgttcctaccctcccactcactggacactgtgtccccatctgatacgctcctctgctttgagctgctatcctcagagttggctaaggagcgggtagtggtgctagaggtgcaacagcgcccccaggtgcccagcgtccccatctccaagtgtgcagcctgccagcggaagcaacagtcggaggatgaaaagctgaagcgctgtacccggtgctaccgtgtgggctactgcaaccagctctgccagaaaacccactggcctgaccacaagggcctctgccgacctgagaacattggctaccccttcctggtcagtgtacctgcctcacgcctcacttatgcccgcctcgctcagttgctagagggctatgcccggtactctgtgagtgtattccagccaccctttcagccaggccgcatggccttggagtctcagagccctggctgcaccacactgctctccacaggttccctggaggctggggacagcgagagagaccccattcagccacctgagctccagctggtgacccctatggctgagggggacacagggcttccccgggtgtgggcagcccctgaccggggtcctgtgcccagcaccagtggaatttcttctgagatgctggccagtgggcccattgaggttggctccttgccagctggcgagagggtgtcccgacccgaagctgctgtgcctgggtaccagcatccaagtgaagctatgaatgcccacacaccccagttcttcatctataaaattgattcatccaaccgagagcagcggctagaggacaaaggagacaccccactggagctgggtgacgactgtagcctggctctcgtctggcggaacaatgagcgcttgcaggagtttgtgttggtagcctccaaggagctggaatgtgctgaggatccaggctctgccggtgaggctgcccgggccggccacttcaccctggaccagtgcctcaacctcttcacacggcctgaggtgctggcacccgaggaggcctggtactgcccacagtgcaaacagcaccgtgaggcctccaagcagctgttgctatggcgcctgccaaatgttctcatcgtgcagctcaagcgcttctcctttcgtagttttatctggcgtgacaagatcaatgacttggtggagttccctgttaggaacctggacctgagcaagttctgcattggtcagaaagaggagcagctgcccagctacgatctatatgctgtcatcaaccactatggaggcatgattggtggccactacactgcctgtgcacgcctgcccaatgatcgtagcagtcagcgcagtgacgtgggctggcgcttgtttgatgacagcacagtgacaacggtagacgagagccaggttgtgacgcgttatgcctatgtactcttctaccgccggcggaactctcctgtggagaggccccccagggcaggtcactctgagcaccacccagacctaggccctgcagctgaggctgctgccagccaggcttcccggatttggcaggagctggaggctgaggaggagccggtgcctgaggggtctgggcccctgggtccctgggggccccaagactgggtgggccccctaccacgtggccctaccacaccagatgagggctgcctccggtactttgtcctgggcaccgtggcggctttggtggccctcgtgctcaacgtgttctatcctctggtatcccagagtcgctggagatgagctcgcctgcaggcagctgctgtgagctggcctacctgcctgccccaggccatgcctgcctttgttgtggggaacacctctgggctttgggcctcagcttatgcatctggtgggagagggtggggaggttgtggcccctgcaggggcagagtatcctagggtgtgtatccatctggctgtctgtccattcatcctgctgctctga

SEQ ID NO: 197250 - DNA, 360 bp, Homo sapiens
  Payload ID: 18912
  Gene Name: ubiquitin specific peptidase 19
  ENST ID: ENST00000479073
  CDS Start-End: 1-360
aaacctctagggacccaggagctggtgccggggctgcggtgccaggagaatgggcaggaactgtctcccattgccctggagccaggccctgagccccaccgggctaagcaggaggcccggaaccagaagcgggcccagggccgtggtgaggttgaggctgatgaacagctttgcataccaccgctgaactcccaaacctgcctcctgggctcagaggagaatttagcccctttggcaggagagaaagcagtgcctcccgggaatgacccagtctctccagccatggtccggagcagaaaccctgggaaagatgactgtgccaaggaggagatggcagtggcagcagatgctgcaaccttg

SEQ ID NO: 197251 - DNA, 3732 bp, Homo sapiens
  Payload ID: 18913
  Gene Name: ubiquitin specific peptidase 2
  Uniprot ID: O75604
  ENST ID: ENST00000260187
  CDS Start-End: 296-2113
agtgacgcgagacgcggggtgtggctctgccggcccaggcgcgatgaggcggctgcccgctgggtggcgccgatttcccggggaggtcccttctgggcccccggcggaggtgggagagagtcaggcaggagccgaggccggggagccctcttcgtcagctggtgctcactgcgccgcgccagcgccagccgggactcacccgcagctccatgcttgtgcccggttcgactcgtccatactccaagaagaggcagcccatgaggctcccagtccccactgagtgccaccctgaaggatgtcccagctctcctccaccctgaagcgctacacagaatcggcccgctacacagatgcccactatgccaagtcgggctatggtgcctacaccccgtcctcctatggggccaatctggctgcctccttactggagaaggagaaacttggtttcaagccggtccccaccagcagcttcctcacccgtccccgtacctatggcccctcctccctcctggactatgaccggggccgccccctgctgagacccgacatcactgggggtggtaagcgggcagagagccagacccggggtactgagcggcctttaggcagtggcctcagcgggggcagcggattcccttatggagtgaccaacaactgcctcagctacctgcccatcaatgcctatgaccagggggtgaccctaacccagaagctggacagccaatcagacctggcccgggatttctccagcctccggacctcagatagctaccggatagaccccaggaacctgggccgcagccccatgctggcccggacgcgcaaggagctctgcaccctgcaggggctctaccagacagccagctgccctgaatacctggtcgactacctggagaactatggtcgcaagggcagtgcatctcaggtgccctcccaggcccctccctcacgagtccctgaaatcatcagcccaacctaccgacccattggccgctacacgctgtgggagacgggaaagggtcaggcccctgggcccagccgctccagctccccgggaagagacggcatgaattctaagagtgcccagggtctggctggtcttcgaaaccttgggaacacgtgcttcatgaactcaattctgcagtgcctgagcaacactcgggagttgagagattactgcctccagaggctctacatgcgggacctgcaccacggcagcaatgcacacacagccctcgtggaagagtttgcaaaactaattcagaccatatggacttcatcccccaatgatgtggtgagcccatctgagttcaagacccagatccagagatacgcaccgcgctttgttggctataatcagcaggatgctcaggagttccttcgctttcttctggatgggctccataacgaggtgaaccgagtgacactgagacctaagtccaaccctgagaacctcgatcatcttcctgatgacgagaaaggccgacagatgtggagaaaatatctagaacgggaagacagtaggatcggggatctctttgttgggcagctaaagagctcgctgacgtgtacagattgtggttactgttctacggtcttcgaccccttctgggacctctcactgcccattgctaagcgaggttatcctgaggtgacattaatggactgcatgaggctcttcaccaaagaggatgtgcttgatggagatgaaaagccaacatgctgtcgctgccgaggcagaaaacggtgtataaagaagttctccatccagaggttcccaaagatcttggtgctccatctgaagcggttctcagaatccaggatccgaaccagcaagctcacaacatttgtgaacttccccctaagagacctggacttaagagaatttgcctcagaaaacaccaaccatgctgtttacaacctgtacgctgtgtccaatcactccggaaccaccatgggtggccactatacagcctactgtcgcagtccagggacaggagaatggcacactttcaacgactccagcgtcactcccatgtcctccagccaagtgcgcaccagcgacgcctacctgctcttctacgaactggccagcccgccctcccgaatgtagcgccaggagccacgtcccttctcccttccccgtggtggccccgctccctaaattttttaaaaagacaaaaacaaaacaacaacaacaacacacaaacctgacaagagaaaaacaaacctgaagctgccgagcaggagtggatgcagcctgatcagggtctggagcaaggagccgggctttcctgagctgtggcccggcagggaagatcgcctggacgtggagccagcatcgccccgtgccctcggcgtttgcatttgtaaacttgtggtcttcctatgtgtcagaaacaactgtgtcttgggggggaagaccctcgctgcgccgcttcccgccgcagcgcccgcgcctccgaggggacagcgccctctggagctcgctgggagcatcaccgcctggacgcccgcgccgcggaggagccggcgcccatctccacccgcacggctcgccggtccagagccatgagccaagagccctcttcacgctgctaactccaggggacagacgaagggacatctttggaaaacgctggttttggtttttaaaaagcccaactttttttttttaatttccataactaaagtgttcagactggagtgctctccttcaggcctcttcatagctgggacgttgcactggtccttttattgcttttccaagtacaactttctaatgctagccctccgtggtgctaggtgggcgttggccaggccccaagcacagccacagtagacctgggatctaaaacaagtttctgttttgggggtttgggttttttttttttttttttaatgttttgaatggaatttagttgcctccaagaattgtgccttatagcatttggggaccagggggtaactgcccctcctgaaatatccctcagcctcttcccttttccccagtgctctgttcaaacccgcctgggaaagggatcctgcccttagccctggctcgttgtgcattgcagtgaggcaaagaagaaagcaggtagattccttccgacagggcatcaagttcttcccgcccacgtcctctagcccacccctggtctgctccccagctgtttgaaggatagcacaagcccctcgtccctagagcttctctcccttttatttattctcttaacatccctttccccctggccttcctgcccccgcccccttctcagagcctcctagacaataggccctttggaccgagtttctcagggatgcccaggccacccctcagctcttcttagcgctggtctccagtcctgccctgggagctggagcctgggtatttggggacatcttgcctcagttgtatggttctttcctgtgggctcaattttgccctacatagttggataaaactctgtgctgtcctggagagtaaagctgttcacccacacagctgggcccggcttgtgccccgtggagcctggcacattccaggctcctaggaggaggcatcagagaaagacaccctgagttttactggcctgacacccttctccagagaagacctgtgaacctgagcccaagggcaagtgtacacttgtttactgtgtaagcaagagtagaagaatgtctaatgtacagtggaaccttgtacagaataaataatagctttgagaaatc

SEQ ID NO: 197252 - DNA, 2903 bp, Homo sapiens
  Payload ID: 18913
  Gene Name: ubiquitin specific peptidase 2
  Uniprot ID: O75604
  ENST ID: ENST00000455332
  CDS Start-End: 195-1283
ggggtgtggctctgccggcccaggcgcgatgaggcggctgcccgctgggtggcgccgatttcccggggaggtcccttctgggcccccggcggaggtgggagagagtcaggcaggagccgaggccggggagccctcttcgtcagctggtgctcactgcgccgcgccagcgccagccgggactcacccgcagctccatgcttgtgcccggttcgactcgtccatactccaagaagaggcagaattctaagagtgcccagggtctggctggtcttcgaaaccttgggaacacgtgcttcatgaactcaattctgcagtgcctgagcaacactcgggagttgagagattactgcctccagaggctctacatgcgggacctgcaccacggcagcaatgcacacacagccctcgtggaagagtttgcaaaactaattcagaccatatggacttcatcccccaatgatgtggtgagcccatctgagttcaagacccagatccagagatacgcaccgcgctttgttggctataatcagcaggatgctcaggagttccttcgctttcttctggatgggctccataacgaggtgaaccgagtgacactgagacctaagtccaaccctgagaacctcgatcatcttcctgatgacgagaaaggccgacagatgtggagaaaatatctagaacgggaagacagtaggatcggggatctctttgttgggcagctaaagagctcgctgacgtgtacagattgtggttactgttctacggtcttcgaccccttctgggacctctcactgcccattgctaagcgaggttatcctgaggtgacattaatggactgcatgaggctcttcaccaaagaggatgtgcttgatggagatgaaaagccaacatgctgtcgctgccgaggcagaaaacggtgtataaagaagttctccatccagaggttcccaaagatcttggtgctccatctgaagcggttctcagaatccaggatccgaaccagcaagctcacaacatttgtgaacttccccctaagagacctggacttaagagaatttgcctcagaaaacaccaaccatgctgtttacaacctgtacgctgtgtccaatcactccggaaccaccatgggtggccactatacagcctactgtcgcagtccagggacaggagaatggcacactttcaacgactccagcgtcactcccatgtcctccagccaagtgcgcaccagcgacgcctacctgctcttctacgaactggccagcccgccctcccgaatgtagcgccaggagccacgtcccttctcccttccccgtggtggccccgctccctaaattttttaaaaagacaaaaacaaaacaacaacaacaacacacaaacctgacaagagaaaaacaaacctgaagctgccgagcaggagtggatgcagcctgatcagggtctggagcaaggagccgggctttcctgagctgtggcccggcagggaagatcgcctggacgtggagccagcatcgccccgtgccctcggcgtttgcatttgtaaacttgtggtcttcctatgtgtcagaaacaactgtgtcttgggggggaagaccctcgctgcgccgcttcccgccgcagcgcccgcgcctccgaggggacagcgccctctggagctcgctgggagcatcaccgcctggacgcccgcgccgcggaggagccggcgcccatctccacccgcacggctcgccggtccagagccatgagccaagagccctcttcacgctgctaactccaggggacagacgaagggacatctttggaaaacgctggttttggtttttaaaaagcccaactttttttttttaatttccataactaaagtgttcagactggagtgctctccttcaggcctcttcatagctgggacgttgcactggtccttttattgcttttccaagtacaactttctaatgctagccctccgtggtgctaggtgggcgttggccaggccccaagcacagccacagtagacctgggatctaaaacaagtttctgttttgggggtttgggttttttttttttttttttaatgttttgaatggaatttagttgcctccaagaattgtgccttatagcatttggggaccagggggtaactgcccctcctgaaatatccctcagcctcttcccttttccccagtgctctgttcaaacccgcctgggaaagggatcctgcccttagccctggctcgttgtgcattgcagtgaggcaaagaagaaagcaggtagattccttccgacagggcatcaagttcttcccgcccacgtcctctagcccacccctggtctgctccccagctgtttgaaggatagcacaagcccctcgtccctagagcttctctcccttttatttattctcttaacatccctttccccctggccttcctgcccccgcccccttctcagagcctcctagacaataggccctttggaccgagtttctcagggatgcccaggccacccctcagctcttcttagcgctggtctccagtcctgccctgggagctggagcctgggtatttggggacatcttgcctcagttgtatggttctttcctgtgggctcaattttgccctacatagttggataaaactctgtgctgtcctggagagtaaagctgttcacccacacagctgggcccggcttgtgccccgtggagcctggcacattccaggctcctaggaggaggcatcagagaaagacaccctgagttttactggcctgacacccttctccagagaagacctgtgaacctgagcccaagggcaagtgtacacttgtttactgtgtaagcaagagtagaagaatgtctaatgtacagtggaaccttgtacagaataaataatagctttgagaaatca

SEQ ID NO: 197253 - DNA, 563 bp, Homo sapiens
  Payload ID: 18913
  Gene Name: ubiquitin specific peptidase 2
  ENST ID: ENST00000527843
  CDS Start-End: 151-563
ggattacccagcccagagtcaggctccagcttctgggctttccactgcattccctgccctgctggggaaggagaagcccccagctcccatccagtgcccctggacacagcccatgaggctcccagtccccactgagtgccaccctgaaggatgtcccagctctcctccaccctgaagcgctacacagaatcggcccgctacacagatgcccactatgccaagtcgggctatggtgcctacaccccgtcctcctatggggccaatctggctgcctccttactggagaaggagaaacttggtttcaagccggtccccaccagcagcttcctcacccgtccccgtacctatggcccctcctccctcctggactatgaccggggccgccccctgctgagacccgacatcactgggggtggtaagcgggcagagagccagacccggggtactgagcggcctttaggcagtggcctcagcgggggcagcggattcccttatggagtgaccaacaactgcctcagctacctgcccatcaatgcctatgaccagggggtgaccctaaccca

SEQ ID NO: 197254 - DNA, 677 bp, Homo sapiens
  Payload ID: 18913
  Gene Name: ubiquitin specific peptidase 2
  ENST ID: ENST00000531070
  CDS Start-End: 175-677
gtggcaacagggagactcgcagccacgtgagtgcccgtcctgtccctgtcttgcgcagcgagactccggccagggccccagcccgctctcctgcccatagtgcattctgtggcctccagggacagctgtgcagcccatgaggctcccagtccccactgagtgccaccctgaaggatgtcccagctctcctccaccctgaagcgctacacagaatcggcccgctacacagatgcccactatgccaagtcgggctatggtgcctacaccccgtcctcctatggggccaatctggctgcctccttactggagaaggagaaacttggtttcaagccggtccccaccagcagcttcctcacccgtccccgtacctatggcccctcctccctcctggactatgaccggggccgccccctgctgagacccgacatcactgggggtggtaagcgggcagagagccagacccggggtactgagcggcctttaggcagtggcctcagcgggggcagcggattcccttatggagtgaccaacaactgcctcagctacctgcccatcaatgcctatgaccagggggtgaccctaacccagaagctggacagccaatcagacctggcccgggatttctccagcctccggacctcagatagctaccggatagaccccaggaacctgggccg

SEQ ID NO: 197255 - DNA, 1704 bp, Homo sapiens
  Payload ID: 18913
  Gene Name: ubiquitin specific peptidase 2
  Uniprot ID: O75604
  ENST ID: ENST00000525735
  CDS Start-End: 213-1403
gtcggccggagcgcgagagccgggacccgggctgttggcggcgcacgccggggaggttgaggcggaggagcgcgcgttcgggcgccgcggacgctgtcctgtagcggtctcgccggcctcggcgtccggactgtggcaccgcgcggggactccccccgcgcccccgctgccaacgttaagcgagggccaaagcccgccgcccgccccccagcatgcgcacctcgtacaccgtgaccctgcccgaggacccccccgccgccccctttcccgccctcgccaaggagctgcggccgcgctcccctctctccccgtccctgctgctctccaccttcgtggggctcctgctcaacaaagccaagaattctaagagtgcccagggtctggctggtcttcgaaaccttgggaacacgtgcttcatgaactcaattctgcagtgcctgagcaacactcgggagttgagagattactgcctccagaggctctacatgcgggacctgcaccacggcagcaatgcacacacagccctcgtggaagagtttgcaaaactaattcagaccatatggacttcatcccccaatgatgtggtgagcccatctgagttcaagacccagatccagagatacgcaccgcgctttgttggctataatcagcaggatgctcaggagttccttcgctttcttctggatgggctccataacgaggtgaaccgagtgacactgagacctaagtccaaccctgagaacctcgatcatcttcctgatgacgagaaaggccgacagatgtggagaaaatatctagaacgggaagacagtaggatcggggatctctttgttgggcagctaaagagctcgctgacgtgtacagattgtggttactgttctacggtcttcgaccccttctgggacctctcactgcccattgctaagcgaggttatcctgaggtgacattaatggactgcatgaggctcttcaccaaagaggatgtgcttgatggagatgaaaagccaacatgctgtcgctgccgaggcagaaaacggtgtataaagaagttctccatccagaggttcccaaagatcttggtgctccatctgaagcggttctcagaatccaggatccgaaccagcaagctcacaacatttgtgaacttccccctaagagacctggacttaagagaatttgcctcagaaaacaccaaccatgctgtttacaacctgtacgctgtgtccaatcactccggaaccaccatgggtggccactatacagcctactgtcgcagtccagggacaggagaatggcacactttcaacgactccagcgtcactcccatgtcctccagccaagtgcgcaccagcgacgcctacctgctcttctacgaactggccagcccgccctcccgaatgtagcgccaggagccacgtcccttctcccttccccgtggtggccccgctccctaaattttttaaaaagacaaaaacaaaacaacaacaacaacacacaaacctgacaagagaaaaacaaacctgaagctgccgagcaggagtggatgcagcctgatcagggtctggagcaaggagccgggctttcctgagctgtggcccggcagggaagatcgcctggacgtggagccagcatcgccccgtgccctcggcgtttgcatttgtaaacttgtggtcttcctatgtgtcagaaacaactgtgtcttgg

SEQ ID NO: 197256 - DNA, 4458 bp, Homo sapiens
  Payload ID: 18914
  Gene Name: ubiquitin specific peptidase 20
  Uniprot ID: Q9Y2K6
  ENST ID: ENST00000315480
  CDS Start-End: 159-2903
caggcggcggcggcgcagttgcgagtgcaggctccttgccagaggcctccactcactccagacccctatagcccgtcgctgtcagctgtcaacaaaggatgcgaatgctggccgcttcctgtgggcttcgtgtcacccagaggtgagcccaggccaggatgggggactccagggacctttgccctcaccttgactccataggagaggtgaccaaagaggacttgctgctcaaatctaagggaacctgtcagtcgtgtggggtcaccggaccaaacctatgggcctgtctgcaggttgcctgcccctatgttggctgcggagaatcctttgctgaccacagcaccattcatgcacaggcaaaaaagcacaacttgaccgtgaacctgaccacgttccgactgtggtgttacgcctgtgagaaggaggtattcctggagcagcggctggcagcccctctgctgggctcctcttccaagttctctgaacaggactccccgccaccctcccaccctctgaaagctgttcctattgctgtggctgatgaaggagagtctgagtcagaggacgatgacctgaaacctcgaggcctcacgggcatgaagaacctcgggaactcctgctacatgaacgctgccctgcaggccctgtccaattgcccgccgctgactcagttcttcttggagtgtggcggcctggtgcgcacagataagaagccagccctgtgcaagagctaccagaagctggtctctgaggtctggcataagaaacggccaagctacgtggtccccaccagtctgtctcatgggatcaagttggtcaacccaatgttccgaggctatgcccagcaggacacccaagagttccttcgctgcctgatggaccagctgcacgaggagctcaaggagccggtggtggccacggtggcgctgacggaggctcgggactcagattcgagtgacacggatgagaaacgggagggtgaccggagcccatcagaagatgagttcttgtcctgtgactcgagcagtgaccggggtgagggtgacgggcaggggcgtggcgggggcagctcgcaggccgagacggagctgctgatcccagatgaggcgggccgagccatctctgagaaggagcggatgaaggaccgcaagttctcctggggccagcagcgtacaaactcggagcaagtggacgaggacgctgatgtggacactgccatggctgcccttgacgaccagcccgcggaggcccagcccccgtcaccacggtcctccagcccctgccggacgccagagccggacaatgatgctcacctacgcagctcctctcgcccctgcagccccgtccaccaccacgagggccatgccaagctgtctagcagcccccctcgtgcaagccccgtgaggatggcaccgtcgtacgtgctcaagaaagcccaggtattgagtgctggcagccggaggcggaaggagcagcgctaccgcagcgtcatctcagacatctttgacggctccattctcagccttgtgcagtgtctcacctgtgaccgggtatccaccacagtggaaacgttccaggacttatcactgcccattcctggaaaggaggacctggccaagctccattcagccatctaccagaatgtgccggccaagccaggcgcctgtggggacagctatgccgcccagggctggctggccttcattgtggagtacatccgacggtttgtggtatcctgtacccccagctggttttgggggcctgtcgtcaccctggaagactgccttgctgccttctttgccgctgatgagttaaagggtgacaacatgtacagctgtgagcggtgtaagaagctgcggaacggagtgaagtactgcaaagtcctgcggttgcccgagatcctgtgcattcacctaaagcgctttcggcacgaggtgatgtactcattcaagatcaacagccacgtctccttccccctcgaggggctcgacctgcgccccttccttgccaaggagtgcacatcccagatcaccacctacgacctcctctcggtcatctgccaccacggcacggcaggcagtgggcactacatcgcctactgccagaacgtgatcaatgggcagtggtacgagtttgatgaccagtacgtcacagaagtccacgagacggtggtgcagaacgccgagggctacgtactcttctacaggaagagcagcgaggaggccatgcgggagcgacagcaggtggtgtccctggccgccatgcgggagcccagcctgctgcggttctacgtgtcccgcgagtggctcaacaagttcaacaccttcgcggagccaggccccatcaccaaccagaccttcctctgctcccacggaggcatcccgccccacaaataccactacatcgacgacctggtggtcatcctgccccagaacgtctgggagcacctgtacaacagattcgggggtggccccgccgtgaaccacctgtacgtgtgctccatctgccaggtggagatcgaggcactggccaagcgcaggaggatcgagatcgacaccttcatcaagttgaacaaggccttccaggccgaggagtcgccgggcgtcatctactgcatcagcatgcagtggttccgggagtgggaggcgttcgtcaaggggaaggacaacgagccccccgggcccattgacaacagcaggattgcacaggtcaaaggaagcggccatgtccagctgaagcagggagctgactacgggcagatttcggaggagacctggacctacctgaacagcctgtatggaggtggccccgagattgccatccgccagagtgtggcgcagccgctgggcccagagaacctgcacggggagcagaagatcgaagccgagacgcgggccgtgtgatctgctgggctagtctgtaagtcgccccggctggtccctccatggcactctgggtcctctcctcactctccagagaccctcacatgtccttttgaacatccaaagagcaggtccctgaaagcaccttcctggaggatgtgggagggccctggacatggcccggccccactgctgagtgcccgtgtccccacagccccatgtgccccaccccgcggaaggcgtgtttgtgcccagaagagaggccgggctgctgcagaaccccgccgtgtaaagaggcagaaaagttggtttggtttgcagtaacgctgcaactagaaaatatatgcacttcaggcttgttgaaacgaccaagactctgtgacgttaatttgggtctttgtcctggcagtgcctctgccagtcactgtcatcgttgtgtcccccacaactgtcctcttgctagctcggcccagctttgtccctggagcccgatgctacccctgtcagacagaggctgcggcctgggccagagtcagggagtagctgctgcttcacggcgtctccactgtgcgattggcccggagccccgaagactcggagggagctgctcagggccggtgagcgcagccagaagccctggccagtgaggagctcacaggtcctccctggtggtcccgccgcacctctgcatctcctgggcgtcaccaggaaggctctgaagtcccgggctgctctcagcacttctcctgcagactgaagactctggactcattgctgattggaacaccaggaggaggttggatttctgccagtgggggatgtttctggaggcagctggtcccccacaccgcgtcctgctgagcctgccccctggattggctgtaatttgcctcgaagttcagcagttcatcttcatgggaaatttgctgagcccccaccagggaaccggatgatgaaacagggatacctcacagcttggccatttgaggcaaaggcagcttcccgagctgatgctaaagaagacagactttcccttcctcccagcagcagcagtgcagagcccacctggagggatgtgggggctgtgcagggtgcagcgctcaggtggatcctgggaagcagcctctggatgctgagtggagggagccactgagcacagcaaggcaccaaagcccctggagaaaccgccagggcgaggtgcgaccatcatcaggatcaaagcagacggggcgtgggtggggaaggggctctgggaccagaccccccacactactgcgtctttgtttctatcagtctttgtagaagcaggtggtggtggaaattccagcaggtgggtcccgcagaggccctgaggcctcacttttcggatcttctgtcccagatcctgctccctccctgctgagcctggggttcccctggcattggccccagccttctgaaagccggcgctgcagccagaggccgcacgctgcactgtcgcgacgcagagaggcttctgtgcaggctgggatcgggccccatgtctgtgctgtctagtttgtgttcaaaatgtcagaataaacacagaataaatgtt

SEQ ID NO: 197257 - DNA, 4371 bp, Homo sapiens
  Payload ID: 18914
  Gene Name: ubiquitin specific peptidase 20
  Uniprot ID: Q9Y2K6
  ENST ID: ENST00000358355
  CDS Start-End: 249-2993
ggcggcgcagttgcgagtgcaggtgagttccgggccgccaccggctgcttctgtgggccgggcctctgagcattggcgaccccagcccggctccgggctgacagggcctggcttcgccaggctccttgccagaggcctccactcactccagacccctatagcccgtcgctgtcagctgtcaacaaaggatgcgaatgctggccgcttcctgtgggcttcgtgtcacccagaggtgagcccaggccaggatgggggactccagggacctttgccctcaccttgactccataggagaggtgaccaaagaggacttgctgctcaaatctaagggaacctgtcagtcgtgtggggtcaccggaccaaacctatgggcctgtctgcaggttgcctgcccctatgttggctgcggagaatcctttgctgaccacagcaccattcatgcacaggcaaaaaagcacaacttgaccgtgaacctgaccacgttccgactgtggtgttacgcctgtgagaaggaggtattcctggagcagcggctggcagcccctctgctgggctcctcttccaagttctctgaacaggactccccgccaccctcccaccctctgaaagctgttcctattgctgtggctgatgaaggagagtctgagtcagaggacgatgacctgaaacctcgaggcctcacgggcatgaagaacctcgggaactcctgctacatgaacgctgccctgcaggccctgtccaattgcccgccgctgactcagttcttcttggagtgtggcggcctggtgcgcacagataagaagccagccctgtgcaagagctaccagaagctggtctctgaggtctggcataagaaacggccaagctacgtggtccccaccagtctgtctcatgggatcaagttggtcaacccaatgttccgaggctatgcccagcaggacacccaagagttccttcgctgcctgatggaccagctgcacgaggagctcaaggagccggtggtggccacggtggcgctgacggaggctcgggactcagattcgagtgacacggatgagaaacgggagggtgaccggagcccatcagaagatgagttcttgtcctgtgactcgagcagtgaccggggtgagggtgacgggcaggggcgtggcgggggcagctcgcaggccgagacggagctgctgatcccagatgaggcgggccgagccatctctgagaaggagcggatgaaggaccgcaagttctcctggggccagcagcgtacaaactcggagcaagtggacgaggacgctgatgtggacactgccatggctgcccttgacgaccagcccgcggaggcccagcccccgtcaccacggtcctccagcccctgccggacgccagagccggacaatgatgctcacctacgcagctcctctcgcccctgcagccccgtccaccaccacgagggccatgccaagctgtctagcagcccccctcgtgcaagccccgtgaggatggcaccgtcgtacgtgctcaagaaagcccaggtattgagtgctggcagccggaggcggaaggagcagcgctaccgcagcgtcatctcagacatctttgacggctccattctcagccttgtgcagtgtctcacctgtgaccgggtatccaccacagtggaaacgttccaggacttatcactgcccattcctggaaaggaggacctggccaagctccattcagccatctaccagaatgtgccggccaagccaggcgcctgtggggacagctatgccgcccagggctggctggccttcattgtggagtacatccgacggtttgtggtatcctgtacccccagctggttttgggggcctgtcgtcaccctggaagactgccttgctgccttctttgccgctgatgagttaaagggtgacaacatgtacagctgtgagcggtgtaagaagctgcggaacggagtgaagtactgcaaagtcctgcggttgcccgagatcctgtgcattcacctaaagcgctttcggcacgaggtgatgtactcattcaagatcaacagccacgtctccttccccctcgaggggctcgacctgcgccccttccttgccaaggagtgcacatcccagatcaccacctacgacctcctctcggtcatctgccaccacggcacggcaggcagtgggcactacatcgcctactgccagaacgtgatcaatgggcagtggtacgagtttgatgaccagtacgtcacagaagtccacgagacggtggtgcagaacgccgagggctacgtactcttctacaggaagagcagcgaggaggccatgcgggagcgacagcaggtggtgtccctggccgccatgcgggagcccagcctgctgcggttctacgtgtcccgcgagtggctcaacaagttcaacaccttcgcggagccaggccccatcaccaaccagaccttcctctgctcccacggaggcatcccgccccacaaataccactacatcgacgacctggtggtcatcctgccccagaacgtctgggagcacctgtacaacagattcgggggtggccccgccgtgaaccacctgtacgtgtgctccatctgccaggtggagatcgaggcactggccaagcgcaggaggatcgagatcgacaccttcatcaagttgaacaaggccttccaggccgaggagtcgccgggcgtcatctactgcatcagcatgcagtggttccgggagtgggaggcgttcgtcaaggggaaggacaacgagccccccgggcccattgacaacagcaggattgcacaggtcaaaggaagcggccatgtccagctgaagcagggagctgactacgggcagatttcggaggagacctggacctacctgaacagcctgtatggaggtggccccgagattgccatccgccagagtgtggcgcagccgctgggcccagagaacctgcacggggagcagaagatcgaagccgagacgcgggccgtgtgatctgctgggctagtctccccatgtgccccaccccgcggaaggcgtgtttgtgcccagaagagaggccgggctgctgcagaaccccgccgtgtaaagaggcagaaaagttggtttggtttgcagtaacgctgcaactagaaaatatatgcacttcaggcttgttgaaacgaccaagactctgtgacgttaatttgggtctttgtcctggcagtgcctctgccagtcactgtcatcgttgtgtcccccacaactgtcctcttgctagctcggcccagctttgtccctggagcccgatgctacccctgtcagacagaggctgcggcctgggccagagtcagggagtagctgctgcttcacggcgtctccactgtgcgattggcccggagccccgaagactcggagggagctgctcagggccggtgagcgcagccagaagccctggccagtgaggagctcacaggtcctccctggtggtcccgccgcacctctgcatctcctgggcgtcaccaggaaggctctgaagtcccgggctgctctcagcacttctcctgcagactgaagactctggactcattgctgattggaacaccaggaggaggttggatttctgccagtgggggatgtttctggaggcagctggtcccccacaccgcgtcctgctgagcctgccccctggattggctgtaatttgcctcgaagttcagcagttcatcttcatgggaaatttgctgagcccccaccagggaaccggatgatgaaacagggatacctcacagcttggccatttgaggcaaaggcagcttcccgagctgatgctaaagaagacagactttcccttcctcccagcagcagcagtgcagagcccacctggagggatgtgggggctgtgcagggtgcagcgctcaggtggatcctgggaagcagcctctggatgctgagtggagggagccactgagcacagcaaggcaccaaagcccctggagaaaccgccagggcgaggtgcgaccatcatcaggatcaaagcagacggggcgtgggtggggaaggggctctgggaccagaccccccacactactgcgtctttgtttctatcagtctttgtagaagcaggtggtggtggaaattccagcaggtgggtcccgcagaggccctgaggcctcacttttcggatcttctgtcccagatcctgctccctccctgctgagcctggggttcccctggcattggccccagccttctgaaagccggcgctgcagccagaggccgcacgctgcactgtcgcgacgcagagaggcttctgtgcaggctgggatcgggccccatgtctgtgctgtctagtttgtgttcaaaatgtcagaataaacacagaataaatgtt

SEQ ID NO: 197258 - DNA, 4315 bp, Homo sapiens
  Payload ID: 18914
  Gene Name: ubiquitin specific peptidase 20
  Uniprot ID: Q9Y2K6
  ENST ID: ENST00000372429
  CDS Start-End: 183-2927
ctcagagggggcgcgcttgactgacaggcggcggcggcgcagttgcgagtgcaggctccttgccagaggcctccactcactccagacccctatagcccgtcgctgtcagctgtcaacaaaggatgcgaatgctggccgcttcctgtgggcttcgtgtcacccagaggtgagcccaggccaggatgggggactccagggacctttgccctcaccttgactccataggagaggtgaccaaagaggacttgctgctcaaatctaagggaacctgtcagtcgtgtggggtcaccggaccaaacctatgggcctgtctgcaggttgcctgcccctatgttggctgcggagaatcctttgctgaccacagcaccattcatgcacaggcaaaaaagcacaacttgaccgtgaacctgaccacgttccgactgtggtgttacgcctgtgagaaggaggtattcctggagcagcggctggcagcccctctgctgggctcctcttccaagttctctgaacaggactccccgccaccctcccaccctctgaaagctgttcctattgctgtggctgatgaaggagagtctgagtcagaggacgatgacctgaaacctcgaggcctcacgggcatgaagaacctcgggaactcctgctacatgaacgctgccctgcaggccctgtccaattgcccgccgctgactcagttcttcttggagtgtggcggcctggtgcgcacagataagaagccagccctgtgcaagagctaccagaagctggtctctgaggtctggcataagaaacggccaagctacgtggtccccaccagtctgtctcatgggatcaagttggtcaacccaatgttccgaggctatgcccagcaggacacccaagagttccttcgctgcctgatggaccagctgcacgaggagctcaaggagccggtggtggccacggtggcgctgacggaggctcgggactcagattcgagtgacacggatgagaaacgggagggtgaccggagcccatcagaagatgagttcttgtcctgtgactcgagcagtgaccggggtgagggtgacgggcaggggcgtggcgggggcagctcgcaggccgagacggagctgctgatcccagatgaggcgggccgagccatctctgagaaggagcggatgaaggaccgcaagttctcctggggccagcagcgtacaaactcggagcaagtggacgaggacgctgatgtggacactgccatggctgcccttgacgaccagcccgcggaggcccagcccccgtcaccacggtcctccagcccctgccggacgccagagccggacaatgatgctcacctacgcagctcctctcgcccctgcagccccgtccaccaccacgagggccatgccaagctgtctagcagcccccctcgtgcaagccccgtgaggatggcaccgtcgtacgtgctcaagaaagcccaggtattgagtgctggcagccggaggcggaaggagcagcgctaccgcagcgtcatctcagacatctttgacggctccattctcagccttgtgcagtgtctcacctgtgaccgggtatccaccacagtggaaacgttccaggacttatcactgcccattcctggaaaggaggacctggccaagctccattcagccatctaccagaatgtgccggccaagccaggcgcctgtggggacagctatgccgcccagggctggctggccttcattgtggagtacatccgacggtttgtggtatcctgtacccccagctggttttgggggcctgtcgtcaccctggaagactgccttgctgccttctttgccgctgatgagttaaagggtgacaacatgtacagctgtgagcggtgtaagaagctgcggaacggagtgaagtactgcaaagtcctgcggttgcccgagatcctgtgcattcacctaaagcgctttcggcacgaggtgatgtactcattcaagatcaacagccacgtctccttccccctcgaggggctcgacctgcgccccttccttgccaaggagtgcacatcccagatcaccacctacgacctcctctcggtcatctgccaccacggcacggcaggcagtgggcactacatcgcctactgccagaacgtgatcaatgggcagtggtacgagtttgatgaccagtacgtcacagaagtccacgagacggtggtgcagaacgccgagggctacgtactcttctacaggaagagcagcgaggaggccatgcgggagcgacagcaggtggtgtccctggccgccatgcgggagcccagcctgctgcggttctacgtgtcccgcgagtggctcaacaagttcaacaccttcgcggagccaggccccatcaccaaccagaccttcctctgctcccacggaggcatcccgccccacaaataccactacatcgacgacctggtggtcatcctgccccagaacgtctgggagcacctgtacaacagattcgggggtggccccgccgtgaaccacctgtacgtgtgctccatctgccaggtggagatcgaggcactggccaagcgcaggaggatcgagatcgacaccttcatcaagttgaacaaggccttccaggccgaggagtcgccgggcgtcatctactgcatcagcatgcagtggttccgggagtgggaggcgttcgtcaaggggaaggacaacgagccccccgggcccattgacaacagcaggattgcacaggtcaaaggaagcggccatgtccagctgaagcagggagctgactacgggcagatttcggaggagacctggacctacctgaacagcctgtatggaggtggccccgagattgccatccgccagagtgtggcgcagccgctgggcccagagaacctgcacggggagcagaagatcgaagccgagacgcgggccgtgtgatctgctgggctagtctccccatgtgccccaccccgcggaaggcgtgtttgtgcccagaagagaggccgggctgctgcagaaccccgccgtgtaaagaggcagaaaagttggtttggtttgcagtaacgctgcaactagaaaatatatgcacttcaggcttgttgaaacgaccaagactctgtgacgttaatttgggtctttgtcctggcagtgcctctgccagtcactgtcatcgttgtgtcccccacaactgtcctcttgctagctcggcccagctttgtccctggagcccgatgctacccctgtcagacagaggctgcggcctgggccagagtcagggagtagctgctgcttcacggcgtctccactgtgcgattggcccggagccccgaagactcggagggagctgctcagggccggtgagcgcagccagaagccctggccagtgaggagctcacaggtcctccctggtggtcccgccgcacctctgcatctcctgggcgtcaccaggaaggctctgaagtcccgggctgctctcagcacttctcctgcagactgaagactctggactcattgctgattggaacaccaggaggaggttggatttctgccagtgggggatgtttctggaggcagctggtcccccacaccgcgtcctgctgagcctgccccctggattggctgtaatttgcctcgaagttcagcagttcatcttcatgggaaatttgctgagcccccaccagggaaccggatgatgaaacagggatacctcacagcttggccatttgaggcaaaggcagcttcccgagctgatgctaaagaagacagactttcccttcctcccagcagcagcagtgcagagcccacctggagggatgtgggggctgtgcagggtgcagcgctcaggtggatcctgggaagcagcctctggatgctgagtggagggagccactgagcacagcaaggcaccaaagcccctggagaaaccgccagggcgaggtgcgaccatcatcaggatcaaagcagacggggcgtgggtggggaaggggctctgggaccagaccccccacactactgcgtctttgtttctatcagtctttgtagaagcaggtggtggtggaaattccagcaggtgggtcccgcagaggccctgaggcctcacttttcggatcttctgtcccagatcctgctccctccctgctgagcctggggttcccctggcattggccccagccttctgaaagccggcgctgcagccagaggccgcacgctgcactgtcgcgacgcagagaggcttctgtgcaggctgggatcgggccccatgtctgtgctgtctagtttgtgttcaaaatgtcagaataaacacagaataaatgttcccacggcca

SEQ ID NO: 197259 - DNA, 2195 bp, Homo sapiens
  Payload ID: 18915
  Gene Name: ubiquitin specific peptidase 21
  Uniprot ID: Q9UK80
  ENST ID: ENST00000289865
  CDS Start-End: 222-1919
gagacggtgaagccggtggccggtggccgggcgggaccaacaaagatggcggcggcccctgcggcgggagcgatctgggcaacggctgcggctaaagctgcagccgggcccacgggggggctgcacgggggtagtagggggtggccctgaactggggcctggccctggctggcctctcccgccgcctcactgggggacaggtccagcctgtggtgtccacaatgccccaggcctctgagcaccgcctgggccgtacccgagagccacctgttaatatccagccccgagtgggatccaagctaccatttgcccccagggcccgcagcaaggagcgcagaaacccagcctctgggccaaaccccatgttacgacctctgcctccccggccaggtctgcctgatgaacggctcaagaaactggagctgggacggggacggacctcaggccctcgtcccagaggcccccttcgagcagatcatggggttcccctgcctggctcaccacccccaacagtggctttgcctctcccatctcggaccaacttagcccgttccaagtctgtgagcagtggggacttgcgtccaatggggattgccttgggagggcaccgtggcaccggagagcttggggctgcactgagccgcttggccctccggcctgagccacccactttgagacgtagcacttctctccgccgcctagggggctttcctggaccccctaccctgttcagcatacggacagagccccctgcttcccatggctccttccacatgatatccgcccggtcctctgagcctttctactctgatgacaagatggctcatcacacactccttctgggctctggtcatgttggccttcgaaacctgggaaacacgtgcttcctgaatgctgtgctgcagtgtctgagcagcactcgacctcttcgggacttctgtctgagaagggacttccggcaagaggtgcctggaggaggccgagcccaagagctcactgaagcctttgcagatgtgattggtgccctctggcaccctgactcctgcgaagctgtgaatcctactcgattccgagctgtcttccagaaatatgttccctccttctctggatacagccagcaggatgcccaagagttcctgaagctcctcatggagcggctacaccttgaaatcaaccgccgaggccgccgggctccaccgatacttgccaatggtccagttccctctccaccccgccgaggaggggctctgctagaagaacctgagttaagtgatgatgaccgagccaacctaatgtggaaacgttacctggagcgagaggacagcaagattgtggacctgtttgtgggccagttgaaaagttgtctcaagtgccaggcctgtgggtatcgctccacgaccttcgaggttttttgtgacctgtccctgcccatccccaagaaaggatttgctgggggcaaggtgtctctgcgggattgtttcaaccttttcactaaggaagaagagctagagtcggagaatgccccagtgtgtgaccgatgtcggcagaaaactcgaagtaccaaaaagttgacagtacaaagattccctcgaatcctcgtgctccatctgaatcgattttctgcctcccgaggctccatcaaaaaaagttcagtaggtgtagactttccactgcagcgactgagcctaggggactttgccagtgacaaagccggaagtcctgtataccagctgtatgccctttgcaaccactcaggcagcgtccactatggccactacacagccctgtgccggtgccagactggttggcatgtctacaatgactctcgtgtctcccctgtcagtgaaaaccaggtggcatccagcgagggctacgtgctgttctaccaactgatgcaggagccaccccggtgcctgtgacacctctaagctctggcacctgtgaagccctttaaacacccttaagccccaggctccccgtttacctcagagacgtctatttttgtgtctttttaatcggggaggggggagggggtggttgtagctccattattttttttattaaaaaatacccttccacctggaggctcccttgtctcccagccccatgtacaaagctcaccaagcccctgcccatgtacagcccccagaccctctgcaatatcactttttgtgaataaatttattaagaaaaaa

SEQ ID NO: 197260 - DNA, 2095 bp, Homo sapiens
  Payload ID: 18915
  Gene Name: ubiquitin specific peptidase 21
  Uniprot ID: Q9UK80
  ENST ID: ENST00000368001
  CDS Start-End: 164-1819
ctgcggcgggagcgatctgggcaacggctgcggctaaagctgcagccgggcccacgggggggctgcacgggggtagtagggggtggccctgaactggggcctggccctggctggcctctcccgccgcctcactgggggacaggtccagcctgtggtgtccacaatgccccaggcctctgagcaccgcctgggccgtacccgagagccacctgttaatatccagccccgagtgggatccaagctaccatttgcccccagggcccgcagcaaggagcgcagaaacccagcctctgggccaaaccccatgttacgacctctgcctccccggccaggtctgcctgatgaacggctcaagaaactggagctgggacggggacggacctcaggccctcgtcccagaggcccccttcgagcagatcatggggttcccctgcctggctcaccacccccaacagtggctttgcctctcccatctcggaccaacttagcccgttccaagtctgtgagcagtggggacttgcgtccaatggggattgccttgggagggcaccgtggcaccggagagcttggggctgcactgagccgcttggccctccggcctgagccacccactttgagacgtagcacttctctccgccgcctagggggctttcctggaccccctaccctgttcagcatacggacagagccccctgcttcccatggctccttccacatgatatccgcccggtcctctgagcctttctactctgatgacaagatggctcatcacacactccttctgggctctggtcatgttggccttcgaaacctgggaaacacgtgcttcctgaatgctgtgctgcagtgtctgagcagcactcgacctcttcgggacttctgtctgagaagggacttccggcaagaggtgcctggaggaggccgagcccaagagctcactgaagcctttgcagatgtgattggtgccctctggcaccctgactcctgcgaagctgtgaatcctactcgattccgagctgtcttccagaaatatgttccctccttctctggatacagccagcaggatgcccaagagttcctgaagctcctcatggagcggctacaccttgaaatcaaccgccgaggccgccgggctccaccgatacttgccaatggtccagttccctctccaccccgccgaggaggggctctgctagaagaacctgagttaagtgatgatgaccgagccaacctaatgtggaaacgttacctggagcgagaggacagcaagattgtggacctgtttgtgggccagttgaaaagttgtctcaagtgccaggcctgtgggtatcgctccacgaccttcgaggttttttgtgacctgtccctgcccatccccaagaaaggatttgctgggggcaaggtgtctctgcgggattgtttcaaccttttcactaaggaagaagagctagagtcggagaatgccccagtgtgtgaccgatgtcggcagaaaactcgaagtaccaaaaagttgacagtacaaagattccctcgaatcctcgtgctccatctgaatcgattttctgcctcccgaggctccatcaaaaaaagttcagtaggtgtagactttccactgcagcgactgagcctaggggactttgccagtgacaaagccggcagcgtccactatggccactacacagccctgtgccggtgccagactggttggcatgtctacaatgactctcgtgtctcccctgtcagtgaaaaccaggtggcatccagcgagggctacgtgctgttctaccaactgatgcaggagccaccccggtgcctgtgacacctctaagctctggcacctgtgaagccctttaaacacccttaagccccaggctccccgtttacctcagagacgtctatttttgtgtctttttaatcggggaggggggagggggtggttgtagctccattattttttttattaaaaaatacccttccacctggaggctcccttgtctcccagccccatgtacaaagctcaccaagcccctgcccatgtacagcccccagaccctctgcaatatcactttttgtgaataaatttattaagaaaaaa

SEQ ID NO: 197261 - DNA, 2342 bp, Homo sapiens
  Payload ID: 18915
  Gene Name: ubiquitin specific peptidase 21
  Uniprot ID: Q9UK80
  ENST ID: ENST00000368002
  CDS Start-End: 378-2075
gcgcaggcgctttgagagacggtgaagccggtggccggtggccgggcgggaccaacaaagatggcggcggcccctgcggcgggagcgatctgggcaacggctgcggctaaagctgcagccgggcccacgggggggctgcacgggggtagtagggggtggccctgaactggggcctggccctggctggcctctcccgccgcctcactgggggacaggtactggggatacgatggctgattcgatagatctggttcctgccctcagtgcgtatactgctccccactttcgttgatgtggtagtggtgatgactgagccaaccacctaatgtggaaatgagaggacagcaagattgtgggtccagcctgtggtgtccacaatgccccaggcctctgagcaccgcctgggccgtacccgagagccacctgttaatatccagccccgagtgggatccaagctaccatttgcccccagggcccgcagcaaggagcgcagaaacccagcctctgggccaaaccccatgttacgacctctgcctccccggccaggtctgcctgatgaacggctcaagaaactggagctgggacggggacggacctcaggccctcgtcccagaggcccccttcgagcagatcatggggttcccctgcctggctcaccacccccaacagtggctttgcctctcccatctcggaccaacttagcccgttccaagtctgtgagcagtggggacttgcgtccaatggggattgccttgggagggcaccgtggcaccggagagcttggggctgcactgagccgcttggccctccggcctgagccacccactttgagacgtagcacttctctccgccgcctagggggctttcctggaccccctaccctgttcagcatacggacagagccccctgcttcccatggctccttccacatgatatccgcccggtcctctgagcctttctactctgatgacaagatggctcatcacacactccttctgggctctggtcatgttggccttcgaaacctgggaaacacgtgcttcctgaatgctgtgctgcagtgtctgagcagcactcgacctcttcgggacttctgtctgagaagggacttccggcaagaggtgcctggaggaggccgagcccaagagctcactgaagcctttgcagatgtgattggtgccctctggcaccctgactcctgcgaagctgtgaatcctactcgattccgagctgtcttccagaaatatgttccctccttctctggatacagccagcaggatgcccaagagttcctgaagctcctcatggagcggctacaccttgaaatcaaccgccgaggccgccgggctccaccgatacttgccaatggtccagttccctctccaccccgccgaggaggggctctgctagaagaacctgagttaagtgatgatgaccgagccaacctaatgtggaaacgttacctggagcgagaggacagcaagattgtggacctgtttgtgggccagttgaaaagttgtctcaagtgccaggcctgtgggtatcgctccacgaccttcgaggttttttgtgacctgtccctgcccatccccaagaaaggatttgctgggggcaaggtgtctctgcgggattgtttcaaccttttcactaaggaagaagagctagagtcggagaatgccccagtgtgtgaccgatgtcggcagaaaactcgaagtaccaaaaagttgacagtacaaagattccctcgaatcctcgtgctccatctgaatcgattttctgcctcccgaggctccatcaaaaaaagttcagtaggtgtagactttccactgcagcgactgagcctaggggactttgccagtgacaaagccggaagtcctgtataccagctgtatgccctttgcaaccactcaggcagcgtccactatggccactacacagccctgtgccggtgccagactggttggcatgtctacaatgactctcgtgtctcccctgtcagtgaaaaccaggtggcatccagcgagggctacgtgctgttctaccaactgatgcaggagccaccccggtgcctgtgacacctctaagctctggcacctgtgaagccctttaaacacccttaagccccaggctccccgtttacctcagagacgtctatttttgtgtctttttaatcggggaggggggagggggtggttgtagctccattattttttttattaaaaaatacccttccacctggaggctcccttgtctcccagccccatgtacaaagctcaccaagcccctgcccatgtacagcccccagaccctctgcaatatcactttttgtgaataaatttatt

SEQ ID NO: 197262 - DNA, 1150 bp, Homo sapiens
  Payload ID: 18915
  Gene Name: ubiquitin specific peptidase 21
  ENST ID: ENST00000492950
  CDS Start-End: 392-1150
gttcgggtgtggatgcgcaggcgctttgagagacggtgaagccggtggccggtggccgggcgggaccaacaaagatggcggcggcccctgcggcgggagcgatctgggcaacggctgcggctaaagctgcagccgggcccacgggggggctgcacgggggtagtagggggtggccctgaactggggcctggccctggctggcctctcccgccgcctcactgggggacaggtactggggatacgatggctgattcgatagatctggttcctgccctcagtgcgtatactgctccccactttcgttgatgtggtagtggtgatgactgagccaaccacctaatgtggaaatgagaggacagcaagattgtgggtccagcctgtggtgtccacaatgccccaggcctctgagcaccgcctgggccgtacccgagagccacctgttaatatccagccccgagtgggatccaagctaccatttgcccccagggcccgcagcaaggagcgcagaaacccagcctctgggccaaaccccatgttacgacctctgcctccccggccaggtctgcctgatgaacggctcaagaaactggagctgggacggggacggacctcaggccctcgtcccagaggcccccttcgagcagatcatggggttcccctgcctggctcaccacccccaacagtggctttgcctctcccatctcggaccaacttagcccgttccaagtctgtgagcagtggggacttgcgtccaatggggattgccttgggagggcaccgtggcaccggagagcttggggctgcactgagccgcttggccctccggcctgagccacccactttgagacgtagcacttctctccgccgcctagggggctttcctggaccccctaccctgttcagcatacggacagagccccctgcttcccatggctccttccacatgatatccgcccggtcctctgagcctttctactctgatgacaagatggctcatcacacactccttctgggctctggtcatgttggccttcgaaacctgggaaacacgtgcttcctgaatgctgtgctgcagtgtctgagcagcactcgacctcttcgggacttctgtctgagaagggacttccggcaagaggtgcctggaggaggc

SEQ ID NO: 197263 - DNA, 709 bp, Homo sapiens
  Payload ID: 18915
  Gene Name: ubiquitin specific peptidase 21
  ENST ID: ENST00000479344
  CDS Start-End: 358-709
aagatggcggcggcccctgcggcgggagcgatctgggcaacggctgcggctaaagctgcagccgggcccacgggggggctgcacgggggtagtagggggtggccctgaactggggcctggccctggctggcctctcccgccgcctcactgggggacagatactaagtatttactttgtaccaaacacgatgccaggtactggggatacgatggctgattcgatagatctggttcctgccctcagtgcgtatactgctccccactttcgttgatgtggtagtggtgatgactgagccaaccacctaatgtggaaatgagaggacagcaagattgtgggtccagcctgtggtgtccacaatgccccaggcctctgagcaccgcctgggccgtacccgagagccacctgttaatatccagccccgagtgggatccaagctaccatttgcccccagggcccgcagcaaggagcgcagaaacccagcctctgggccaaaccccatgttacgacctctgcctccccggccaggtctgcctgatgaacggctcaagaaactggagctgggacggggacggacctcaggccctcgtcccagaggcccccttcgagcagatcatggggttcccctgcctggctcaccacccccaacagtggctttgcctctcccatctcggaccaacttagcccgttccaagtctgtgagcagtgggg

SEQ ID NO: 197264 - DNA, 5220 bp, Homo sapiens
  Payload ID: 18916
  Gene Name: ubiquitin specific peptidase 22
  Uniprot ID: Q9UPT9
  ENST ID: ENST00000261497
  CDS Start-End: 205-1782
gcagccgcagctcgggggcggtgcctgccttgcagcctcccctcggcgatcgcgcagccccatctttgtccggcctccgcgctttgttctcggcgcccgggccttggccagcctggccagccgccgagcagcccccacgccgcgctggcgtcgtcctcgcctccctcgccgccgccccccgcgcgcggccgggccttgccccccatggtgtcccggccagagcccgagggcgaggccatggacgccgagctggcggtagcgccgccgggctgctcgcacctgggcagcttcaaggtggacaactggaagcagaacctgcgggccatctaccagtgcttcgtgtggagcggcacggctgaggcccgcaagcgcaaggccaagtcctgtatctgccatgtctgtggcgtccacctcaacaggctgcattcctgcctctactgtgtcttcttcggctgtttcacaaagaagcatattcacgagcatgcgaaggcgaagcggcacaacctggccattgatctgatgtacggaggcatctactgttttctgtgccaggactacatctatgacaaagacatggaaataatcgccaaggaggagcagcgaaaagcttggaaaatgcaaggcgttggagagaagttttcaacttgggaaccaaccaaacgggagcttgaactgctgaagcacaacccgaaaaggagaaagatcacctcgaactgcaccataggtctgcgtgggctgatcaaccttgggaacacatgcttcatgaactgcatcgtgcaggccctgacccacacgccacttctgcgggacttcttcctgtctgacaggcaccgctgtgagatgcagagccccagctcctgtctggtctgtgagatgtcctcactgtttcaggagttttactctggacaccggtcccctcacatcccgtataagttgctgcacctggtgtggacccacgcgaggcacctagcaggctacgagcagcaggacgcccacgagttcctcatcgcggccctggacgtgctccaccgacactgcaaaggtgatgacaatgggaagaaggccaacaaccccaaccactgcaactgcatcatagaccagatcttcacaggcgggttgcagtcagacgtcacctgccaagtctgccatggagtctccaccaccatcgaccccttctgggacatcagcttggatctccccggctcttccaccccattctggcccctgagcccagggagcgagggcaacgtggtaaacggggaaagccacgtgtcgggaaccaccacgctcacggactgcctgcgacgattcaccagaccagagcacttgggcagcagcgccaagatcaagtgcagcggttgccatagctaccaggagtccacaaagcagctcactatgaagaaactgcccatcgtagcctgttttcatctcaaacgatttgaacactcagccaagctgcggcggaagatcaccacgtatgtgtccttccccctggagctggacatgacccctttcatggcctccagcaaagagagcaggatgaatggacagtaccagcagcccacggacagtctcaacaatgacaacaagtattccctgtttgctgttgttaaccatcaagggaccttggagagtggccactacaccagctttatccggcagcacaaagaccagtggttcaagtgtgacgatgccatcatcaccaaggccagcatcaaggacgtcctggacagcgaagggtacttgctgttctatcacaaacagttcctggaatacgagtagccttatctgcagctggtcagaaaaacaaaggcaatgcattggcaagcctcacaaagtgatcctccctggcccccccctcccccaagtctcccgccgcctccccggcctggtgacaccacctcccatgcagatgtggcccctctgcacctgggacccatcgggtcgggatggaccacacggacggggaggctcctggagctgctttgaagatggatgagatgaggggtgtgctctgggtgggaggagcagcgtacacccgtcaccagaacatctcttgtgtcatgacatgggggtgcaacgggggcctcacagcacagagtgaccgctgcctggcgttccccagcactcggtgtggaaaggcccctacctgctgtaagattatgggtccatgaaagcagtaagctggacacagaggtgtagtgtgcgggacagagggccttgcagatgcctttctgttggtgttttagtgttaaaatacggagagtatggaactcttcacctccattttctcagcggctgtgaagcagcctcctagcttcggaagtacggacactacgtcgcgttttcaagcgtgtctgttctgcaggtaacagcatcaagctgcacgtggaagcatctcgcggttttctagaaacaggcattttcttatccctctcccgctcctttttccacaaaggtgaatttcataaatgtaatactagtaaagtgaatgaattactgagtttatacagaaatttaggtaacttctcctttagtctcaagagcgagtcttgctttttaatgggtgccgtttatgttgctgcccgccctgtgtgcctggctcctctgggtgccttggtgtctgctggtggctggcagtgggcgcagcggaggagagttgtgctgcagctcatacggtgtgtctgtcatctcagtctggagtaaatgcagtgtctgccggtgtctgatgggttctgtccctcgtattttctttgccttctatcccattgcctggctaccgctgcctggcagccaagggtgttggtcgcgaagctggagtggcctctggtggagcctgcatcttgtctcgtctgcctctgctttacatttggtgtactttcgggcgtggtggcagtaaaatgacaccgtgattgagcttgtcagcagagctgaaagagaaagtagaaggatgtgcattgtttcttgtaagatatcttgcatgtatctgtgtattcaaattcaaacagagatggtttgtccatttgtccactgagaaattagaaactagggacaagggggaggaaaagtactgaaatacagtttatgaagcaagtgtgtctcgggctgtgcttgtcccaggagccccagcagcatctgaactgaggcttcttcagtcctgcaggaacaggatcatctgtctcagcggtgggcagatgttttcatagacagccagggagtaaacactgttggctctgtgggctgtatggtctctgccataaatagtacagagatgtggctgtgtctagtacaacttttagacacagaaatctgaatgacatatattgttctgtgtcaagaaacttagattttttttttaactatttaaaaacgtgaaacctattcttagctcacaggccatggagaagctggtggggaccagacccagctccttagctggctgggctggggagggggtagtgacagtggcagctgctactcactgctcagtgtggaaaacacaggacttggcaatcacagcccgcagaaccatcatgtgtggcagaagcctgagggatgcggtttcttgcccacgtgctctgttcattttctgttgtttttctgcacttaaagaattcacatggaagcatgttttataaaatgaattaccagagaaacagagatgggccgagattttcagaaatggtcccatgtgaccaagttctgctgtttgggtgacagtgctttgaagatctcctttgaggatgtgcagtctttttttttttttttttgagatggagtttgttgcccaggctggagtgagtggcacagtctcggctcactgcaacctccacctcctgggttcaagcagttctcgtgccgcagcctcccaagtagctgggactacaggcatgcaccaccacgccaggctaatttttgtatttttagtagagatggggtttcaccatgtctcaaactcctgacctcaggcgatccacccacctcagcgtcccaaagtgctgggattataggcgtgagccaccgcacctggcctatgagtggtcttttaattaggaacaaatctaatggaaaggagagttgactgaagttggcccacaggattgtgagctgggcagtgccttcatgaaggcttgccaccttgggacgccccagtttactggggtgtcttgcggagtgcagaaggctttctggcagctgcctgggtttggccagaccctgcctcccctcccgccggccaacccctagtccccttcctgtctccacttgcattcaggggtggctgctgttctgagaacattagaactgggaagagagatggagtcacatggatttttggtgggcattattctaaactttcgtatccaagttagtcccccttattccactgtggcattgccgttctaagcagttacctgatgcctgctgctgaagagctgctcacaggaggcggcggcggccctggcactgccccttgcattaggtcttgtgtttgatgtgttcttgtgaatttactttgtcagaacaaaatatttacgcgttgggttcaggaatttcttttagctccccatctggctgtgaaattcaggaaacctcccgttgcctagtaatcaccccatgtaggtgtacattgtgacaaagtgcatctgaccactaaggggcccccttggtgaccccagcacattcacagcagtgttaaaatggcctgcattttggagatgctggctggcctttcagtgcctcccaggaagacacatggcctttccctcttcagatgcctgaagggagtgctttgaggcaggtgatgtgctgggagtgtgggcggcctccctctggccccggggccctctgtggaccttggctccctccgtggacctgggcttcgtggtgagcactgcagcctccctgggcattccctccagcgccagcaccactgcaacatatagacctgagtgctattgtattttggcttggtgtgtatgctcttcattgtgtaaaattgctgttcttttgacaatttaagtgattgttttgtttactgtaagtttgaaaataaaaatgaagaaaaaaattccaatgactgtgctgtggttggagactttatttaccaagatgtttactcttcctttccccttccattttgaggagctgtgtcactcctcctcccccccagtgctttgtagtctctcctatgtcataataaagctacattttctctgagaa

SEQ ID NO: 197265 - DNA, 4976 bp, Homo sapiens
  Payload ID: 18916
  Gene Name: ubiquitin specific peptidase 22
  Uniprot ID: Q9UPT9
  ENST ID: ENST00000537526
  CDS Start-End: 1-1542
atggcgccgggttggccctcactatcagcgggctcccgacaggaggcgccccagcttgcggccgggggcagcgcctaccaggcagttggcaggcagttccagccccgggccacggcactgcagggcccgagccaggccaagtcctgtatctgccatgtctgtggcgtccacctcaacaggctgcattcctgcctctactgtgtcttcttcggctgtttcacaaagaagcatattcacgagcatgcgaaggcgaagcggcacaacctggccattgatctgatgtacggaggcatctactgttttctgtgccaggactacatctatgacaaagacatggaaataatcgccaaggaggagcagcgaaaagcttggaaaatgcaaggcgttggagagaagttttcaacttgggaaccaaccaaacgggagcttgaactgctgaagcacaacccgaaaaggagaaagatcacctcgaactgcaccataggtctgcgtgggctgatcaaccttgggaacacatgcttcatgaactgcatcgtgcaggccctgacccacacgccacttctgcgggacttcttcctgtctgacaggcaccgctgtgagatgcagagccccagctcctgtctggtctgtgagatgtcctcactgtttcaggagttttactctggacaccggtcccctcacatcccgtataagttgctgcacctggtgtggacccacgcgaggcacctagcaggctacgagcagcaggacgcccacgagttcctcatcgcggccctggacgtgctccaccgacactgcaaaggtgatgacaatgggaagaaggccaacaaccccaaccactgcaactgcatcatagaccagatcttcacaggcgggttgcagtcagacgtcacctgccaagtctgccatggagtctccaccaccatcgaccccttctgggacatcagcttggatctccccggctcttccaccccattctggcccctgagcccagggagcgagggcaacgtggtaaacggggaaagccacgtgtcgggaaccaccacgctcacggactgcctgcgacgattcaccagaccagagcacttgggcagcagcgccaagatcaagtgcagcggttgccatagctaccaggagtccacaaagcagctcactatgaagaaactgcccatcgtagcctgttttcatctcaaacgatttgaacactcagccaagctgcggcggaagatcaccacgtatgtgtccttccccctggagctggacatgacccctttcatggcctccagcaaagagagcaggatgaatggacagtaccagcagcccacggacagtctcaacaatgacaacaagtattccctgtttgctgttgttaaccatcaagggaccttggagagtggccactacaccagctttatccggcagcacaaagaccagtggttcaagtgtgacgatgccatcatcaccaaggccagcatcaaggacgtcctggacagcgaagggtacttgctgttctatcacaaacagttcctggaatacgagtagccttatctgcagctggtcagaaaaacaaaggcaatgcattggcaagcctcacaaagtgatcctccctggcccccccctcccccaagtctcccgccgcctccccggcctggtgacaccacctcccatgcagatgtggcccctctgcacctgggacccatcgggtcgggatggaccacacggacggggaggctcctggagctgctttgaagatggatgagatgaggggtgtgctctgggtgggaggagcagcgtacacccgtcaccagaacatctcttgtgtcatgacatgggggtgcaacgggggcctcacagcacagagtgaccgctgcctggcgttccccagcactcggtgtggaaaggcccctacctgctgtaagattatgggtccatgaaagcagtaagctggacacagaggtgtagtgtgcgggacagagggccttgcagatgcctttctgttggtgttttagtgttaaaatacggagagtatggaactcttcacctccattttctcagcggctgtgaagcagcctcctagcttcggaagtacggacactacgtcgcgttttcaagcgtgtctgttctgcaggtaacagcatcaagctgcacgtggaagcatctcgcggttttctagaaacaggcattttcttatccctctcccgctcctttttccacaaaggtgaatttcataaatgtaatactagtaaagtgaatgaattactgagtttatacagaaatttaggtaacttctcctttagtctcaagagcgagtcttgctttttaatgggtgccgtttatgttgctgcccgccctgtgtgcctggctcctctgggtgccttggtgtctgctggtggctggcagtgggcgcagcggaggagagttgtgctgcagctcatacggtgtgtctgtcatctcagtctggagtaaatgcagtgtctgccggtgtctgatgggttctgtccctcgtattttctttgccttctatcccattgcctggctaccgctgcctggcagccaagggtgttggtcgcgaagctggagtggcctctggtggagcctgcatcttgtctcgtctgcctctgctttacatttggtgtactttcgggcgtggtggcagtaaaatgacaccgtgattgagcttgtcagcagagctgaaagagaaagtagaaggatgtgcattgtttcttgtaagatatcttgcatgtatctgtgtattcaaattcaaacagagatggtttgtccatttgtccactgagaaattagaaactagggacaagggggaggaaaagtactgaaatacagtttatgaagcaagtgtgtctcgggctgtgcttgtcccaggagccccagcagcatctgaactgaggcttcttcagtcctgcaggaacaggatcatctgtctcagcggtgggcagatgttttcatagacagccagggagtaaacactgttggctctgtgggctgtatggtctctgccataaatagtacagagatgtggctgtgtctagtacaacttttagacacagaaatctgaatgacatatattgttctgtgtcaagaaacttagattttttttttaactatttaaaaacgtgaaacctattcttagctcacaggccatggagaagctggtggggaccagacccagctccttagctggctgggctggggagggggtagtgacagtggcagctgctactcactgctcagtgtggaaaacacaggacttggcaatcacagcccgcagaaccatcatgtgtggcagaagcctgagggatgcggtttcttgcccacgtgctctgttcattttctgttgtttttctgcacttaaagaattcacatggaagcatgttttataaaatgaattaccagagaaacagagatgggccgagattttcagaaatggtcccatgtgaccaagttctgctgtttgggtgacagtgctttgaagatctcctttgaggatgtgcagtctttttttttttttttttgagatggagtttgttgcccaggctggagtgagtggcacagtctcggctcactgcaacctccacctcctgggttcaagcagttctcgtgccgcagcctcccaagtagctgggactacaggcatgcaccaccacgccaggctaatttttgtatttttagtagagatggggtttcaccatgtctcaaactcctgacctcaggcgatccacccacctcagcgtcccaaagtgctgggattataggcgtgagccaccgcacctggcctatgagtggtcttttaattaggaacaaatctaatggaaaggagagttgactgaagttggcccacaggattgtgagctgggcagtgccttcatgaaggcttgccaccttgggacgccccagtttactggggtgtcttgcggagtgcagaaggctttctggcagctgcctgggtttggccagaccctgcctcccctcccgccggccaacccctagtccccttcctgtctccacttgcattcaggggtggctgctgttctgagaacattagaactgggaagagagatggagtcacatggatttttggtgggcattattctaaactttcgtatccaagttagtcccccttattccactgtggcattgccgttctaagcagttacctgatgcctgctgctgaagagctgctcacaggaggcggcggcggccctggcactgccccttgcattaggtcttgtgtttgatgtgttcttgtgaatttactttgtcagaacaaaatatttacgcgttgggttcaggaatttcttttagctccccatctggctgtgaaattcaggaaacctcccgttgcctagtaatcaccccatgtaggtgtacattgtgacaaagtgcatctgaccactaaggggcccccttggtgaccccagcacattcacagcagtgttaaaatggcctgcattttggagatgctggctggcctttcagtgcctcccaggaagacacatggcctttccctcttcagatgcctgaagggagtgctttgaggcaggtgatgtgctgggagtgtgggcggcctccctctggccccggggccctctgtggaccttggctccctccgtggacctgggcttcgtggtgagcactgcagcctccctgggcattccctccagcgccagcaccactgcaacatatagacctgagtgctattgtattttggcttggtgtgtatgctcttcattgtgtaaaattgctgttcttttgacaatttaagtgattgttttgtttactgtaagtttgaaaataaaaatgaagaaaaaaattccaatgactgtgctgtggttggagactttatttaccaagatgtttactcttcctttccccttccattttgaggagctgtgtcactcctcctcccccccagtgctttgtagtctctcctatgtcataataaagctacattttctctg

SEQ ID NO: 197266 - DNA, 1906 bp, Homo sapiens
  Payload ID: 18916
  Gene Name: ubiquitin specific peptidase 22
  ENST ID: ENST00000579645
  CDS Start-End: 1-585
atggcgccgggttggccctcactatcagcgggctcccgacaggaggcgccccagcttgcggccgggggcagcgcctaccaggcagttggcaggcagttccagccccgggccacggcactgcagggcccgagccaggttacggcaaccgggggccctgcaaacagctcccgattagggggtgcttttgggtgggaaagcgcaggccctggatggaggcccgacctgcggcgctccagctcatcgccccgcctctttgcggcagagctcaggccggcgcaaaccggttcagtgctaggactgacgtctcgcgccgcccaaccgcagcacgcccccgcctccccagtcctctggaagagacagggaacgtctagccgccagggtcccgggaggcggctctgtaccagacggactatactgagagcctatgacaatagccgaaggccaagtcctgtatctgccatgtctgtggcgtccacctcaacaggctgcattcctgcctctactgtgtcttcttcggctgtttcacaaagaagcatattcacgagcatgcgaaggcgaagcggcacaacctggccattgatctgatgtacggaggcatctactgttttctgtgccaggactacatctatgacaaagacatggaaataatcgccaaggaggagcagcgaaaagcttggaaaatgcaaggcgttggagagaagttttcaacttgggaaccaaccaaacgggagcttgaactgctgaagcacaacccgaaaaggagaaagatcacctcgaactgcaccataggtctgcgtgggctgatcaaccttgggaacacatgcttcatgaactgcatcgtgcaggccctgacccacacgccacttctgcgggacttcttcctgtctgacaggcaccgctgtgagatgcagagccccagctcctgtctggtctgtgagatgtcctcactgtttcaggagttttactctggacaccggtcccctcacatcccgtataagttgctgcacctggtgtggacccacgcgaggcacctagcaggctacgagcagcaggacgcccacgagttcctcatcgcggccctggacgtgctccaccgacactgcaaaggtgatgacaatgggaagaaggccaacaaccccaaccactgcaactgcatcatagaccagatcttcacaggcgggttgcagtcagacgtcacctgccaagtctgccatggagtctccaccaccatcgaccccttctgggacatcagcttggatctccccggctcttccaccccattctggcccctgagcccagggagcgagggcaacgtggtaaacggggaaagccacgtgtcgggaaccaccacgctcacggactgcctgcgacgattcaccagaccagagcacttgggcagcagcgccaagatcaagtgcagcggttgccatagctaccaggagtccacaaagcagctcactatgaagaaactgcccatcgtagcctgttttcatctcaaacgatttgaacactcagccaagctgcggcggaagatcaccacgtatgtgtccttccccctggagctggacatgacccctttcatggcctccagcaaagagagcaggatgaatggacagtaccagcagcccacggacagtctcaacaatgacaacaagtattccctgtttgctgttgttaaccatcaagggaccttggagagtggccactacaccagctttatccggcagcacaaagaccagtggttcaagtgtgacgatgccatcatcaccaaggccagcatcaaggacgtcctggacagcgaagggtacttgctgttctatcacaaacagttcctggaatacgagtagccttatctgcagctggtcagaaaaacaaaggcaatgcattggcaagcctcacaaagtga

SEQ ID NO: 197267 - DNA, 306 bp, Homo sapiens
  Payload ID: 18916
  Gene Name: ubiquitin specific peptidase 22
  ENST ID: ENST00000582335
  CDS Start-End: 1-306
tgaactgctgaagcacaacccgaaaaggagaaagatcacctcgaactgcaccataggtctgcgtgggctgatcaaccttgggaacacatgcttcatgaactgcatcgtgcaggccctgacccacacgccacttctgcgggacttcttcctgtctgacaggcaccgctgtgagatgcagagccccagctcctgtctggtctgtgagatgtcctcactgtttcaggagtggagtctccaccaccatcgaccccttctgggacatcagcttggatctccccggctcttccaccccattctggcccctga

SEQ ID NO: 197268 - DNA, 573 bp, Homo sapiens
  Payload ID: 18916
  Gene Name: ubiquitin specific peptidase 22
  ENST ID: ENST00000476111
  CDS Start-End: 199-573
gctgcctggggagcctgggacttcggtgggcggtcccgggcgttcctgcgcgaggccaagtcctgtatctgccatgtctgtggcgtccacctcaacaggctgcattcctgcctctactgtgtcttcttcggctgtttcacaaagaagcatattcacgagcatgcgaaggcgaagcggcacaacctggccattgatctgatgtacggaggcatctactgttttctgtgccaggactacatctatgacaaagacatggaaataatcgccaaggaggagcagcgaaaagcttggaaaatgcaaggcgttggagagaagttttcaacttgggaaccaaccaaacgggagcttgaactgctgaagcacaacccgaaaaggagaaagatcacctcgaactgcaccataggtctgcgtgggctgatcaaccttgggaacacatgcttcatgaactgcatcgtgcaggccctgacccacacgccacttctgcgggacttcttcctgtctgacaggcaccgctgtgagatgcagagccccagctcctgtctggtctgtgagatgtcctcactgtttcaggag

SEQ ID NO: 197269 - DNA, 554 bp, Homo sapiens
  Payload ID: 18916
  Gene Name: ubiquitin specific peptidase 22
  ENST ID: ENST00000584538
  CDS Start-End: 234-554
aagagacagggaacgtctagccgccagggtcccgggaggcggctctgtaccagacggactatactgagagcctatgacaatagccgaaggccaagtcctgtatctgccatgtctgtggcgtccacctcaacaggctgcattcctgcctctactgtgtcttcttcggctgtttcacaaagaagcatattcacgagcatgcgaaggcgaagcggcacaacctggccattgatctgatgtacggaggcatctactgttttctgtgccaggactacatctatgacaaagacatggaaataatcgccaaggaggagcagcgaaaagcttggaaaatgcaaggcgttggagagaagttttcaacttgggaaccaaccaaacgggagcttgaactgctgaagcacaacccgaaaaggagaaagatcacctcgaactgcaccataggtctgcgtgggctgatcaaccttgggaacacatgcttcatgaactgcatcgtgcaggccctgacccacacgccacttctgcgggacttcttcctgtctgacaggcaccgctgtgag

SEQ ID NO: 197270 - DNA, 10549 bp, Homo sapiens
  Payload ID: 18917
  Gene Name: ubiquitin specific peptidase 24
  Uniprot ID: Q9UPU5
  ENST ID: ENST00000294383
  CDS Start-End: 1-7863
atggaatcggaggaggagcagcacatgaccacgctgctgtgcatgggcttctcagaccccgccaccatccgcaaggccctgcgcctggccaagaacgacattaacgaggccgtggcactgctcaccaacgagcggccgggcctcgactacggcggctacgagcccatggacagcggcggtggccccagccccgggcccggcgggggcccgcggggcgacggcggaggtgacggcggcggcggcggcccctcccgcggcgggagcaccggaggcgggggcggcttcgaccccccgcccgcctaccacgaggtggtggacgcggagaagaatgatgagaatggaaactgctcaggggaaggaattgaattccctacaacaaatttatatgaactggaaagccgtgttttgactgatcattggtccatcccttacaagcgagaagaatcactaggcaaatgcctgttggcatctacctacctagcaagacttggtctttccgagtctgatgagaattgtagaaggtttatggacaggtgtatgcctgaagcatttaaaaagctcctgacatcaagtgctgttcacaagtggggtactgaaattcatgaaggaatttacaacatgttgatgctattaatagaactggtcgcagagagaataaaacaagatccaattcccactggtctcctgggtgtgcttacaatggctttcaatcctgataatgaataccattttaaaaacagaatgaaagtgtctcaaaggaattgggcagaagtgtttggagagggaaatatgtttgctgtttcacctgtatcgactttccaaaaggagcctcatggatgggttgtggatttggtaaataagtttggagaattaggtggatttgcagcaatccaagccaagctccattcagaagatatagaacttggggctgtctcagcactgattcagcccttaggagtgtgtgcagagtacctcaattcctccgtggtacagcccatgctagacccagtcattcttactacaatccaggatgtacggagtgtagaagagaaagacctcaaagacaagagattggttagcatccctgagctcttgtctgccgttaagttactttgcatgcgcttccaaccggatctggtgacaattgtggatgaccttcgactagatattctattgcgcatgctgaaatcaccacatttcagtgctaagatgaattctctcaaagaagtaaccaaactaatagaagatagcactttatccaaatctgtgaagaatgctatagatacagacagattattagattggctagttgaaaactcagttctgtcgattgcactggaaggcaacatagaccaagcacaatactgtgaccgtataaagggaattattgaactcttgggtagtaaattgtcgttagatgaactcactaaaatttggaagatacagtcaggacaatcatctactgtgattgagaacattcatactattattgctgcagcggctgtgaaatttaattcagatcagcttaatcatttgtttgttctcattcagaagagctgggagactgagagtgatagagtaagacagaagcttttgagcctgattggacgaataggccgggaagctcgctttgagaccacttctggaaaggttttagacgtactctgggaactggctcaccttccaaccctgcccagtagccttattcagcaggccttggaggagcacctgacaatccttagtgatgcatatgcagtgaaagaagcaatcaagaggagctacatcatcaagtgcatagaagatattaagaggcctggagaatggtcaggtttggaaaaaaacaagaaggatggattcaagtcatctcagcttaataatccccagtttgtatgggtggtaccagctttgcgtcagctccatgaaattactcgctcattcataaaacaaacctatcaaaagcaagacaagagcattattcaagacttgaagaagaattttgaaatagtgaaattggtaacgggaagtttgatcgcttgtcatcggcttgcagctgctgtggccgggcctggaggcttaagtggctcgacactagtggatggccggtacacttaccgggagtatttagaggcacatctaaaatttctagcgtttttcttgcaagaagctactctgtatctgggctggaatcgtgccaaggagatctgggagtgtcttgtaactggccaggatgtttgtgaattagatagagagatgtgttttgaatggtttacaaaaggacagcatgatcttgagagtgatgttcagcagcagctcttcaaggagaaaattcttaaattggagtcatatgaaatcactatgaatggttttaacttatttaaaactttttttgaaaatgtgaatctttgtgatcatcgattgaaaagacaaggagctcagttgtatgtagaaaagctggaattgataggaatggatttcatttggaaaatagccatggaatcacctgatgaagaaattgctaatgaagctattcagctaatcataaactatagttacattaatctaaatcctagattaaagaaggattcagtatctttacataagaaattcattgctgattgctacacaagattagaagcagccagttcagcacttggtggccccactctaacacatgctgtgaccagagcaacaaaaatgcttacagcaactgccatgccaactgtagcaacctcagttcagtctccttatagatctactaaacttgtaataattgagagattgctgcttctggcagagcgctatgtgatcactatagaggatttttactctgttccacgaactattctacctcatggtgcctcatttcatggacatcttttaacccttaatgttacctatgagtctaccaaagataccttcactgtcgaggctcacagtaatgaaaccatagggagtgtccggtggaaaatagccaagcagttgtgctctcctgtggataatatacagatatttacaaatgatagcctgctgacagtgaataaagatcaaaagctactccaccaactgggcttttctgatgaacaaatccttacagtgaagacttctggcagtgggaccccatctgggagttcagcagattcttcaaccagctccagcagcagcagcagtggggtttttagttcttcatatgccatggagcaggagaaatccctccctggtgtagtgatggctctcgtatgtaacgtatttgacatgctttatcagctcgccaatctggaagagccaaggataactctacgagtacggaagcttctgctcttgatacccactgatccagccattcaggaagcccttgatcaacttgattctttaggaagaaagaaaacattgctgtctgaatcaagttctcagtcctcaaaatctccatccctgtcatcaaagcaacagcaccagccaagtgccagttcaattttagaaagtctgtttcgatcttttgccccgggaatgtctaccttcagagtgctctacaacttagaagttctaagctccaaactcatgccaacagctgatgatgacatggccagaagctgtgccaaatccttctgtgaaaacttcctcaaagctggcggtttgagtttggttgtaaatgtcatgcagagagactccatcccatcagaagtagactatgaaacaaggcagggtgtttattccatctgtctacagcttgcaagatttttacttgtcggacaaacaatgcccacgttattagatgaagacctcaccaaagatggtatagaagcactttcttcccgcccattccgaaatgtcagccggcagacaagcagacagatgtccttatgtggtaccccagaaaagtcatcctaccgacagttgtccgtgtctgataggtcttctattagggttgaggaaatcatccctgctgctcgagttgcaatacaaacaatggaagtaagtgatttcacttctactgtggcttgcttcatgagattgtcatgggctgcggctgcaggacggcttgatcttgttgggagtagccagccaattaaagaaagtaattccctgtgtcctgctggaattcgaaacagactcagcagttcaggaagcaattgcagctctggaagtgaaggagaaccagtagccctgcatgcgggaatctgtgttcgacaacagtctgtatccaccaaagactcgctgattgcgggagaggctttgtctcttcttgttacgtgcctacagcttcggagccagcaactggcatctttctataacttgccctgtgttgctgatttcatcattgatattctgctcggatcaccaagtgctgagattcgccgggttgcctgtgatcagctgtacactcttagtcagacagacacatcagcgcatccagatgtgcagaagccaaatcagtttcttctaggcgtaatcctcacggctcagctgcctctctggtctccaactagtattatgagaggagtcaatcagagactgttatctcagtgtatggagtattttgatttgagatgccagttattagatgatctgacaacttcagaaatggagcagttaaggatcagcccagctacgatgcttgaagatgagattacttggctggataactttgaacctaatcgtacagctgaatgtgagaccagtgaagcggacaacatcttactggcagggcacttacgcctcatcaagacccttctttcactctgtggggcagaaaaggaaatgcttggttcatcactcattaaaccattgttagatgacttccttttccgagcttctagaattattttaaatagtcattctccagctggcagtgccgccatcagtcaacaggactttcatccaaagtgtagtacagcgaatagccgattggcagcctatgaagtccttgtgatgttggctgatagttcaccttcaaatcttcaaattattataaaagaactgctttctatgcatcaccagcctgaccctgctcttaccaaggagtttgattaccttcccccagtggatagcaggtccagttcagggtttgtggggctgagaaatggtggtgcaacttgttatatgaatgcagtcttccagcagctgtatatgcaacctgggctccctgagtcattactttcagtggatgatgacacagacaatccagatgatagcgtgttttaccaagtgcagtctctctttggacatttaatggaaagcaagctgcagtactatgtacctgagaatttttggaagattttcaagatgtggaataaagaactttatgtgagagaacagcaggatgcatatgaattctttactagtctcattgatcagatggatgaatacctcaagaaaatggggagagaccaaatttttaagaatacatttcagggcatctactctgatcagaagatctgtaaagactgtcctcacagatatgagcgtgaagaagctttcatggctctcaatctaggagtgacttcttgtcagagtttggaaatttctttggaccaatttgttagaggagaagttctagaaggaagtaatgcgtactactgtgaaaagtgtaaagaaaagagaataacagtgaaaaggacctgtattaaatctttacctagcgtcttggtaattcacctaatgagatttgggtttgactgggaaagcggacgctccattaaatatgatgaacaaataaggtttccctggatgctaaacatggagccttacacagtttcaggaatggctcgccaagattcttcttctgaagttggggaaaatgggcgaagtgtggatcagggcggtggaggatccccacgaaaaaaggttgccctcacagaaaactatgaacttgtcggtgtcatcgtacacagtgggcaggcacacgcaggccactactattccttcattaaggacaggcgagggtgtggaaaaggaaagtggtataaatttaatgacacagttatagaagaatttgacctaaatgacgagaccctggagtatgaatgctttggaggagaatatagaccaaaagtttatgatcaaacaaacccatacactgatgtgcgccgaagatactggaatgcctatatgcttttctaccaaagggtgtctgatcagaactccccagtattaccaaagaaaagtcgagtcagcgttgtacggcaggaagctgaggatctctctctgtcagctccatcttcaccagaaatttcacctcagtcatcccctcggccccataggccgaacaatgaccggctgtctattcttaccaagctggttaaaaaaggcgagaagaaaggactgtttgtggagaaaatgcctgctcgaatataccagatggtgagagatgagaacctcaagtttatgaagaatagagatgtatacagtagtgattatttcagttttgttttgtctttagcttcattgaatgctactaaattaaagcatccatattatccttgcatggcaaaggtgagcttacagcttgctattcaattcctttttcaaacttatctacggacaaagaagaaactcagggttgatactgaagaatggattgctaccattgaagcattgctttcaaaaagttttgatgcttgtcagtggttagttgaatattttattagttctgaaggacgagaattgataaagattttcttactggagtgcaatgtgagagaagtacgagttgctgtggccaccattctggagaaaaccctagacagtgccttgttttatcaggataagttaaaaagccttcatcagttactggaggtactacttgctctgttggacaaagacgtcccagaaaattgtaaaaactgtgctcagtactttttcctgttcaacacttttgtacaaaagcaaggaattagggctggagatcttcttctgaggcattcagctctgcggcacatgatcagcttcctcctaggggccagtcggcaaaacaatcagatacgtcgatggagttcagcacaagcacgagaatttgggaatcttcacaatacagtggcgttacttgttttgcattcagatgtctcatcccaaaggaatgttgctcctggcatatttaagcaacgaccacccattagcattgctccctcaagccctctgttgcccctccatgaggaggtagaagccttgttgttcatgtctgaagggaaaccttacctgttagaggtaatgtttgctttgcgggagctgacaggctcgctcttggcactcattgagatggtagtgtactgctgtttctgtaatgagcatttttccttcacaatgctgcatttcattaagaaccaactagaaacggctccacctcatgagttaaagaatacgttccaactacttcatgaaatattggttattgaagatcctatacaagtagagcgagtcaaatttgtgtttgagacagaaaatggattactagctttgatgcaccacagtaatcatgtggacagtagtcgctgctaccagtgtgtcaaatttcttgtcactcttgctcaaaagtgtcctgcagctaaggagtacttcaaggagaattcccaccactggagctgggctgtgcagtggctacagaagaagatgtcagaacattactggacaccacagagtaatgtctctaatgaaacatcaactggaaaaacctttcagcgaaccatttcagctcaggacacgttagcgtatgccacagctttgttgaatgaaaaagagcaatcaggaagcagtaatgggtcggagagtagtcctgccaatgagaacggagacaggcatctacagcagggttcagaatctcccatgatgattggtgagttgagaagtgaccttgatgatgttgatccctagaggaacatgcccagcctgagaggagtcaagacacaatactggatgctcagcaccttcttggaatcagaatctcgaaccctttggaagagcctggagattggactgggaaagctgctgtgacttgggcggatcgtgtatttctcaaggaaagcatttttaagccactagaaggtttgggagctgtttggcagtgggagaactccggcatgtggatcagctgtcccgggagcgtggtctatatgtggattcacatttctgtggagattttcggaaatagagccagtggcagacttttttgttacacgaacatacaagagtgagcataaagctgttgctttctctacgatgctacaaaagaaattcctttggtttttatattttaagaaaaagcaagctgcttttagatatgtgggggcaaatttttaatcttgcagtaatattaaacaggaatatccaatttaaaatgatgtaaagatgtaataaaattccttttcattgtaaaatagtaattaagtcaatttacacagacctttgtatttaatatgtctccctatttgtatagaatttcagatgggtctagatgagaaccctatgcataagcttggatcttgatgaaaggttaccaggatcaggatcaaaaattgggaaatactaagctcttgaagatatttttctgatataattagattgaaaagagcaattttgaaaatgctgtgttctccagaagtacagggtgcattatttgacatcaattacttaaagaagttatgagttgttccccaaacagattttaaaaacagcaaaataaaagcactttaagatataattttactgagtttaacttcacagaattatctttttaatgcttggagacatattgaataaactgtagtcttaaatcatgtgatctgcaatcgtttgcttttgcttaaaacataattactgaaacccttggtattggttgtatatgaagttaactatttgagttggtacacactgcttgtgagtttcatagttattgtaatgcagagaaggaatttgagaatttgtttctcctcaacatgactaattaacactgaaaagtcagtcaaggtttaagatttattttcccagaaataaatataaagcaattgaataaccatccatttagtcgtatttccaaagtatagcaccattcactcatttataccagctcccttttatggtgtgggggagaggtttacacccacatatttcatatatattttgtacattttgtattttgaattgctcacattttcggccctgttttgcctttagttacaggtcctgccttattttcatctcaccatgcacagaactagggagccttaggaagtgccaggttttcactgtcagatttgccaagtcacagaggcgcagccagccctgaagtgcctgtctggctgctgtggcattgtgtgggcatgtggccaggcagatggcatctcattactgtgctctcgccatggcccagtcttttcattctctggcagtgagggtttctgtgctgtcagacttcattgttattctgtgacttgctggaggttggcagtggcctttgtcaaacacactgagaagatggaagggccagcacttaagagcagaactgtacccttagagaaacggacagaggcgagtggcaaacttcagacggttccaatggtcttgcagtttgaaatgtgatgttctaccattggttttgagtacgtgaatacttcctgtcctactgtttcccctaccctattctcaccttctctccgcccacatcctcaccaagagattgtgtgggacatgaccttgaaatgctggcgatgatccacactgggatatcatcgctggcgactgcactctcaggagcccaaaatcaggagtgaaattgccacttctagtccccttatttcctatggaaacaacgccttccgcacccctagcacctgccgtcctcactgtaaagcttcatcaggatcgtccaccgtgtatattatacgcttcagatcatgttgcttatattgttgctgcaatgaccatcgttttcactttgctggtaaccacttgattgctgacagctacagtcaatgaacctgctgatgactttttttaatgtagtacaacagtgacagttatgacaggcttaccttggaagagttgtcatttttactgccaattttttggatgaagatgtttttataaacctttcaaaatggtctgcaaacagagcaggaattgcacaattaactcaataatgctgtgtgttctcaagaagctcccttagtgaggccgatcttaagatggccgattctgcccgttgaaggcatcctgggaaagaaaacaagcatcccagcgggcatctcaccacgacttctcctggagtcctcacacggtcactgacaactacagtcagttttaggaactagagtgccgtatcatcagacttaccctgtcctgccccaccttccctgctaacatcgaggtgtgtgcagttaccttctgagcttggaacaagcagactggaattttcctctgctacctcttgtgtataaaatcttgtttataaaatttcaaaaggaagtagatacactagggaagaaccttaattctaaatttggttcatgtgtggcaaagttcttagcttctaagagtataaaataaatttttcaaaaacaga

SEQ ID NO: 197271 - DNA, 614 bp, Homo sapiens
  Payload ID: 18917
  Gene Name: ubiquitin specific peptidase 24
  ENST ID: ENST00000484447
  CDS Start-End: 1-453
gagcgagtcaaatttgtgtttgagacagaaaatggattactagctttgatgcaccacagtaatcatgtggacagtagtcgctgctaccagtgtgtcaaatttcttgtcactcttgctcaaaagtgtcctgcagctaaggagtacttcaaggagaattcccaccactggagctgggctgtgcagtggctacagaagaagatgtcagaacattactggacaccacagagtaatgtctctaatgaaacatcaactggaaaaacctttcagcgaaccatttcagctcaggacacgttagcgtatgccacagctttgttgaatgaaaaagagcaatcaggaagcagtaatgggtcggagagtagtcctgccaatgagaacggagacaggcatctacagcaggttactgaaagtccctcgtttgctctcaccagccttcctggaaatgtggactcttgaaagaaaagctcccgtgctcttgaagtatacctgcttgccaggggagtccaagaaaattttgacatgtatttttaaaaaaagaaaaaaaaacagctttaataccaatcattatagtagaaaaagaaaataaatatgtattgaacacccactgtgtgcaaaca

SEQ ID NO: 197272 - DNA, 370 bp, Homo sapiens
  Payload ID: 18917
  Gene Name: ubiquitin specific peptidase 24
  ENST ID: ENST00000634589
  CDS Start-End: 1-105
cctggagaatggtcaggtttggaaaaaaacaagaaggatggattcaaggcagcaaggtgggctgactggggattatgtctccctgccaggctacacagaaactaagcaaaggtcatctcagcttaataatccccagtttgtatgggtggtaccagctttgcgtcagctccatgaaattactcgctcattcataaaacaaacctatcaaaagcaagacaagagcattattcaagacttgaagaagaattttgaaatagtgaaattggtaacgggaagtttgatcgcttgtcatcggcttgcagctgctgtggccgggcctggaggcttaagtggctcgacactagtggatggccggtacacttaccgggag

SEQ ID NO: 197273 - DNA, 3973 bp, Homo sapiens
  Payload ID: 18918
  Gene Name: ubiquitin specific peptidase 25
  Uniprot ID: Q9UHP3
  ENST ID: ENST00000285679
  CDS Start-End: 370-3537
aagcagcccgcggaccggcagcaaaggaacgtgcgaacgcgtgacgccgcccgactggctcgcgctctcccgtgccccggcgtcctccgcccgctcatggcccgggccgccgcggacgagcggcgctgaggcgggccgcgtggagacgtgaggcggccgccgtggccctcacagtcggcgtttcgccgcctgcccgcggtgcccgcgcacgccggccgccatcgccttcgcgcctggctggcgggggcgctgtcctcccaggccgtccgcgccgctccctggagctcggcggagcgcggcagccagggccggcggaggcgcgaggagccgggcgccaccgccgccgccgccgccgccgccgcgggggccatgaccgtggagcagaacgtgctgcagcagagcgcggcgcagaagcaccagcagacgtttttgaatcaactgagagaaattacggggattaatgacacccagatactacagcaagccttgaaggatagtaatggaaacttggaattagcagtggctttccttactgcgaagaatgctaagacccctcagcaggaggagacaacttactaccaaacagcacttcctggcaatgatagatacatcagtgtgggaagccaagcagatacaaatgtgattgatctcactggagatgataaagatgatcttcagagagcaattgccttgagtttggccgaatcaaacagggcattcagggagactggaataactgatgaggaacaagccattagcagagttcttgaagccagcatagcagagaataaagcatgtttgaagaggacacctacagaagtttggagggattctcgaaacccttatgatagaaaaagacaggacaaagctcccgttgggctaaagaatgttggcaatacttgttggtttagtgctgttattcagtcattatttaatcttttggaatttagaagattagttctgaattacaagcctccatcaaatgctcaagatttaccccgaaaccaaaaggaacatcggaatttgccttttatgcgtgagctgaggtatctatttgcacttcttgttggtaccaaaaggaagtatgttgatccatcaagagcagttgaaattcttaaggatgctttcaaatcaaatgactcacagcagcaagatgtgagtgagtttacacacaaattattagattggttagaagatgccttccaaatgaaagctgaagaggagacggatgaagagaagccaaagaaccccatggtagagttgttctatggcagattcctggctgtgggagtacttgaaggtaaaaaatttgaaaacactgaaatgtttggtcagtacccacttcaggtcaatgggttcaaagatctgcatgagtgcctagaagctgcaatgattgaaggagaaattgagtctttacattcagagaattcaggaaaatcaggccaagagcattggtttactgaattaccacctgtgttaacatttgaattgtcaagatttgaatttaatcaggcattgggaagaccagaaaaaattcacaacaaattagaatttccccaagttttatatttggacagatacatgcacagaaacagagaaataacaagaattaagagggaagagatcaagagactgaaagattacctcacggtattacaacaaaggctagaaagatatttaagctatggttccggtcccaaacgattccccttggtagatgttcttcagtatgcattggaatttgcctcaagtaaacctgtttgcacttctcctgttgacgatattgacgctagttccccacctagtggttccataccatcacagacattaccaagcacaacagaacaacagggagccctatcttcagaactgccaagcacatcaccttcatcagttgctgccatttcatcgagatcagtaatacacaaaccatttactcagtcccggatacctccagatttgcccatgcatccggcaccaaggcacataacggaggaagaactttctgtgctggaaagttgtttacatcgctggaggacagaaatagaaaatgacaccagagatttgcaggaaagcatatccagaatccatcgaacaattgaattaatgtactctgacaaatctatgatacaagttccttatcgattacatgccgttttagttcacgaaggccaagctaatgctgggcactactgggcatatatttttgatcatcgtgaaagcagatggatgaagtacaatgatattgctgtgacaaaatcatcatgggaagagctagtgagggactcttttggtggttatagaaatgccagtgcatactgtttaatgtacataaatgataaggcacagttcctaatacaagaggagtttaataaagaaactgggcagccccttgttggtatagaaacattaccaccggatttgagagattttgttgaggaagacaaccaacgatttgaaaaagaactagaagaatgggatgcacaacttgcccagaaagctttgcaggaaaagcttttagcgtctcagaaattgagagagtcagagacttctgtgacaacagcacaagcagcaggagacccagaatatctagagcagccatcaagaagtgatttctcaaagcacttgaaagaagaaactattcaaataattaccaaggcatcacatgagcatgaagataaaagtcctgaaacagttttgcagtcggcaattaagttggaatatgcaaggttggttaagttggcccaagaagacaccccaccagaaaccgattatcgtttacatcatgtagtggtctactttatccagaaccaggcaccaaagaaaattattgagaaaacattactagaacaatttggagatagaaatttgagttttgatgaaaggtgtcacaacataatgaaagttgctcaagccaaactggaaatgataaaacctgaagaagtaaacttggaggaatatgaggagtggcatcaggattataggaaattcagggaaacaactatgtatctcataattgggctagaaaattttcaaagagaaagttatatagattccttgctgttcctcatctgtgcttatcagaataacaaagaactcttgtctaaaggcttatacagaggacatgatgaagaattgatatcacattatagaagagaatgtttgctaaaattaaatgagcaagccgcagaactcttcgaatctggagaggatcgagaagtaaacaatggtttgattatcatgaatgagtttattgtcccatttttgccattattactggtggatgaaatggaagaaaaggatatactagctgtagaagatatgagaaatcgatggtgttcctaccttggtcaagaaatggaaccacacctccaagaaaagctgacagattttttgccaaaactgcttgattgttctatggagattaaaagtttccatgagccaccgaagttaccttcatattccacgcatgaactctgtgagcgatttgcccgaatcatgttgtccctcagtcgaactcctgctgatggaagataaactgcacactttccctgaacacactgtataaactctttttagttcttaacccttgccttcctgtcacagggtttgcttgttgctgctatagtttttaacttttttttattttaataactgcaaaagacaaaatgactatacagactttagtcagactgcagacaataaagctgaaaatcgcatggcgctcagacattttaaccggaactgatgtataatcacaaatctaattgattttattatggcaaaactatgcttttgccaccttcctgttgcagtattactttgcttttatcttttctttctcaacagctttccattcagtctggatccttccatgactacagccatttaagtgttcagcactgtgtacgatacataatatttggtagcttgtaaatgaaataaagaataaagttttatttatggctaccta

SEQ ID NO: 197274 - DNA, 5216 bp, Homo sapiens
  Payload ID: 18918
  Gene Name: ubiquitin specific peptidase 25
  Uniprot ID: Q9UHP3
  ENST ID: ENST00000285681
  CDS Start-End: 370-3633
aagcagcccgcggaccggcagcaaaggaacgtgcgaacgcgtgacgccgcccgactggctcgcgctctcccgtgccccggcgtcctccgcccgctcatggcccgggccgccgcggacgagcggcgctgaggcgggccgcgtggagacgtgaggcggccgccgtggccctcacagtcggcgtttcgccgcctgcccgcggtgcccgcgcacgccggccgccatcgccttcgcgcctggctggcgggggcgctgtcctcccaggccgtccgcgccgctccctggagctcggcggagcgcggcagccagggccggcggaggcgcgaggagccgggcgccaccgccgccgccgccgccgccgccgcgggggccatgaccgtggagcagaacgtgctgcagcagagcgcggcgcagaagcaccagcagacgtttttgaatcaactgagagaaattacggggattaatgacacccagatactacagcaagccttgaaggatagtaatggaaacttggaattagcagtggctttccttactgcgaagaatgctaagacccctcagcaggaggagacaacttactaccaaacagcacttcctggcaatgatagatacatcagtgtgggaagccaagcagatacaaatgtgattgatctcactggagatgataaagatgatcttcagagagcaattgccttgagtttggccgaatcaaacagggcattcagggagactggaataactgatgaggaacaagccattagcagagttcttgaagccagcatagcagagaataaagcatgtttgaagaggacacctacagaagtttggagggattctcgaaacccttatgatagaaaaagacaggacaaagctcccgttgggctaaagaatgttggcaatacttgttggtttagtgctgttattcagtcattatttaatcttttggaatttagaagattagttctgaattacaagcctccatcaaatgctcaagatttaccccgaaaccaaaaggaacatcggaatttgccttttatgcgtgagctgaggtatctatttgcacttcttgttggtaccaaaaggaagtatgttgatccatcaagagcagttgaaattcttaaggatgctttcaaatcaaatgactcacagcagcaagatgtgagtgagtttacacacaaattattagattggttagaagatgccttccaaatgaaagctgaagaggagacggatgaagagaagccaaagaaccccatggtagagttgttctatggcagattcctggctgtgggagtacttgaaggtaaaaaatttgaaaacactgaaatgtttggtcagtacccacttcaggtcaatgggttcaaagatctgcatgagtgcctagaagctgcaatgattgaaggagaaattgagtctttacattcagagaattcaggaaaatcaggccaagagcattggtttactgaattaccacctgtgttaacatttgaattgtcaagatttgaatttaatcaggcattgggaagaccagaaaaaattcacaacaaattagaatttccccaagttttatatttggacagatacatgcacagaaacagagaaataacaagaattaagagggaagagatcaagagactgaaagattacctcacggtattacaacaaaggctagaaagatatttaagctatggttccggtcccaaacgattccccttggtagatgttcttcagtatgcattggaatttgcctcaagtaaacctgtttgcacttctcctgttgacgatattgacgctagttccccacctagtggttccataccatcacagacattaccaagcacaacagaacaacagggagccctatcttcagaactgccaagcacatcaccttcatcagttgctgccatttcatcgagatcagtaatacacaaaccatttactcagtcccggatacctccagatttgcccatgcatccggcaccaaggcacataacggaggaagaactttctgtgctggaaagttgtttacatcgctggaggacagaaatagaaaatgacaccagagatttgcaggaaagcatatccagaatccatcgaacaattgaattaatgtactctgacaaatctatgatacaagttccttatcgattacatgccgttttagttcacgaaggccaagctaatgctgggcactactgggcatatatttttgatcatcgtgaaagcagatggatgaagtacaatgatattgctgtgacaaaatcatcatgggaagagctagtgagggactcttttggtggttatagaaatgccagtgcatactgtttaatgtacataaatgataaggcacagttcctaatacaagaggagtttaataaagaaactgggcagccccttgttggtatagaaacattaccaccggatttgagagattttgttgaggaagacaaccaacgatttgaaaaagaactagaagaatgggatgcacaacttgcccagaaagctttgcaggaaaagcttttagcgtctcagaaattgagagagtcagagacttctgtgacaacagcacaagcagcaggagacccagaatatctagagcagccatcaagaagtgatttctcaaagcacttgaaagaagaaactattcaaataattaccaaggcatcacatgagcatgaagataaaagtcctgaaacagttttgcagtcgatcatgatgacaccgaacatgcaaggtattatcatggcgataggtaaatccaggagtgtatatgacaggtgtggccctgaagcagggttctttaaggcaattaagttggaatatgcaaggttggttaagttggcccaagaagacaccccaccagaaaccgattatcgtttacatcatgtagtggtctactttatccagaaccaggcaccaaagaaaattattgagaaaacattactagaacaatttggagatagaaatttgagttttgatgaaaggtgtcacaacataatgaaagttgctcaagccaaactggaaatgataaaacctgaagaagtaaacttggaggaatatgaggagtggcatcaggattataggaaattcagggaaacaactatgtatctcataattgggctagaaaattttcaaagagaaagttatatagattccttgctgttcctcatctgtgcttatcagaataacaaagaactcttgtctaaaggcttatacagaggacatgatgaagaattgatatcacattatagaagagaatgtttgctaaaattaaatgagcaagccgcagaactcttcgaatctggagaggatcgagaagtaaacaatggtttgattatcatgaatgagtttattgtcccatttttgccattattactggtggatgaaatggaagaaaaggatatactagctgtagaagatatgagaaatcgatggtgttcctaccttggtcaagaaatggaaccacacctccaagaaaagctgacagattttttgccaaaactgcttgattgttctatggagattaaaagtttccatgagccaccgaagttaccttcatattccacgcatgaactctgtgagcgatttgcccgaatcatgttgtccctcagtcgaactcctgctgatggaagataaactgcacactttccctgaacacactgtataaactctttttagttcttaacccttgccttcctgtcacagggtttgcttgttgctgctatagtttttaacttttttttattttaataactgcaaaagacaaaatgactatacagactttagtcagactgcagacaataaagctgaaaatcgcatggcgctcagacattttaaccggaactgatgtataatcacaaatctaattgattttattatggcaaaactatgcttttgccaccttcctgttgcagtattactttgcttttatcttttctttctcaacagctttccattcagtctggatccttccatgactacagccatttaagtgttcagcactgtgtacgatacataatatttggtagcttgtaaatgaaataaagaataaagttttatttatggctacctatgtgtttgtaagcaggtatattgtatattagtgtattagtaatactagataaatgaattttgtctggggattaagattggatagttaatagattaatacaatcttttaattctgctctaatgctagcaaattggaaaatgtttaagtctttgacacttaaatttatctatatttttaacaaagttcttgaacttagtatggcaccggaacctgttttgaattcagtcaggtttttactcaagtaagtggttgattttttttaagtcaaactacactgaaacttttatccttttcttagattaatcttactttttaaatgtatttacaatatacagcaaggtgattatttcaagagaatcccaaagtacttgaataagggctattgtaaaatttaaaagaaatatttatatatacacatatatacacatacacacatgtatatatatattcttcataatggaggacaatgttttgcaatatataaatcattctatttttgtaaattgtatatcactttaattgaaaatgttctctactaattaatactgtgaaacaaaattgatgttgtttaactagaagttatgagtatcttaactgcctttattccttttcaaaaaggaaaaagctgtagaacattttgtagatgaaactactgtttaagattaatgaattaatattgtgaatgaaaatcaaaatccatactttaaaggtaatcatgttactaacaacctatttttgaattcataaaaatttctttataaatgatgttttgtgaacatagtaaaatagaccattatactatgtgtatgtttgatacagcgtcgccaaaactagtgttctttattagtgcctctcacaaaagatcctggatggaggagtaagatgaaatattatgctattatatgatgctgtttgtaaaggtattaatgtactagtaaggtgttaatgacaaggaattagtactattcctgttgtaaagttagattttgcatattgtatctatcaaaatatgtttgggtttagattttaagttgtctactgagcagatttctgcattggttttccagtcctgttaaaagtttagaaacttcatatgtgtcatcacagcttttgtaaagaaagtatccttaatattttatgacattct

SEQ ID NO: 197275 - DNA, 2158 bp, Homo sapiens
  Payload ID: 18918
  Gene Name: ubiquitin specific peptidase 25
  ENST ID: ENST00000351097
  CDS Start-End: 370-1722
aagcagcccgcggaccggcagcaaaggaacgtgcgaacgcgtgacgccgcccgactggctcgcgctctcccgtgccccggcgtcctccgcccgctcatggcccgggccgccgcggacgagcggcgctgaggcgggccgcgtggagacgtgaggcggccgccgtggccctcacagtcggcgtttcgccgcctgcccgcggtgcccgcgcacgccggccgccatcgccttcgcgcctggctggcgggggcgctgtcctcccaggccgtccgcgccgctccctggagctcggcggagcgcggcagccagggccggcggaggcgcgaggagccgggcgccaccgccgccgccgccgccgccgccgcgggggccatgaccgtggagcagaacgtgctgcagcagagcgcggcgcagaagcaccagcagacgtttttgaatcaactgagagaaattacggggattaatgacacccagatactacagcaagccttgaaggatagtaatggaaacttggaattagcagtggctttccttactgcgaagaatgctaagacccctcagcaggaggagacaacttactaccaaacagcacttcctggcaatgatagatacatcagtgtgggaagccaagcagatacaaatgtgattgatctcactggagatgataaagatgatcttcagagagcaattgccttgagtttggccgaatcaaacagggcattcagggagactggaataactgatgaggaacaagccattagcagagttcttgaagccagcatagcagagaataaagcatgtttgaagaggacacctacagaagtttggagggattctcgaaacccttatgatagaaaaagacaggacaaagctcccgttgggctaaagaatgttggcaatacttgttggtttagtgctgttattcagtcattatttaatcttttggaatttagaagattagttctgaattacaagcctccatcaaatgctcaagatttaccccgaaaccaaaaggaacatcggaatttgccttttatgcgtgagctgaggtatctatttgcacttcttgttggtaccaaaaggaagtatgttgatccatcaagagcagttgaaattcttaaggatgctttcaaatcaaatgactcacagcaggagtggcatcaggattataggaaattcagggaaacaactatgtatctcataattgggctagaaaattttcaaagagaaagttatatagattccttgctgttcctcatctgtgcttatcagaataacaaagaactcttgtctaaaggcttatacagaggacatgatgaagaattgatatcacattatagaagagaatgtttgctaaaattaaatgagcaagccgcagaactcttcgaatctggagaggatcgagaagtaaacaatggtttgattatcatgaatgagtttattgtcccatttttgccattattactggtggatgaaatggaagaaaaggatatactagctgtagaagatatgagaaatcgatggtgttcctaccttggtcaagaaatggaaccacacctccaagaaaagctgacagattttttgccaaaactgcttgattgttctatggagattaaaagtttccatgagccaccgaagttaccttcatattccacgcatgaactctgtgagcgatttgcccgaatcatgttgtccctcagtcgaactcctgctgatggaagataaactgcacactttccctgaacacactgtataaactctttttagttcttaacccttgccttcctgtcacagggtttgcttgttgctgctatagtttttaacttttttttattttaataactgcaaaagacaaaatgactatacagactttagtcagactgcagacaataaagctgaaaatcgcatggcgctcagacattttaaccggaactgatgtataatcacaaatctaattgattttattatggcaaaactatgcttttgccaccttcctgttgcagtattactttgcttttatcttttctttctcaacagctttccattcagtctggatccttccatgactacagccatttaagtgttcagcactgtgtacgatacataatatttggtagcttgtaaatgaaataaagaataaagttttatttatggctaccta

SEQ ID NO: 197276 - DNA, 5341 bp, Homo sapiens
  Payload ID: 18918
  Gene Name: ubiquitin specific peptidase 25
  Uniprot ID: Q9UHP3
  ENST ID: ENST00000400183
  CDS Start-End: 370-3747
aagcagcccgcggaccggcagcaaaggaacgtgcgaacgcgtgacgccgcccgactggctcgcgctctcccgtgccccggcgtcctccgcccgctcatggcccgggccgccgcggacgagcggcgctgaggcgggccgcgtggagacgtgaggcggccgccgtggccctcacagtcggcgtttcgccgcctgcccgcggtgcccgcgcacgccggccgccatcgccttcgcgcctggctggcgggggcgctgtcctcccaggccgtccgcgccgctccctggagctcggcggagcgcggcagccagggccggcggaggcgcgaggagccgggcgccaccgccgccgccgccgccgccgccgcgggggccatgaccgtggagcagaacgtgctgcagcagagcgcggcgcagaagcaccagcagacgtttttgaatcaactgagagaaattacggggattaatgacacccagatactacagcaagccttgaaggatagtaatggaaacttggaattagcagtggctttccttactgcgaagaatgctaagacccctcagcaggaggagacaacttactaccaaacagcacttcctggcaatgatagatacatcagtgtgggaagccaagcagatacaaatgtgattgatctcactggagatgataaagatgatcttcagagagcaattgccttgagtttggccgaatcaaacagggcattcagggagactggaataactgatgaggaacaagccattagcagagttcttgaagccagcatagcagagaataaagcatgtttgaagaggacacctacagaagtttggagggattctcgaaacccttatgatagaaaaagacaggacaaagctcccgttgggctaaagaatgttggcaatacttgttggtttagtgctgttattcagtcattatttaatcttttggaatttagaagattagttctgaattacaagcctccatcaaatgctcaagatttaccccgaaaccaaaaggaacatcggaatttgccttttatgcgtgagctgaggtatctatttgcacttcttgttggtaccaaaaggaagtatgttgatccatcaagagcagttgaaattcttaaggatgctttcaaatcaaatgactcacagcagcaagatgtgagtgagtttacacacaaattattagattggttagaagatgccttccaaatgaaagctgaagaggagacggatgaagagaagccaaagaaccccatggtagagttgttctatggcagattcctggctgtgggagtacttgaaggtaaaaaatttgaaaacactgaaatgtttggtcagtacccacttcaggtcaatgggttcaaagatctgcatgagtgcctagaagctgcaatgattgaaggagaaattgagtctttacattcagagaattcaggaaaatcaggccaagagcattggtttactgaattaccacctgtgttaacatttgaattgtcaagatttgaatttaatcaggcattgggaagaccagaaaaaattcacaacaaattagaatttccccaagttttatatttggacagatacatgcacagaaacagagaaataacaagaattaagagggaagagatcaagagactgaaagattacctcacggtattacaacaaaggctagaaagatatttaagctatggttccggtcccaaacgattccccttggtagatgttcttcagtatgcattggaatttgcctcaagtaaacctgtttgcacttctcctgttgacgatattgacgctagttccccacctagtggttccataccatcacagacattaccaagcacaacagaacaacagggagccctatcttcagaactgccaagcacatcaccttcatcagttgctgccatttcatcgagatcagtaatacacaaaccatttactcagtcccggatacctccagatttgcccatgcatccggcaccaaggcacataacggaggaagaactttctgtgctggaaagttgtttacatcgctggaggacagaaatagaaaatgacaccagagatttgcaggaaagcatatccagaatccatcgaacaattgaattaatgtactctgacaaatctatgatacaagttccttatcgattacatgccgttttagttcacgaaggccaagctaatgctgggcactactgggcatatatttttgatcatcgtgaaagcagatggatgaagtacaatgatattgctgtgacaaaatcatcatgggaagagctagtgagggactcttttggtggttatagaaatgccagtgcatactgtttaatgtacataaatgataaggcacagttcctaatacaagaggagtttaataaagaaactgggcagccccttgttggtatagaaacattaccaccggatttgagagattttgttgaggaagacaaccaacgatttgaaaaagaactagaagaatgggatgcacaacttgcccagaaagctttgcaggaaaagcttttagcgtctcagaaattgagagagtcagagacttctgtgacaacagcacaagcagcaggagacccagaatatctagagcagccatcaagaagtgatttctcaaagcacttgaaagaagaaactattcaaataattaccaaggcatcacatgagcatgaagataaaagtcctgaaacagttttgcagtcgaaacctgaaaatactacaagccaaccactttctaatcagcgagttgtagaggtggcgatccctcatgtagggaaatttatgattgaatcaaaggagggggggtatgatgacgagatcatgatgacaccgaacatgcaaggtattatcatggcgataggtaaatccaggagtgtatatgacaggtgtggccctgaagcagggttctttaaggcaattaagttggaatatgcaaggttggttaagttggcccaagaagacaccccaccagaaaccgattatcgtttacatcatgtagtggtctactttatccagaaccaggcaccaaagaaaattattgagaaaacattactagaacaatttggagatagaaatttgagttttgatgaaaggtgtcacaacataatgaaagttgctcaagccaaactggaaatgataaaacctgaagaagtaaacttggaggaatatgaggagtggcatcaggattataggaaattcagggaaacaactatgtatctcataattgggctagaaaattttcaaagagaaagttatatagattccttgctgttcctcatctgtgcttatcagaataacaaagaactcttgtctaaaggcttatacagaggacatgatgaagaattgatatcacattatagaagagaatgtttgctaaaattaaatgagcaagccgcagaactcttcgaatctggagaggatcgagaagtaaacaatggtttgattatcatgaatgagtttattgtcccatttttgccattattactggtggatgaaatggaagaaaaggatatactagctgtagaagatatgagaaatcgatggtgttcctaccttggtcaagaaatggaaccacacctccaagaaaagctgacagattttttgccaaaactgcttgattgttctatggagattaaaagtttccatgagccaccgaagttaccttcatattccacgcatgaactctgtgagcgatttgcccgaatcatgttgtccctcagtcgaactcctgctgatggaagataaactgcacactttccctgaacacactgtataaactctttttagttcttaacccttgccttcctgtcacagggtttgcttgttgctgctatagtttttaacttttttttattttaataactgcaaaagacaaaatgactatacagactttagtcagactgcagacaataaagctgaaaatcgcatggcgctcagacattttaaccggaactgatgtataatcacaaatctaattgattttattatggcaaaactatgcttttgccaccttcctgttgcagtattactttgcttttatcttttctttctcaacagctttccattcagtctggatccttccatgactacagccatttaagtgttcagcactgtgtacgatacataatatttggtagcttgtaaatgaaataaagaataaagttttatttatggctacctatgtgtttgtaagcaggtatattgtatattagtgtattagtaatactagataaatgaattttgtctggggattaagattggatagttaatagattaatacaatcttttaattctgctctaatgctagcaaattggaaaatgtttaagtctttgacacttaaatttatctatatttttaacaaagttcttgaacttagtatggcaccggaacctgttttgaattcagtcaggtttttactcaagtaagtggttgattttttttaagtcaaactacactgaaacttttatccttttcttagattaatcttactttttaaatgtatttacaatatacagcaaggtgattatttcaagagaatcccaaagtacttgaataagggctattgtaaaatttaaaagaaatatttatatatacacatatatacacatacacacatgtatatatatattcttcataatggaggacaatgttttgcaatatataaatcattctatttttgtaaattgtatatcactttaattgaaaatgttctctactaattaatactgtgaaacaaaattgatgttgtttaactagaagttatgagtatcttaactgcctttattccttttcaaaaaggaaaaagctgtagaacattttgtagatgaaactactgtttaagattaatgaattaatattgtgaatgaaaatcaaaatccatactttaaaggtaatcatgttactaacaacctatttttgaattcataaaaatttctttataaatgatgttttgtgaacatagtaaaatagaccattatactatgtgtatgtttgatacagcgtcgccaaaactagtgttctttattagtgcctctcacaaaagatcctggatggaggagtaagatgaaatattatgctattatatgatgctgtttgtaaaggtattaatgtactagtaaggtgttaatgacaaggaattagtactattcctgttgtaaagttagattttgcatattgtatctatcaaaatatgtttgggtttagattttaagttgtctactgagcagatttctgcattggttttccagtcctgttaaaagtttagaaacttcatatgtgtcatcacagcttttgtaaagaaagtatccttaatattttatgacattctaccacagtggt

SEQ ID NO: 197277 - DNA, 687 bp, Homo sapiens
  Payload ID: 18918
  Gene Name: ubiquitin specific peptidase 25
  ENST ID: ENST00000449491
  CDS Start-End: 1-687
gtcctgaaacagttttgcagtcgaaacctgaaaatactacaagccaaccactttctaatcagcgagttgtagaggtggcgatccctcatgtagggaaatttatgattgaatcaaaggagggggggtatgatgacgagatcatgatgacaccgaacatgcaaggtattatcatggcgataggtaaatccaggagtgtatatgacaggtgtggccctgaagcagggttctttaaggcaattaagttggaatatgcaaggttggttaagttggcccaagaagacaccccaccagaaaccgattatcgtttacatcatgtagtggtctactttatccagaaccaggcaccaaagaaaattattgagaaaacattactagaacaatttggagatagaaatttgagttttgatgaaaggtgtcacaacataatgaaagttgctcaagccaaactggaaatgataaaacctgaagaagtaaacttggaggaatatgaggagtggcatcaggattataggaaattcagggaaacaactatgtatctcataattgggctagaaaattttcaaagagaaagttatatagattccttgctgttcctcatctgtgcttatcagaataacaaagaactcttgtctaaaggcttatacagaggacatgatgaagaattgatatcacattatagaagagaat

SEQ ID NO: 197278 - DNA, 611 bp, Homo sapiens
  Payload ID: 18918
  Gene Name: ubiquitin specific peptidase 25
  ENST ID: ENST00000453553
  CDS Start-End: 1-611
agatcaagagactgaaagattacctcacggtattacaacaaaggctagaaagcacaacagaacaacagggagccctatcttcagaactgccaagcacatcaccttcatcagttgctgccatttcatcgagatcagtaatacacaaaccatttactcagtcccggatacctccagatttgcccatgcatccggcaccaaggcacataacggaggaagaactttctgtgctggaaagttgtttacatcgctggaggacagaaatagaaaatgacaccagagatttgcaggaaagcatatccagaatccatcgaacaattgaattaatgtactctgacaaatctatgatacaagttccttatcgattacatgccgttttagttcacgaaggccaagctaatgctgggcactactgggcatatatttttgatcatcgtgaaagcagatggatgaagtacaatgatattgctgtgacaaaatcatcatgggaagagctagtgagggactcttttggtggttatagaaatgccagtgcatactgtttaatgtacataaatgataaggcacagttcctaatacaagaggagtttaataaagaaactgggcagcccctt

SEQ ID NO: 197279 - DNA, 3642 bp, Homo sapiens
  Payload ID: 18919
  Gene Name: ubiquitin specific peptidase 26
  Uniprot ID: Q9BXU7
  ENST ID: ENST00000370832
  CDS Start-End: 53-2794
cttcaagattatcaataatcggagatacgtatattttatttgtaaagaaaacatggctgccctattcctacgtggttttgtccaaatagggaactgcaagactgggatatctaagtcaaaagaagcattcattgaagcagtggaaagaaagaagaaagatagactggtgctgtatttcaaaagtggaaaatatagcacttttcggctaagtgataatattcaaaatgtagtccttaaatcctatagaggaaaccaaaatcacctgcatttaactttacaaaataataatggcttgtttattgaaggattatcctccacagatgctgaacaattgaagatattcttggacagagttcatcaaaacgaggttcagccacctgtgagacctggtaagggtgggagtgtcttttctagcacaacacagaaggaaatcaacaaaacttcattccacaaagttgatgagaaatcaagtagcaaatcttttgagatagcaaaaggaagtgggacaggtgtccttcagaggatgcctttgcttacatcaaaattgacacttacttgcggagagttatcagaaaatcagcacaagaagaggaaaagaatgctctcatctagctcagagatgaatgaggaattcttgaaagaaaataattctgtagaatacaagaaatccaaggcagattgttcgaggtgtgtaagctataatcgagagaaacaattgaagttaaaagagttagaagagaataagaaattggaatgtgaatcttcatgcatcatgaacgccactggaaatccttacctagatgacattggtcttctccaagctctcactgagaaaatggttttggtatttctgttacaacaagggtatagtgacggttacacaaagtgggataaattaaaactattttttgaattatttccagagaaaatatgccacggcctccccaatttgggaaacacctgttatatgaatgcagtgttacagtctctactttcaatcccatcgtttgctgatgatttacttaatcagagtttcccatggggtaaaattccccttaatgctcttaccatgtgcttggcacggctacttttttttaaagatacctataatatagaaatcaaggagatgttactcttgaatcttaaaaaggccatttcagcagctgcagagatattccatggcaatgcacagaacgatgctcatgagtttttagctcactgtttagatcaactgaaagataacatggaaaaactcaacacaatttggaagcctaaaagtgaatttggggaagataattttcctaaacaggtttttgctgatgatcctgacaccagtgggttttcttgccctgtcattactaattttgagttagagttgttgcactccattgcttgtaaagcttgtggtcaggttattctcaagacagaactgaataattacctctccatcaaccttccccaaagaataaaagcacatccttcatctattcagtctacttttgatcttttttttggagcagaagagcttgagtataaatgtgcaaaatgtgagcacaagacttccgttggagtgcactcattcagtaggctacctagaatccttattgttcacctcaaacgctatagcttgaatgagttttgtgcattaaagaagaatgaccaggaagtcatcatttccaaatatttaaaggtgtcttctcattgcaatgaaggcaccagaccacctcttcccttgagtgaggatggagaaattacagatttccaattattaaaagttattcgaaagatgacttctggaaacatcagtgtatcatggcctgcaacaaaggaatccaaagatatcctggctccacacattggatcagataaggagtctgaacaaaaaaaaggccagacagtctttaaaggggcaagcagaagacagcagcaaaagtaccttggaaaaaattctaaaccaaatgagctagaatctgtatactcaggagatcgagcattcattgaaaaagaaccgttagctcacttaatgacgtatctggaagatacctcactttgtcagttccacaaagctggaggtaaacctgccagcagcccaggcacacctctctcaaaagttgactttcaaacagtgcccgaaaatccaaaacgaaagaaatatgtgaaaaccagtaagtttgtagcttttgataggattatcaatcctactaaagatttgtatgaagataaaaatatcagaattccagaaagattccaaaaagtgtctgaacagactcagcagtgtgacggtatgagaatctgtgaacaagcccctcagcaggcactgcctcaaagctttccaaagccaggcacccaggggcacacaaagaacctcctaagacctacaaaattaaatctacagaagtctaacaggaattccctacttgcactgggttccaataagaatccaagaaacaaagacattttagataagataaaatctaaagccaaggaaacaaaaagaaatgatgataagggagatcatacctaccggctcattagtgttgtcagccatcttgggaagactctaaagtcaggccattatatctgtgatgcctatgactttgagaaacagatctggttcacttacgatgatatgcgggtgttaggtatccaggaggcccagatgcaggaggataggcgttgcactgggtacatcttcttttacatgcataatgagatctttgaagagatgttgaaaagagaagagaatgcccagcttaatagcaaggaggtagaggagacccttcagaaggaataagaggaacgtactcctccttgtacagatctgcctgactgtctcactcgataccacttcctccatggaaggaaaactgtgaactttatccagagatgaaaatgcaattagtctaggaccaaaggtcaaacagaaacacttaatggggagatctgcattctaatcctgacacagacacctcaatcccatagctctggctgatgagcatccttctctcctacaagactgaaattgtgtttttcatgttcttcttcattttaatatagtcagggtcttgctctgtcatcctggctagagtgcagtccttcaataataactcactgcagcctcaaactcctggcatcaagcgattctctctcagcctcctgaaaagagagggacttatcttcttgcttgagatgggactatagatgtgtgccaccaggcctagctatttttttttttttttttgctttttgcagagacagggtctcactatgctgcccaggttggacttgaactcctggcctcaagcaatcttcctgcctctttccatgttctaatacagtggtttaaaaagtatgctccttaaactagcagcaccaggagcatgggggtagtcatttgaaatgcaaaatcttgggttccactgtagacctactgattcagaaacttggggtaagggatagcaatctgatggagaccgtgatgcttgatacagtttgagaaccactactgtactacatacactaccttggttgtatatttaaattgcttattttgtaaaaggttttgattacatttttgtgtttttcatattaatgtatgccttgcctttgtgaacttattaaaagccaaactcacaaaaatca

SEQ ID NO: 197280 - DNA, 3665 bp, Homo sapiens
  Payload ID: 18919
  Gene Name: ubiquitin specific peptidase 26
  Uniprot ID: Q9BXU7
  ENST ID: ENST00000511190
  CDS Start-End: 471-3212
attttgttttcgatcgttaagtgggcacgtggtggagcgttggtgtgtcaggggtgtcgacttcttccacaaactatttaagagacagcagcaggagggactggactggattgtagaaaacttcaagagttaaggagtgcggagtgctgctcaggtgcctttgtttcaggtcatagtctctgttctatatagcagccaaccacaagggttgattgagtctcactctgttacccaagctggagtgtagtgatgcaatcacagctcactgcagccttgacctcctgaactcaagtgatcctcccacctcagcctcctaactggggctacagattccctgtttctgctttaacctgggctgcttgctaagtgcttgcctctcaggatccttgtggagctgaacttgcaaaacagattggaacttcaagattatcaataatcggagatacgtatattttatttgtaaagaaaacatggctgccctattcctacgtggttttgtccaaatagggaactgcaagactgggatatctaagtcaaaagaagcattcattgaagcagtggaaagaaagaagaaagatagactggtgctgtatttcaaaagtggaaaatatagcacttttcggctaagtgataatattcaaaatgtagtccttaaatcctatagaggaaaccaaaatcacctgcatttaactttacaaaataataatggcttgtttattgaaggattatcctccacagatgctgaacaattgaagatattcttggacagagttcatcaaaacgaggttcagccacctgtgagacctggtaagggtgggagtgtcttttctagcacaacacagaaggaaatcaacaaaacttcattccacaaagttgatgagaaatcaagtagcaaatcttttgagatagcaaaaggaagtgggacaggtgtccttcagaggatgcctttgcttacatcaaaattgacacttacttgcggagagttatcagaaaatcagcacaagaagaggaaaagaatgctctcatctagctcagagatgaatgaggaattcttgaaagaaaataattctgtagaatacaagaaatccaaggcagattgttcgaggtgtgtaagctataatcgagagaaacaattgaagttaaaagagttagaagagaataagaaattggaatgtgaatcttcatgcatcatgaacgccactggaaatccttacctagatgacattggtcttctccaagctctcactgagaaaatggttttggtatttctgttacaacaagggtatagtgacggttacacaaagtgggataaattaaaactattttttgaattatttccagagaaaatatgccacggcctccccaatttgggaaacacctgttatatgaatgcagtgttacagtctctactttcaatcccatcgtttgctgatgatttacttaatcagagtttcccatggggtaaaattccccttaatgctcttaccatgtgcttggcacggctacttttttttaaagatacctataatatagaaatcaaggagatgttactcttgaatcttaaaaaggccatttcagcagctgcagagatattccatggcaatgcacagaacgatgctcatgagtttttagctcactgtttagatcaactgaaagataacatggaaaaactcaacacaatttggaagcctaaaagtgaatttggggaagataattttcctaaacaggtttttgctgatgatcctgacaccagtgggttttcttgccctgtcattactaattttgagttagagttgttgcactccattgcttgtaaagcttgtggtcaggttattctcaagacagaactgaataattacctctccatcaaccttccccaaagaataaaagcacatccttcatctattcagtctacttttgatcttttttttggagcagaagagcttgagtataaatgtgcaaaatgtgagcacaagacttccgttggagtgcactcattcagtaggctacctagaatccttattgttcacctcaaacgctatagcttgaatgagttttgtgcattaaagaagaatgaccaggaagtcatcatttccaaatatttaaaggtgtcttctcattgcaatgaaggcaccagaccacctcttcccttgagtgaggatggagaaattacagatttccaattattaaaagttattcgaaagatgacttctggaaacatcagtgtatcatggcctgcaacaaaggaatccaaagatatcctggctccacacattggatcagataaggagtctgaacaaaaaaaaggccagacagtctttaaaggggcaagcagaagacagcagcaaaagtaccttggaaaaaattctaaaccaaatgagctagaatctgtatactcaggagatcgagcattcattgaaaaagaaccgttagctcacttaatgacgtatctggaagatacctcactttgtcagttccacaaagctggaggtaaacctgccagcagcccaggcacacctctctcaaaagttgactttcaaacagtgcccgaaaatccaaaacgaaagaaatatgtgaaaaccagtaagtttgtagcttttgataggattatcaatcctactaaagatttgtatgaagataaaaatatcagaattccagaaagattccaaaaagtgtctgaacagactcagcagtgtgacggtatgagaatctgtgaacaagcccctcagcaggcactgcctcaaagctttccaaagccaggcacccaggggcacacaaagaacctcctaagacctacaaaattaaatctacagaagtctaacaggaattccctacttgcactgggttccaataagaatccaagaaacaaagacattttagataagataaaatctaaagccaaggaaacaaaaagaaatgatgataagggagatcatacctaccggctcattagtgttgtcagccatcttgggaagactctaaagtcaggccattatatctgtgatgcctatgactttgagaaacagatctggttcacttacgatgatatgcgggtgttaggtatccaggaggcccagatgcaggaggataggcgttgcactgggtacatcttcttttacatgcataatgagatctttgaagagatgttgaaaagagaagagaatgcccagcttaatagcaaggaggtagaggagacccttcagaaggaataagaggaacgtactcctccttgtacagatctgcctgactgtctcactcgataccacttcctccatggaaggaaaactgtgaactttatccagagatgaaaatgcaattagtctaggaccaaaggtcaaacagaaacacttaatggggagatctgcattctaatcctgacacagacacctcaatcccatagctctggctgatgagcatccttctctcctacaagactgaaattgtgtttttcatgttcttcttcattttaatatagtcagggtcttgctctgtcatcctggctagagtgcagtccttcaataataactcactgcagcctcaaactcctggcatcaagcgattctctctcagcctcctgaaaagagagggacttatcttcttgcttgagatgggactatagatgtgtgccaccaggcctagctatttttttttttttttttgctttt

SEQ ID NO: 197281 - DNA, 2618 bp, Homo sapiens
  Payload ID: 18920
  Gene Name: ubiquitin specific peptidase 27, X-linked
  Uniprot ID: A6NNY8
  ENST ID: ENST00000621775
  CDS Start-End: 361-1677
ccccggcccccgccccggccccggccccggcgcggccctgggggcggatgcctggatgtggattttgccgtggggccaccaggctgttctcacgtgaacagctttaaggtgggagagaactggaggcaggaactgcgggttatctaccagtgcttcgtgtggtgtggaaccccagagaccaggaaaagcaaggcaaagtcctgcatctgccatgtgtgtggcacccatctgaacagactccactcttgcctttcctgtgtcttctttggctgcttcacggagaaacacattcacgagcacgcagagacgaaacaacacaacttagcagtagacctgtattacggaggtatatactgctttatgtgtaaggactatgtatatgacaaagacattgagcaaattgccaaagaagagcaaggagaagctttgaaattacaagcctccacctcaacagaggtttctcaccagcagtgttcagtgccaggccttggtgagaaattcccaacctgggaaacaaccaaaccagaattagaactgctggggcacaacccgaggagaagaagaatcacctccagctttacgatcggtttaagaggactcatcaatcttggcaacacgtgctttatgaactgcattgtccaggccctcacccacacgccgatactgagagatttctttctctctgacaggcaccgatgtgagatgccgagtcccgagttgtgtctggtctgtgagatgtcgtcgctgtttcgggagttgtattctggaaacccgtctcctcatgtgccctataagttactgcacctggtgtggatacatgcccgccatttagcagggtacaggcaacaggatgcccacgagttcctcattgcagcgttagatgtcctgcacaggcactgcaaaggtgatgatgtcgggaaggcggccaacaatcccaaccactgtaactgcatcatagaccaaatcttcacaggtggcctgcagtctgatgtcacctgtcaagcctgccatggcgtctccaccacgatagacccatgctgggacattagtttggacttgcctggctcttgcacctccttctggcccatgagcccagggagggagagcagtgtgaacggggaaagccacataccaggaatcaccaccctcacggactgcttgcggaggtttacgaggccagagcacttaggaagcagtgccaaaatcaaatgtggtagttgccaaagctaccaggaatctaccaaacagctcacaatgaataaattacctgtcgttgcctgttttcatttcaaacggtttgaacattcagcgaaacagaggcgcaagatcactacatacatttcctttcctctggagctggatatgacgccgtttatggcctcaagtaaagagagcagaatgaatggacaattgcagctgccaaccaatagtggaaacaacgaaaataagtattccttgtttgctgtggttaatcaccaaggaaccttggagagtggccactataccagcttcatccggcaccacaaggaccagtggttcaagtgtgatgatgccgtcatcactaaggccagtattaaggacgtactggacagtgaagggtatttactgttctatcacaaacaggtgctagaacatgagtcagaaaaagtgaaagaaatgaacacacaagcctactgaagtgacacacagacctacctgcaatggaagatgacgacaccaatactacaactggcatcgagatctaaaggacctacttgaccatggcccatgggcctgacagagtaagaattgaacagtacccagtgtccaaaaggtcctgattggaagagaaatagaaggggagggagaagaggctctagtctaagcagttgatgaaagggaaattaaatggtagaaacactctgggtgaggaaggcaggagcaggaaaatgctgacactggtacatatcctatattcctccaaaagattgtgtgggaaagtgtgggggggaggggggtggtggggggggagtgtgcccttgtaaccgtaaaacatctttctccatgggtgtttcagcttcaattgaccaatcacataacagttatatgtttggggggaaaaagaaaagtttctaaaaaatgtagcccattacatatatgggtatgaaagcagaaaagtggaggaggcagggatatcattgacaaacacctttgccagtttctttgtattcgtgattttttgtgctattaaatgcagtattaaaacaagaaaagcccacctgggctagtgaaaggagaggaaataagggggcttgtaaaaggggagccgtcgctccaaaagtagagaagacaagaaatgctgtaagataagcaaccaacgcagacaggcctcagctaagagtatagtgtgtgtgtgttaaaaaaaaaaaaaaaaaaagaaaaaaaaaagctgtatgatatacttgagcaaatcaatgaacctctttgcgattgttttatcatctgtaaaatgcagataattcctaccttaaagggttattgttaaagataaaatgatataaaaatgtgtcaaagtataaagtaaaaggcttggaactttgtagggactcagtaaacgtttgttggatccaaacctgaaa

SEQ ID NO: 197282 - DNA, 4669 bp, Homo sapiens
  Payload ID: 18921
  Gene Name: ubiquitin specific peptidase 28
  Uniprot ID: Q96RU2
  ENST ID: ENST00000003302
  CDS Start-End: 70-3303
agtcctgagaggctgggccggcggcggctgcggcgggagaccggtgacccgcggctgggcgcctcggccatgactgcggagctgcagcaggacgacgcggccggcgcggcagacggccacggctcgagctgccaaatgctgttaaatcaactgagagaaatcacaggcattcaggacccttcctttctccatgaagctctgaaggccagtaatggtgacattactcaggcagtcagccttctcactgatgagagagttaaggagcccagtcaagacactgttgctacagaaccatctgaagtagaggggagtgctgccaacaaggaagtattagcaaaagttatagaccttactcatgataacaaagatgatcttcaggctgccattgctttgagtctactggagtctcccaaaattcaagctgatggaagagatcttaacaggatgcatgaagcaacctctgcagaaactaaacgctcaaagagaaaacgctgtgaagtctggggagaaaaccccaatcccaatgactggaggagagttgatggttggccagttgggctgaaaaatgttggcaatacatgttggtttagtgctgttattcagtctctctttcaattgcctgaatttcgaagacttgttctcagttatagtctgccacaaaatgtacttgaaaattgtcgaagtcatacagaaaagagaaatatcatgtttatgcaagagcttcagtatttgtttgctctaatgatgggatcaaatagaaaatttgtagacccgtctgcagccctggatctattaaagggagcattccgatcatctgaggaacagcagcaagatgtgagtgaattcacacacaagctcctggattggctagaggacgcattccagctagctgttaatgttaacagtcccaggaacaaatctgaaaatccaatggtgcagctgttctatggtactttcctgactgaaggggttcgtgaaggaaaacccttttgtaacaatgagaccttcggccagtatcctcttcaggtaaacggttatcgcaacttagacgagtgtttggaaggggccatggtggagggtgatgttgagcttcttccctccgatcactcggtgaagtatggacaagagcgttggtttacaaagctacctccagtgttgacctttgaactctcaagatttgagtttaatcagtcccttgggcagccagagaaaattcacaataagctggaatttcctcagattatttatatggacaggtacatgtacaggagcaaggagcttattcgaaataagagagagtgtattcgaaagttgaaggaggaaataaaaattctgcagcaaaaattggaaaggtatgtgaaatatggctcaggcccagctcggttcccgctcccggacatgctgaaatatgttattgaatttgctagtacaaaacctgcctcagaaagctgtccacctgaaagtgacacacatatgacattaccactttcttcagtgcactgctcggtttctgaccagacatccaaggaaagtacaagtacagaaagctcttctcaggatgttgaaagtaccttttcttctcctgaagattctttacccaagtctaaaccactgacatcttctcggtcttccatggaaatgccttcacagccagctccacgaacagtcacagatgaggagataaattttgttaagacctgtcttcagagatggaggagtgagattgaacaagatatacaagatttaaagacttgtattgcaagtactactcagactattgaacagatgtactgcgatcctctccttcgtcaggtgccttatcgcttgcatgcagttcttgttcatgaaggacaagcaaatgctggacactattgggcctatatctataatcaaccccgacagagctggctcaagtacaatgacatctctgttactgaatcttcctgggaagaagttgaaagagattcctatggaggcctgagaaatgttagtgcttactgtctgatgtacattaatgacaaactaccctacttcaatgcagaggcagccccaactgaatcagatcaaatgtcagaagtggaagccctatctgtggaactcaagcattacattcaggaggataactggcggtttgagcaggaagtagaggagtgggaagaagagcagtcttgcaaaatccctcaaatggagtcctccaccaactcctcatcacaggactactctacatcacaagagccttcagtagcctcttctcatggggttcgctgcttgtcgtctgagcatgctgtgattgtaaaggagcaaactgcccaggctattgcaaacacagcccgtgcctatgagaagagcggtgtagaagcggcactgagtgaggtgatgctgagccctgccatgcaaggggtcatcctggccatagctaaagcccgtcagacctttgaccgagatgggtctgaagcagggctgattaaggcattccatgaagaatactccaggctctatcagcttgccaaagagacccccacctctcacagtgatcctcgacttcagcatgtccttgtctactttttccaaaatgaagcacccaaaagggtagtagaacgaacccttctggaacagtttgcagataaaaatcttagctatgatgaaagatcaatcagcattatgaaggtggctcaagcgaaactgaaggaaattggtccagatgacatgaatatggaagagtacaagaagtggcatgaagattatagtttgttccgaaaagtgtctgtgtatctcctaacaggcctagaactctatcaaaaaggaaagtaccaagaggcactttcctacctggtatatgcctaccagagcaatgctgccctgctgatgaaggggccccgccggggggtcaaagaatccgtgattgctttataccgaagaaaatgccttctggagctgaatgccaaagcagcttctctttttgaaacaaatgatgatcactccgtaactgagggcattaatgtgatgaatgaactgatcatcccctgcattcaccttatcattaataatgacatttccaaggatgatctggatgccattgaggtcatgagaaaccattggtgctcttaccttgggcaagatattgcagaaaatctgcagctgtgcctaggggagtttctacccagacttctagatccttctgcagaaatcatcgtcttgaaagagcctccaactattcgacccaattctccctatgacctatgtagccgatttgcagctgtcatggagtcaattcagggagtttcaactgtgacagtgaaataagctcccacatgttcaaggcccattctggttcctggctgcctgcctcttgcacagaagttcgttgtcatagtgctcaccttgggaaaaggattaggtgggcacataagattccgatcagaccccaaccatgctgcatgtgtaaagaaggattgaaaataaaattgcactttttaggtacaaaatcataaaagctgtttcactagaaaaggcagaaagcagtgtattaaggtgttgaattacgccagaagacctgaaatgccttgtacctacaacaatgcttaggcttttctaagcctcttgccacttttaaaattatccttcaggcataaatatttttgacagcagaatagaagaatgattcatgagaacctgaaccagatgaacagctactagttattttatcaaatacagatgacatttaaaaattcttaactacaagagattagaaatataaaccttgcctggctcttgccaggagataacaaaatgggttgctgatgaactgcacccttttacatgtgggtagaatataagctcacatggcagtgagatgttgaaaagtcaaaagagacctgtctctctcctttcttttctatctttaaaccagaaaacctcatactcagtcctcagtgaaagaaagtaaagtattaaggactttagacagaagagcattgtgtaacttgactgaagatcatccattaatagttattaggcatttaggtaaaattttctaatacctaaaaattgtcaaaaacagtcaatagggctactgctggcccaaagaccatttaggtccacctcctcttttttgctctttttttttttctgtgacagtttcactgtgtcgcccaggctggcgttcagtggtgcaatctcagctcactgcaaactctgtctcctgggctcaagtgattctcgtgcctcagcctcccgaatagctggaattacgggcatgcaccaccacacctggctaatttttgtatttttaatagagatggggtttcaccatattggccaggctgatctctaactcctggcctcaagtgatctatctgcctccctcagcctcccaaagtctgggattgcagacaagtcatcgtacccggccttcttttttgcccttaaaagtaagggatgtgggtttgtacaaaaaaaaaaaaaaaaaaaaaaaaaccagcatacatatgcaaaactatatatatatgtatatgtagagaaaaatacttcccattgatcatttttaaaaggcttctgattggatattgtgttttaaccaaattttaaagattaatggaatcatgaaagggaaaaaaattgatacaactatgcagattttataaatgtgcaataaaagtatttgttttac

SEQ ID NO: 197283 - DNA, 542 bp, Homo sapiens
  Payload ID: 18921
  Gene Name: ubiquitin specific peptidase 28
  ENST ID: ENST00000544750
  CDS Start-End: 405-542
agaccggtgacccgcggctgggcgcctcggccatgactgcggagctgcagcaggacgacgcggccggcgcggcagacggccacggctcgatttttaaggagggggaggagctgcgtgatgaatagaaagtctactgatgatgatctcctgttcccaatgtctaagaagattgaaatcaatataaggacttctgatctaagaatctggtgagagtgaaagaaccctggtttgagagaaaagctaatgtctgtatgaagaaacttgggaagagggcaatttgagcatgtcttctagtgttacttcggaatgttataacttaacaccacctcctcacccctcaagtactgcactttttcaagagaaaacgggaaatctgtgccagttgttcaaatacgagtttggagatgagaaactatatttgtcgtacaaagctggcagacagataccctcagagctgccaaatgctgttaaatcaactgagagaaatcacaggcattcaggacccttcctttctccatgaagctctgaaggccagtaatggt

SEQ ID NO: 197284 - DNA, 683 bp, Homo sapiens
  Payload ID: 18921
  Gene Name: ubiquitin specific peptidase 28
  ENST ID: ENST00000535607
  CDS Start-End: 1-122
tgtttgctctaatgatgggatcaaatagaaaatttgtagacccgtctgcagccctggatctattaaagggagcattccgatcatctgaggaacagcagcagcagtcccaggaacaaatctgaaaatccaatggtgcagctgttctatggtactttcctgactgaaggggttcgtgaaggaaaacccttttgtaacaatgagaccttcggccagtatcctcttcaggtaaacggttatcgcaacttagacgagtgtttggaaggggccatggtggagggtgatgttgagcttcttccctccgatcactcggtgaagtatggacaagagcgttggtttacaaagctacctccagtgttgacctttgaactctcaagatttgagtttaatcagtcccttgggcagccagagaaaattcacaataagctggaatttcctcagattatttatatggacaggtacatgtacaggagcaaggagcttattcgaaataagagagagtgtattcgaaagttgaaggaggaaataaaaattctgcagcaaaaattggaaaggtatgtgaaatatggctcaggcccagctcggttcccgctcccggacatgctgaaatatgttattgaatttgctagtacaaaacctgcctcagaaagctgtccacctgaaagtgacacacatatgacattacc

SEQ ID NO: 197285 - DNA, 733 bp, Homo sapiens
  Payload ID: 18921
  Gene Name: ubiquitin specific peptidase 28
  ENST ID: ENST00000545608
  CDS Start-End: 1-154
gagaaatatcatgtttatgcaagagcttcagtatttgtttgctctaatgatgggatcaaatagaaaatttgtagacccgtctgcagccctggatctattaaagggagcattccgatcatctgaggaacagcagcagtcccaggaacaaatctgaaaatccaatggtgcagctgttctatggtactttcctgactgaaggggttcgtgaaggaaaacccttttgtaacaatgagaccttcggccagtatcctcttcaggtaaacggttatcgcaacttagacgagtgtttggaaggggccatggtggagggtgatgttgagcttcttccctccgatcactcggtgaagtatggacaagagcgttggtttacaaagctacctccagtgttgacctttgaactctcaagatttgagtttaatcagtcccttgggcagccagagaaaattcacaataagctggaatttcctcagattatttatatggacaggtacatgtacaggagcaaggagcttattcgaaataagagagagtgtattcgaaagttgaaggaggaaataaaaattctgcagcaaaaattggaaagtgcactgctcggtttctgaccagacatccaaggaaagtacagaaagctcttctcaggatgttgaaagtaccttttcttctcctgaagattctttacccaagtctaaaccactgacatcttctcggtcttccatggaaatgccttcacagc

SEQ ID NO: 197286 - DNA, 582 bp, Homo sapiens
  Payload ID: 18921
  Gene Name: ubiquitin specific peptidase 28
  ENST ID: ENST00000538224
  CDS Start-End: 1-582
taactggcggtttgagcaggaagtagaggagtgggaagaagagcagtcttgcaaaatccctcaaatggagtcctccaccaactcctcatcacaggactactctacatcacaagagccttcagtagcctcttctcatggggttcgctgcttgtcgtctgagcatgctgtgattgtaaaggagcaaactgcccaggctattgcaaacacagcccgtgcctatgagaagagcggtgtagaagcggcactgagtgagcttaaagaagctgaacccaagaagcccatgccccaggaaacaaaccttgcagagcagtcagaacagcccccaaaggctaatgatgcagagtctactgcccagcctaattctgaggtgatgctgagccctgccatgcaaggggtcatcctggccatagctaaagcccgtcagacctttgaccgagatgggtctgaagcagggctgattaaggcattccatgaagaatactccaggctctatcagcttgccaaagagacccccacctctcacagtgatcctcgacttcagcatgtccttgtctactttttccaaaatgaagcacccaaaag

SEQ ID NO: 197287 - DNA, 732 bp, Homo sapiens
  Payload ID: 18921
  Gene Name: ubiquitin specific peptidase 28
  ENST ID: ENST00000537642
  CDS Start-End: 1-732
tgcggagctgcagcaggacgacgcggccggcgcggcagacggccacggctcgaagttatagaccttactcatgataacaaagatgatcttcaggctgccattgctttgagtctactggagtctcccaaaattcaagctgatggaagagatcttaacaggatgcatgaagcaacctctgcagaaactaaacgctcaaagagaaaacgctgtgaagtctggggagaaaaccccaatcccaatgactggaggagagttgatggttggccagttgggctgaaaaatgttggcaatacatgttggtttagtgctgttattcaggaaaagagaaatatcatgtttatgcaagagcttcagtatttgtttgctctaatgatgggatcaaatagaaaatttgtagacccgtctgcagccctggatctattaaagggagcattccgatcatctgaggaacagcagcaagatgtgagtgaattcacacacaagctcctggattggctagaggacgcattccagctagctgttaatgttaacagtcccaggaacaaatctgaaaatccaatggtgcagctgttctatggtactttcctgactgaaggggttcgtgaaggaaaacccttttgtaacaatgagaccttcggccagtatcctcttcaggtaaacggttatcgcaacttagacgagtgtttggaaggggccatggtggagggtgatgttgagcttcttccctccgat

SEQ ID NO: 197288 - DNA, 3015 bp, Homo sapiens
  Payload ID: 18921
  Gene Name: ubiquitin specific peptidase 28
  ENST ID: ENST00000540438
  CDS Start-End: 66-650
ctgagaggctgggccggcggcggctgcggcgggagaccggtgacccgcggctgggcgcctcggccatgactgcggagctgcagcaggacgacgcggccggcgcggcagacggccacggctcgagctgccaaatgctgttaaatcaactgagagaaatcacaggcattcaggacccttcctttctccatgaagctctgaaggccagtaatggtgacattactcaggcagtcagccttctcactgatgagagagttaaggagcccagtcaagacactgttgctacagaaccatctgaagtagaggggagtgctgccaacaaggaagtattagcaaaagttatagaccttactcatgataacaaagatgatcttcaggctgccattgctttgagtctactggagtctcccaaaattcaagctgatggaagagatcttaacaggatgcatgaagcaacctctgcagaaactaaacgctcaaagagaaaacgctgtgaagtctggggagaaaaccccaatcccaatgactggaggagagttgatggttggccagttgggctgaaaaatgttggcaatacatgttggtttagtgctgttattcaggatgcttcttcaggagttccaccgtgcaggcctgagagggttttcatttgaggagcatgttgggatgaggagttgtatattcatacaggagatatttttaaagaaaattaacttatgaaagtctctctttcaattgcctgaatttcgaagacttgttctcagttatagtctgccacaaaatgtacttgaaaattgtcgaagtcatacagaaaagagaaatatcatgtttatgcaagagcttcagtatttgtttgctctaatgatgggatcaaatagaaaatttgtagacccgtctgcagccctggatctattaaagggagcattccgatcatctgaggaacagcagatgtgagtgaattcacacacaagctcctggattggctagaggacgcattccagctagctgttaatgttaacagtcccaggaacaaatctgaaaatccaatggtgcagctgttctatggtactttcctgactgaaggggttcgtgaaggaaaacccttttgtaacaatgagaccttcggccagtatcctcttcaggtaaacggttatcgcaacttagacgagtgtttggaaggggccatggtggagggtgatgttgagcttcttccctccgatcactcggtgaagtatggacaagagcgttggtttacaaagctacctccagtgttgacctttgaactctcaagatttgagtttaatcagtcccttgggcagccagagaaaattcacaataagctggaatttcctcagattatttatatggacaggtacatgtacaggagcaaggagcttattcgaaataagagagagtgtattcgaaagttgaaggaggaaataaaaattctgcagcaaaaattggaaagtctgcatctagcctgtttcaggacattgctcattcttcctacttgactgccagaggtgccattgcagagctggctcaagtacaatgacatctctgttactgaatcttcctgggaagaagttgaaagagattcctatggaggcctgagaaatgttagtgcttactgtctgatgtacattaatgacaaactaccctacttcaatgcagaggcagccccaactgaatcagatcaaatgtcagaagtggaagccctatctgtggaactcaagcattacattcaggaggataactggcggtttgagcaggaagtagaggagtgggaagaagagcagtcttgcaaaatccctcaaatggagtcctccaccaactcctcatcacaggactactctacatcacaagagccttcagtagcctcttctcatggggttcgctgcttgtcgtctgagcatgctgtgattgtaaaggagcaaactgcccaggctattgcaaacacagcccgtgcctatgagaagagcggtgtagaagcggcactgagtgaggcattccatgaagaatactccaggctctatcagcttgccaaagagacccccacctctcacagtgatcctcgacttcagcatgtccttgtctactttttccaaaatgaagcacccaaaagggtagtagaacgaacccttctggaacagtttgcagataaaaatcttagctatgatgaaagatcaatcagcattatgaaggtggctcaagcgaaactgaaggaaattggtccagatgacatgaatatggaagagtacaagaagtggcatgaagattatagtttgttccgaaaagtgtctgtgtatctcctaacaggcctagaactctatcaaaaaggaaagtaccaagaggcactttcctacctggtatatgcctaccagagcaatgctgccctgctgatgaaggggccccgccggggggtcaaagaatccgtgattgctttataccgaagaaaatgccttctggagctgaatgccaaagcagcttctctttttgaaacaaatgatgatcactccgtaactgagggcattaatgtgatgaatgaactgatcatcccctgcattcaccttatcattaataatgacatttccaaggatgatctggatgccattgaggtcatgagaaaccattggtgctcttaccttgggcaagatattgcagaaaatctgcagctgtgcctaggggagtttctacccagacttctagatccttctgcagaaatcatcgtcttgaaagagcctccaactattcgacccaattctccctatgacctatgtagccgatttgcagctgtcatggagtcaattcagggagtttcaactgtgacagtgaaataagctcccacatgttcaaggcccattctggttcctggctgcctgcctcttgcacagaagttcgttgtcatagtgctcaccttgggaaaaggattaggtgggcacataagattccgatcagaccccaaccatgctgcatgtgtaaagaaggattgaaaataaaattgcactttttaggtac

SEQ ID NO: 197289 - DNA, 1081 bp, Homo sapiens
  Payload ID: 18921
  Gene Name: ubiquitin specific peptidase 28
  ENST ID: ENST00000538475
  CDS Start-End: 1-1081
gcagccctggatctattaaagggagcattccgatcatctgaggaacagcagcaagatgtgagtgaattcacacacaagctcctggattggctagaggacgcattccagctagctgttaatgttaacagtcccaggaacaaatctgaaaatccaatggtgcagctgttctatggtactttcctgactgaaggggttcgtgaaggaaaacccttttgtaacaatgagaccttcggccagtatcctcttcaggtaaacggttatcgcaacttagacgagtgtttggaaggggccatggtggagggtgatgttgagcttcttccctccgatcactcggtgaagtatggacaagagcgttggtttacaaagctacctccagtgttgacctttgaactctcaagatttgagtttaatcagtcccttgggcagccagagaaaattcacaataagctggaatttcctcagattatttatatggacaggtacatgtacaggagcaaggagcttattcgaaataagagagagtgtattcgaaagttgaaggaggaaataaaaattctgcagcaaaaattggaaagtacaagtacagaaagctcttctcaggatgttgaaagtaccttttcttctcctgaagattctttacccaagtctaaaccactgacatcttctcggtcttccatggaaatgccttcacagccagctccacgaacagtcacagatgaggagataaattttgttaagacctgtcttcagagatggaggagtgagattgaacaagatatacaagatttaaagacttgtattgcaagtactactcagactattgaacagatgtactgcgatcctctccttcgtcaggtgccttatcgcttgcatgcagttcttgttcatgaaggacaagcaaatgctggacactattgggcctatatctataatcaaccccgacagagctggctcaagtacaatgacatctctgttactgaatcttcctgggaagaagttgaaagagattcctatggaggcctgagaaatgttagtgcttactgtctgatgtacattaatgacaaactaccctacttcaatg

SEQ ID NO: 197290 - DNA, 3498 bp, Homo sapiens
  Payload ID: 18921
  Gene Name: ubiquitin specific peptidase 28
  ENST ID: ENST00000544967
  CDS Start-End: 89-2350
gtgcatttctaaccagctatcaggaagttgctgaatttaaaatgttgtctctgtggagccagaagataggctttagatagtcatagtgatgtcttttttaaaaagtctctctctttgcctaggaaaacccttttgtaacaatgagaccttcggccagtatcctcttcaggtaaacggttatcgcaacttagacgagtgtttggaaggggccatggtggagggtgatgttgagcttcttccctccgatcactcggtgaagtatggacaagagcgttggtttacaaagctacctccagtgttgacctttgaactctcaagatttgagtttaatcagtcccttgggcagccagagaaaattcacaataagctggaatttcctcagattatttatatggacaggtacatgtacaggagcaaggagcttattcgaaataagagagagtgtattcgaaagttgaaggaggaaataaaaattctgcagcaaaaattggaaaggtatgtgaaatatggctcaggcccagctcggttcccgctcccggacatgctgaaatatgttattgaatttgctagtacaaaacctgcctcagaaagctgtccacctgaaagtgacacacatatgacattaccactttcttcagtgcactgctcggtttctgaccagacatccaaggaaagtacaagtacagaaagctcttctcaggatgttgaaagtaccttttcttctcctgaagattctttacccaagtctaaaccactgacatcttctcggtcttccatggaaatgccttcacagccagctccacgaacagtcacagatgaggagataaattttgttaagacctgtcttcagagatggaggagtgagattgaacaagatatacaagatttaaagacttgtattgcaagtactactcagactattgaacagatgtactgcgatcctctccttcgtcaggtgccttatcgcttgcatgcagttcttgttcatgaaggacaagcaaatgctggacactattgggcctatatctataatcaaccccgacagagctggctcaagtacaatgacatctctgttactgaatcttcctgggaagaagttgaaagagattcctatggaggcctgagaaatgttagtgcttactgtctgatgtacattaatgacaaactaccctacttcaatgcagaggcagccccaactgaatcagatcaaatgtcagaagtggaagccctatctgtggaactcaagcattacattcaggaggataactggcggtttgagcaggaagtagaggagtgggaagaagagcagtcttgcaaaatccctcaaatggagtcctccaccaactcctcatcacaggactactctacatcacaagagccttcagtagcctcttctcatggggttcgctgcttgtcgtctgagcatgctgtgattgtaaaggagcaaactgcccaggctattgcaaacacagcccgtgcctatgagaagagcggtgtagaagcggcactgagtgaggcattccatgaagaatactccaggctctatcagcttgccaaagagacccccacctctcacagtgatcctcgacttcagcatgtccttgtctactttttccaaaatgaagcacccaaaagggtagtagaacgaacccttctggaacagtttgcagataaaaatcttagctatgatgaaagatcaatcagcattatgaaggtggctcaagcgaaactgaaggaaattggtccagatgacatgaatatggaagagtacaagaagtggcatgaagattatagtttgttccgaaaagtgtctgtgtatctcctaacaggcctagaactctatcaaaaaggaaagtaccaagaggcactttcctacctggtatatgcctaccagagcaatgctgccctgctgatgaaggggccccgccggggggtcaaagaatccgtgattgctttataccgaagaaaatgccttctggagctgaatgccaaagcagcttctctttttgaaacaaatgatgatcactccgtaactgagggcattaatgtgatgaatgaactgatcatcccctgcattcaccttatcattaataatgacatttccaaggatgatctggatgccattgaggtcatgagaaaccattggtgctcttaccttgggcaagatattgcagaaaatctgcagctgtgcctaggggagtttctacccagacttctagatccttctgcagaaatcatcgtcttgaaagagcctccaactattcgacccaattctccctatgacctatgtagccgatttgcagctgtcatggagtcaattcagggagtttcaactgtgacagtgaaataagctcccacatgttcaaggcccattctggttcctggctgcctgcctcttgcacagaagttcgttgtcatagtgctcaccttgggaaaaggattaggtgggcacataagattccgatcagaccccaaccatgctgcatgtgtaaagaaggattgaaaataaaattgcactttttaggtacaaaatcataaaagctgtttcactagaaaaggcagaaagcagtgtattaaggtgttgaattacgccagaagacctgaaatgccttgtacctacaacaatgcttaggcttttctaagcctcttgccacttttaaaattatccttcaggcataaatatttttgacagcagaatagaagaatgattcatgagaacctgaaccagatgaacagctactagttattttatcaaatacagatgacatttaaaaattcttaactacaagagattagaaatataaaccttgcctggctcttgccaggagataacaaaatgggttgctgatgaactgcacccttttacatgtgggtagaatataagctcacatggcagtgagatgttgaaaagtcaaaagagacctgtctctctcctttcttttctatctttaaaccagaaaacctcatactcagtcctcagtgaaagaaagtaaagtattaaggactttagacagaagagcattgtgtaacttgactgaagatcatccattaatagttattaggcatttaggtaaaattttctaatacctaaaaattgtcaaaaacagtcaatagggctactgctggcccaaagaccatttaggtccacctcctcttttttgctctttttttttttctgtgacagtttcactgtgtcgcccaggctggcgttcagtggtgcaatctcagctcactgcaaactctgtctcctgggctcaagtgattctcgtgcctcagcctcccgaatagctggaattacgggcatgcaccaccacacctggctaatttttgtatttttaatagagatggggtttcaccatattggccaggctgatctctaactcctggcctcaagtgatctatctgcctccctcagcctcccaaagtctgggattgcagacaagtcatcgtacccggccttcttttttgcccttaaaagtaagggatgtgggtttgtac

SEQ ID NO: 197291 - DNA, 3431 bp, Homo sapiens
  Payload ID: 18921
  Gene Name: ubiquitin specific peptidase 28
  ENST ID: ENST00000545540
  CDS Start-End: 234-2996
agtcctgagaggctgggccggcggcggctgcggcgggagaccggtgacccgcggctgggcgcctcggccatgactgcggagctgcagcaggacgacgcggccggcgcggcagacggccacggctcgaagttatagaccttactcatgataacaaagatgatcttcaggctgccattgctttgagtctactggagtctcccaaaattcaagctgatggaagagatcttaacaggatgcatgaagcaacctctgcagaaactaaacgctcaaagagaaaacgctgtgaagtctggggagaaaaccccaatcccaatgactggaggagagttgatggttggccagttgggctgaaaaatgttggcaatacatgttggtttagtgctgttattcagtctctctttcaattgcctgaatttcgaagacttgttctcagttatagtctgccacaaaatgtacttgaaaattgtcgaagtcatacagaaaagagaaatatcatgtttatgcaagagcttcagtatttgtttgctctaatgatgggatcaaatagaaaatttgtagacccgtctgcagccctggatctattaaagggagcattccgatcatctgaggaacagcagcaagatgtgagtgaattcacacacaagctcctggattggctagaggacgcattccagctagctgttaatgttaacagtcccaggaacaaatctgaaaatccaatggtgcagctgttctatggtactttcctgactgaaggggttcgtgaaggaaaacccttttgtaacaatgagaccttcggccagtatcctcttcaggtaaacggttatcgcaacttagacgagtgtttggaaggggccatggtggagggtgatgttgagcttcttccctccgatcactcggtgaagtatggacaagagcgttggtttacaaagctacctccagtgttgacctttgaactctcaagatttgagtttaatcagtcccttgggcagccagagaaaattcacaataagctggaatttcctcagattatttatatggacaggtacatgtacaggagcaaggagcttattcgaaataagagagagtgtattcgaaagttgaaggaggaaataaaaattctgcagcaaaaattggaaaggtatgtgaaatatggctcaggcccagctcggttcccgctcccggacatgctgaaatatgttattgaatttgctagtacaaaacctgcctcagaaagctgtccacctgaaagtgacacacatatgacattaccactttcttcagtgcactgctcggtttctgaccagacatccaaggaaagtacaagtacagaaagctcttctcaggatgttgaaagtaccttttcttctcctgaagattctttacccaagtctaaaccactgacatcttctcggtcttccatggaaatgccttcacagccagctccacgaacagtcacagatgaggagataaattttgttaagacctgtcttcagagatggaggagtgagattgaacaagatatacaagatttaaagacttgtattgcaagtactactcagactattgaacagatgtactgcgatcctctccttcgtcaggtgccttatcgcttgcatgcagttcttgttcatgaaggacaagcaaatgctggacactattgggcctatatctataatcaaccccgacagagctggctcaagtacaatgacatctctgttactgaatcttcctgggaagaagttgaaagagattcctatggaggcctgagaaatgttagtgcttactgtctgatgtacattaatgacaaactaccctacttcaatgcagaggcagccccaactgaatcagatcaaatgtcagaagtggaagccctatctgtggaactcaagcattacattcaggaggataactggcggtttgagcaggaagtagaggagtgggaagaagagcagtcttgcaaaatccctcaaatggagtcctccaccaactcctcatcacaggactactctacatcacaagagccttcagtagcctcttctcatggggttcgctgcttgtcgtctgagcatgctgtgattgtaaaggagcaaactgcccaggctattgcaaacacagcccgtgcctatgagaagagcggtgtagaagcggcactgagtgaggcattccatgaagaatactccaggctctatcagcttgccaaagagacccccacctctcacagtgatcctcgacttcagcatgtccttgtctactttttccaaaatgaagcacccaaaagggtagtagaacgaacccttctggaacagtttgcagataaaaatcttagctatgatgaaagatcaatcagcattatgaaggtggctcaagcgaaactgaaggaaattggtccagatgacatgaatatggaagagtacaagaagtggcatgaagattatagtttgttccgaaaagtgtctgtgtatctcctaacaggcctagaactctatcaaaaaggaaagtaccaagaggcactttcctacctggtatatgcctaccagagcaatgctgccctgctgatgaaggggccccgccggggggtcaaagaatccgtgattgctttataccgaagaaaatgccttctggagctgaatgccaaagcagcttctctttttgaaacaaatgatgatcactccgtaactgagggcattaatgtgatgaatgaactgatcatcccctgcattcaccttatcattaataatgacatttccaaggatgatctggatgccattgaggtcatgagaaaccattggtgctcttaccttgggcaagatattgcagaaaatctgcagctgtgcctaggggagtttctacccagacttctagatccttctgcagaaatcatcgtcttgaaagagcctccaactattcgacccaattctccctatgacctatgtagccgatttgcagctgtcatggagtcaattcagggagtttcaactgtgacagtgaaataagctcccacatgttcaaggcccattctggttcctggctgcctgcctcttgcacagaagttcgttgtcatagtgctcaccttgggaaaaggattaggtgggcacataagattccgatcagaccccaaccatgctgcatgtgtaaagaaggattgaaaataaaattgcactttttaggtacaaaatcataaaagctgtttcactagaaaaggcagaaagcagtgtattaaggtgttgaattacgccagaagacctgaaatgccttgtacctacaacaatgcttaggcttttctaagcctcttgccacttttaaaattatccttcaggcataaatatttttgacagcagaatagaagaatgattcatgagaacctgaaccagatgaacagctactagttattttatcaaatacagatgacatttaaaaattcttaacta

SEQ ID NO: 197292 - DNA, 567 bp, Homo sapiens
  Payload ID: 18921
  Gene Name: ubiquitin specific peptidase 28
  ENST ID: ENST00000537490
  CDS Start-End: 1-274
caatccagaattgtctccttttcctaaaagcagcagtcccaggaacaaatctgaaaatccaatggtgcagctgttctatggtactttcctgactgaaggggttcgtgaaggaaaacccttttgtaacaatgagaccttcggccagtatcctcttcaggtaaacggttatcgcaacttagacgagtgtttggaaggggccatggtggagggtgatgttgagcttcttccctccgatcactcggtgaagtatggacaagagcctacctgtacctgagtagggagaacccactgcctccatattttcggagggtaaaagtacagtgattaactcctatgcgttggtttacaaagctacctccagtgttgacctttgaactctcaagatttgagtttaatcagtcccttgggcagccagagaaaattcacaataagctggaatttcctcagattatttatatggacaggtacatgtacaggagcaaggagcttattcgaaataagagagagtgtattcgaaagttgaaggaggaaataaaaattctgcagcaaaaattggaaaggtatgtg

SEQ ID NO: 197293 - DNA, 1900 bp, Homo sapiens
  Payload ID: 18921
  Gene Name: ubiquitin specific peptidase 28
  Uniprot ID: Q96RU2
  ENST ID: ENST00000537706
  CDS Start-End: 28-1779
ggtgacccgcggctgggcgcctcggccatgactgcggagctgcagcaggacgacgcggccggcgcggcagacggccacggctcgagctgccaaatgctgttaaatcaactgagagaaatcacaggcattcaggacccttcctttctccatgaagctctgaaggccagtaatggtgacattactcaggcagtcagccttctcactgatgagagagttaaggagcccagtcaagacactgttgctacagaaccatctgaagtagaggggagtgctgccaacaaggaagtattagcaaaagttatagaccttactcatgataacaaagatgatcttcaggctgccattgctttgagtctactggagtctcccaaaattcaagctgatggaagagatcttaacaggatgcatgaagcaacctctgcagaaactaaacgctcaaagagaaaacgctgtgaagtctggggagaaaaccccaatcccaatgactggaggagagttgatggttggccagttgggctgaaaaatgttggcaatacatgttggtttagtgctgttattcagtctctctttcaattgcctgaatttcgaagacttgttctcagttatagtctgccacaaaatgtacttgaaaattgtcgaagtcatacagaaaagagaaatatcatgtttatgcaagagcttcagtatttgtttgctctaatgatgggatcaaatagaaaatttgtagacccgtctgcagccctggatctattaaagggagcattccgatcatctgaggaacagcagcaagatgtgagtgaattcacacacaagctcctggattggctagaggacgcattccagctagctgttaatgttaacagtcccaggaacaaatctgaaaatccaatggtgcagctgttctatggtactttcctgactgaaggggttcgtgaaggaaaacccttttgtaacaatgagaccttcggccagtatcctcttcaggtaaacggttatcgcaacttagacgagtgtttggaaggggccatggtggagggtgatgttgagcttcttccctccgatcactcggtgaagtatggacaagagcgttggtttacaaagctacctccagtgttgacctttgaactctcaagatttgagtttaatcagtcccttgggcagccagagaaaattcacaataagctggaatttcctcagattatttatatggacaggtacatgtacaggagcaaggagcttattcgaaataagagagagtgtattcgaaagttgaaggaggaaataaaaattctgcagcaaaaattggaaaggtatgtgaaatatggctcaggcccagctcggttcccgctcccggacatgctgaaatatgttattgaatttgctagtacaaaacctgcctcagaaagctgtccacctgaaagtgacacacatatgacattaccactttcttcagtgcactgctcggtttctgaccagacatccaaggaaagtacaagtacagaaagctcttctcaggatgttgaaagtaccttttcttctcctgaagattctttacccaagtctaaaccactgacatcttctcggtcttccatggaaatgccttcacagccagctccacgaacagtcacagatgaggagataaattttgttaagacctgtcttcagagatggaggagtgagattgaacaagatatacaagatttaaagacttgtattgcaagtactactcagactattgaacagatgtactgcgatcctctccttcgtcaggtagaatgaaaattgatgggaaagtagtcaaggcatgtgctaatggtagatacaaaaatcaaatttgatagttttcttttaaacccaatgggaatccccctaagataaaagaataaacttaagatataaa

SEQ ID NO: 197294 - DNA, 561 bp, Homo sapiens
  Payload ID: 18921
  Gene Name: ubiquitin specific peptidase 28
  ENST ID: ENST00000540925
  CDS Start-End: 329-561
gggagaccggtgacccgcggctgggcgcctcggccatgactgcggagctgcagcaggacgacgcggccggcgcggcagacggccacggctcgattgaaatcaatataaggacttctgatctaagaatctggtgagagtgaaagaaccctggtttgagagaaaagctaatgtctgtatgaagaaacttgggaagagggcaatttgagcatgtcttctagtgttacttcggaatgttataacttaacaccacctcctcacccctcaagtactgcactttttcaagagaaaacgggaaatctgtgccagttgttcaaatacgagtttggagatgagaaactatatttgtcgtacaaagctggcagacagataccctcagagctgccaaatgctgttaaatcaactgagagaaatcacaggcattcaggacccttcctttctccatgaagctctgaaggccagtaatggtgacattactcaggcagtcagccttctcactgatgagagagttaaggagcccagtcaagacactgttgctacagaaccatctgaagtagaggggag

SEQ ID NO: 197295 - DNA, 3705 bp, Homo sapiens
  Payload ID: 18922
  Gene Name: ubiquitin specific peptidase 29
  Uniprot ID: Q9HBJ7
  ENST ID: ENST00000254181
  CDS Start-End: 455-3223
gagatttccagagccatgggagccggaagtccaaggaactgtacctccatcatgacgactccggttacgtaaaaacattcaaacagaaaatgctggccaggctcatgcctgtaatcccagcactttgggaggccgaggcgggaggatcgcttgtgcccaggagttggagaccagcctgggcaacatagcgctatggagtctaatccaggcactttggaaggctgaggctggaggatcgattgaggccaggagtttgggaccaccctgggcaacatagcaagatctcatttctgaaaaaagaattatcatccactcacccagaacagctctccaaacttaacagccgtggcagtcagagctctgcctgcagtgtgaccatggacagctctccaaagcttaaacttcagtaaattgactcaagtttcttcggaaagaactgttacataaagaaaggatgatatctctaaaggtatgtggattcatccaaatttggagccagaagactgggatgactaagctgaaagaagctctcattgaaacagtgcaaagacaaaaggaaattaaactggtggtcactttcaaatctggaaaatttataagaatttttcagctgagcaacaacattagaagtgtggtccttagacattgtaaaaaaagacaaagtcacctgcgtttaactttgaaaaacaacgtgttcttgtttattgacaaattatcctacagagatgctaaacagttgaatatgttcctggacataatccaccaaaacaaatctcagcaacccatgaaatctgatgatgattggagtgtgtttgaaagcaggaatatgctgaaggaaattgacaaaacttcattttacagcatttgtaacaagccaagttatcagaagatgcctttgtttatgtcaaaatcaccaacacatgtgaaaaaggggatattagaaaatcaaggtgggaaggggcaaaacacactatcatctgatgtacagacaaatgaggacattctgaaggaagataaccctgtaccaaacaagaaatataagacagattccttgaaatatatacaaagcaataggaagaacccatcaagtttagaggatttagaaaaagatagagatttgaaactcgggccttcattcaataccaactgtaatggaaatcctaacctagatgagactgttcttgcaacccagactctcaatgccaaaaatggtttgacatctccattggaaccagagcacagccagggtgacccaagatgcaacaaagcccaggtgcctcttgactctcattcacagcaactgcagcaggggttccccaatttgggaaacacctgttacatgaatgcagttttacaatcgctatttgcaattccatcttttgctgatgacttactcactcaaggtgtcccatgggaatatattccctttgaggctcttattatgaccttgacccagctgcttgctttgaaagatttctgtagtacaaagatcaagagagaattacttgggaatgttaaaaaagtcatttcagcagttgcagaaatattttctggcaacatgcagaatgatgctcatgagtttttaggtcagtgtttagaccagctgaaagaagacatggaaaaattaaatgccactttgaatactgggaaagaatgtggggatgaaaattcatctccacaaatgcatgttggtagtgctgccaccaaagtgtttgtttgccctgttgttgctaattttgagtttgaattgcagctctcccttatttgtaaagcttgtggtcatgctgttctcaaggtagaacctaataattatctctccatcaacctgcaccaagaaacaaaaccacttcctttgtccattcagaattctttagatcttttctttaaagaagaagagcttgaatataactgtcagatgtgtaagcagaagagttgtgttgcaaggcatacatttagtaggctctccagggtccttatcattcatctgaaacgctatagcttcaacaatgcttggttgctggtgaagaataacgagcaagtttatattcccaaatctttaagtttatcttcttattgcaatgaaagcaccaaaccacctcttcccttgagcagtagtgcacctgttgggaaatgtgaagtcctggaagtctctcaggagatgatttctgagatcaacagcccattgacaccatcaatgaagctgacctcagaatccagtgattccctggttctacccgttgaaccagacaagaatgccgacctacaaagattccagagagactgtggagatgcaagccaagagcagcatcagagagacctggaaaatggctctgcactagagtcagaattggtccactttagagatagggcaatcggtgaaaaggagcttccagtggctgactcactgatggaccagggagacatttctcttcctgtgatgtatgaagatggagggaagctgatcagcagcccagacacaaggcttgtcgaggttcatcttcaagaggtgcctcaacatccagaacttcagaagtatgagaaaaccaatacattcgtagagttcaattttgacagtgtcactgagtccaccaatggcttttatgactgtaaagaaaacaggattccagaaggatctcaaggaatggctgaacagctccagcagtgtattgaggagagcatcatagatgaatttcttcagcaggcaccacctccaggtgttaggaagctggatgcccaggaacatacagaagagaccctcaatcagtctacagaattaagacttcaaaaggctgacctgaatcaccttggggcactgggttctgacaacccaggaaacaaaaacattttagatgcagagaacacaagaggtgaagccaaggaactaacaagaaacgtgaagatgggggatcctctccaggcctacagactcatcagtgttgtcagccatatcgggagctccccaaattcaggccattacatcagcgatgtgtatgactttcagaagcaggcctggttcacatacaacgatctatgtgtatcagaaatctcagagaccaaaatgcaggaggcgaggcttcactctgggtatatcttcttttacatgcacaatgggatttttgaggagctgttaagaaaagcagagaactctcggctacctagcacacaggcaggggtgatccctcagggggaatacgaaggtgactctttgtacagacctgcttgacagactcactcggcctcacttcatccttgcaaagagaatcctgtacttcatccttgcaaagagaatcctgtacttcactcagaatgaaggaacaagtatctcaggatgaaatctcaatgaaaaacacttattttgggggaatatctattttaactgcttcagacacctagatcccagaactcaggcgcatatgcatattttccctgcaagattagaatggtgctcttcacgttttgacggtggttttcaaaatgttgttcttcaaccagcaacagcaacagctagggactgattagaaatgcaaattcttgggtcactctctagaccaactgatgcagaaacaggaggtgtgagccagcaatcagatggagattctagtgctcatgaaagtttgaagaacactggtaatgtgtggagtatcttggtgtattttgctactgttgatatggattgcttatgttatataaacgattttcattaaa

SEQ ID NO: 197296 - DNA, 437 bp, Homo sapiens
  Payload ID: 18922
  Gene Name: ubiquitin specific peptidase 29
  ENST ID: ENST00000600020
  CDS Start-End: 346-437
gctggcccaggcaccacgcgactctaagcgcgcccaaagcgaccctctgcgcaaactacccccggggacgacgtcacccgtgaggcgctatggagtctaatccaggcactttggaaggctgaggctggaggatcgattgaggccaggagtttgggaccaccctgggcaacatagcaagatctcatttctgaaaaaagaattatcatccactcacccagaacagctctccaaactccgtggcagtcagagctctgcctgcagtgtgaccatggacagctctccaaagcttaaacttcagtaaattgactcaagtttcttcggaaagaactgttacataaagaaaggatgatatctctaaaggtatgtggattcatccaaatttggagccagaagactgggatgactaagctgaaagaagctctcattgaaacagtgca

SEQ ID NO: 197297 - DNA, 3284 bp, Homo sapiens
  Payload ID: 18922
  Gene Name: ubiquitin specific peptidase 29
  Uniprot ID: Q9HBJ7
  ENST ID: ENST00000598197
  CDS Start-End: 34-2802
gtgcttttcttctttaggttacataaagaaaggatgatatctctaaaggtatgtggattcatccaaatttggagccagaagactgggatgactaagctgaaagaagctctcattgaaacagtgcaaagacaaaaggaaattaaactggtggtcactttcaaatctggaaaatttataagaatttttcagctgagcaacaacattagaagtgtggtccttagacattgtaaaaaaagacaaagtcacctgcgtttaactttgaaaaacaacgtgttcttgtttattgacaaattatcctacagagatgctaaacagttgaatatgttcctggacataatccaccaaaacaaatctcagcaacccatgaaatctgatgatgattggagtgtgtttgaaagcaggaatatgctgaaggaaattgacaaaacttcattttacagcatttgtaacaagccaagttatcagaagatgcctttgtttatgtcaaaatcaccaacacatgtgaaaaaggggatattagaaaatcaaggtgggaaggggcaaaacacactatcatctgatgtacagacaaatgaggacattctgaaggaagataaccctgtaccaaacaagaaatataagacagattccttgaaatatatacaaagcaataggaagaacccatcaagtttagaggatttagaaaaagatagagatttgaaactcgggccttcattcaataccaactgtaatggaaatcctaacctagatgagactgttcttgcaacccagactctcaatgccaaaaatggtttgacatctccattggaaccagagcacagccagggtgacccaagatgcaacaaagcccaggtgcctcttgactctcattcacagcaactgcagcaggggttccccaatttgggaaacacctgttacatgaatgcagttttacaatcgctatttgcaattccatcttttgctgatgacttactcactcaaggtgtcccatgggaatatattccctttgaggctcttattatgaccttgacccagctgcttgctttgaaagatttctgtagtacaaagatcaagagagaattacttgggaatgttaaaaaagtcatttcagcagttgcagaaatattttctggcaacatgcagaatgatgctcatgagtttttaggtcagtgtttagaccagctgaaagaagacatggaaaaattaaatgccactttgaatactgggaaagaatgtggggatgaaaattcatctccacaaatgcatgttggtagtgctgccaccaaagtgtttgtttgccctgttgttgctaattttgagtttgaattgcagctctcccttatttgtaaagcttgtggtcatgctgttctcaaggtagaacctaataattatctctccatcaacctgcaccaagaaacaaaaccacttcctttgtccattcagaattctttagatcttttctttaaagaagaagagcttgaatataactgtcagatgtgtaagcagaagagttgtgttgcaaggcatacatttagtaggctctccagggtccttatcattcatctgaaacgctatagcttcaacaatgcttggttgctggtgaagaataacgagcaagtttatattcccaaatctttaagtttatcttcttattgcaatgaaagcaccaaaccacctcttcccttgagcagtagtgcacctgttgggaaatgtgaagtcctggaagtctctcaggagatgatttctgagatcaacagcccattgacaccatcaatgaagctgacctcagaatccagtgattccctggttctacccgttgaaccagacaagaatgccgacctacaaagattccagagagactgtggagatgcaagccaagagcagcatcagagagacctggaaaatggctctgcactagagtcagaattggtccactttagagatagggcaatcggtgaaaaggagcttccagtggctgactcactgatggaccagggagacatttctcttcctgtgatgtatgaagatggagggaagctgatcagcagcccagacacaaggcttgtcgaggttcatcttcaagaggtgcctcaacatccagaacttcagaagtatgagaaaaccaatacattcgtagagttcaattttgacagtgtcactgagtccaccaatggcttttatgactgtaaagaaaacaggattccagaaggatctcaaggaatggctgaacagctccagcagtgtattgaggagagcatcatagatgaatttcttcagcaggcaccacctccaggtgttaggaagctggatgcccaggaacatacagaagagaccctcaatcagtctacagaattaagacttcaaaaggctgacctgaatcaccttggggcactgggttctgacaacccaggaaacaaaaacattttagatgcagagaacacaagaggtgaagccaaggaactaacaagaaacgtgaagatgggggatcctctccaggcctacagactcatcagtgttgtcagccatatcgggagctccccaaattcaggccattacatcagcgatgtgtatgactttcagaagcaggcctggttcacatacaacgatctatgtgtatcagaaatctcagagaccaaaatgcaggaggcgaggcttcactctgggtatatcttcttttacatgcacaatgggatttttgaggagctgttaagaaaagcagagaactctcggctacctagcacacaggcaggggtgatccctcagggggaatacgaaggtgactctttgtacagacctgcttgacagactcactcggcctcacttcatccttgcaaagagaatcctgtacttcatccttgcaaagagaatcctgtacttcactcagaatgaaggaacaagtatctcaggatgaaatctcaatgaaaaacacttattttgggggaatatctattttaactgcttcagacacctagatcccagaactcaggcgcatatgcatattttccctgcaagattagaatggtgctcttcacgttttgacggtggttttcaaaatgttgttcttcaaccagcaacagcaacagctagggactgattagaaatgcaaattcttgggtcactctctagaccaactgatgcagaaacaggaggtgtgagccagcaatcagatggagattctagtgctcatgaaagtttgaagaacactggtaatgtgtggagtatcttggtgtattttgctactgttgatatggattgcttatgttatataaacgattttcattaaa

SEQ ID NO: 197298 - DNA, 533 bp, Homo sapiens
  Payload ID: 18922
  Gene Name: ubiquitin specific peptidase 29
  ENST ID: ENST00000600940
  CDS Start-End: 495-533
atcatgacgactccggttacgtaaaaacattcaaacagaaaatgctggccaggctcatgcctgtaatcccagcactttgggaggccgaggcgggaggatcgcttgtgcccaggagttggagaccagcctgggcaacatagtgagaccctccccccacccatctctacaaaaaattttaaaattagctagctgagatcatgccactgcactccagcctggacaacaaagcgctatggagtctaatccaggcactttggaaggctgaggctggaggatcgattgaggccaggagtttgggaccaccctgggcaacatagcaagatctcatttctgaaaaaagaattatcatccactcacccagaacagctctccaaacttaacagccgtggcagtcagagctctgcctgcagtgtgaccatggacagctctccaaagcttaaacttcagtaaattgactcaagtttcttcggaaagaactgttacataaagaaaggatgatatctctaaaggtatgtggattcatccaaatttgg

SEQ ID NO: 197299 - DNA, 5311 bp, Homo sapiens
  Payload ID: 18923
  Gene Name: ubiquitin specific peptidase 3
  ENST ID: ENST00000268049
  CDS Start-End: 1-1497
atgcaatcaccaccacacttggcagtgtgccggtccaacaaaagcccttgggtctgtttgacttgttcaagtgtccactgtggaaggtatgtgaatggccatgcaaaaaaacattatgaagatgcacaagtacctttaaccaaccataagaaatcagaaaagcaagataaagttcagcacacagtatgtatggattgcagtagctacagtacatactgttatcgctgtgatgattttgtggttaatgacaccaagctgggactggtacagaaagtcagagaacacttacagaacttggaaaactcagctttcacagctgacaggcataagaaaagaaaacttttggaaaactcaacactaaacagcaagttattaaaagtaaatggaagcaccactgccatttgtgccacaggccttcggaatttggggaacacatgtttcatgaatgccatccttcagtcactcagtaacattgagcagttttgctgttatttcaaagaactgcccgccgtggagttaaggaatgggaaaacagcaggaaggcggacataccacaccaggagccaaggggataacaatgtgtctttggtagaagagtttagaaagacactctgtgctttatggcaaggcagccagactgcatttagcccagagtccttattttatgttgtttggaagattatgccaaactttaggggctatcaacagcaggacgcccatgaattcatgcgctaccttttggaccacctacacttggaacttcagggcggtttcaacggtgtttcccgctcagcaattctgcaggagaattctactctgtctgcaagtaacaagtgttgcataaatggagcatctactgttgtcacggctatattcggaggcattctccaaaatgaggttaactgcctcatatgtgggacagaatctagaaagtttgatccattcctagacctttcattagatattccaagtcagttcagaagtaagcgctctaagaatcaagaaaatggaccagtttgttcgttacgagattgtcttcgcagttttaccgacttagaagaacttgatgagacagagttatatatgtgccataaatgcaaaaagaaacaaaagtccacaaaaaagttttggattcaaaaactacccaaggtgctatgcttacatttgaaaagatttcattggacagcatatttaagaaataaagttgatacatacgtagaatttccactgagaggcctagacatgaaatgctacttactagagcctgagaacagtggcccggagagctgcctgtatgacctcgccgctgtggtggtgcaccatggttccggggttggttctggacattacacagcatacgcaactcacgaaggccgctggttccacttcaatgacagtactgtaacactgactgacgaggagactgtggtgaaggcgaaggcctacatccttttctacgtggaacaccaggccaaagctggatcggataaactttaatacctcctccaaatcatcattcaccaaccataccagagaaacatttccagttttccacaaatacttgatacaagatttaatttcattatgcacttttcaatttcctattttggatttagttttgtcaatggtagtgacttactgaacatgggcaccaactaattttgttgttgttctaccagaaaacctcagcagatgttttgatttgctgctttagttgtaataattcaatttttataggtagttgtaagaacttagtcttatttgacttttttattttatgttaatgttttcagttctcactttgaggcacatttacatcaatgcttttgttcctctcacatgctgaaagcaagatgtgttccttattgtgaagagcgacacaactgcctgctgcctttccacagctataatggacatcaggttgactctaaatcaaggatcatgtgtgcacaatacttgtggcccacaaaatttcacaatgactgctgaggaatcattctttttgcctgtaaaatataacaaagggcatcattaagtagaccaggtaattactgcttgtctctcaaggctgctgtctttatcagcactaactaaataaatttgttggttcagttgtacttgtcctgcaaatacaagaattactctctttgttggtttttttggttttggggcatacttgtttgcggggaggtaagatgggagtaaagaccaaatacatgtaatgtttaaaaaaaatgctgtgactcactgacatggtataggtgttaccagtgaggtaaagccatggcgtctgcctccttttgaatcagtatctcattcccccttagttgtaccactggaagtcacgacatgtccattatagacttacttactgcttgtgtttggcatctgagtctgaggtgtgaccctctgggatttacttggatcatcacccgcacttcagtttatcactggggggtgtgcttccacaggaggaaatttagaatcttcgctgctctgggttttaacacctctctctggcctatcctgattgataggacaagttgaaaatactgttggagtaagtaagtggagttttcgttttgttttttgggggtttttggagacaagagtctctctctgttgcccaggctggagtgcagtggcacgatctcagctcattgcaacctcggcctcccgagtagcaattctcctgcctcaacctcctgagtagctgggattacaggtgcccaccactacacctggctaattttttttttgtatttttagtaaagacgggggtttaccatgttggctagggtggtctcaacctccctcctgacctcaggtgatccgcctgcctcagcctcccaaagtgctgagattacaggcgtgagccatcacgcccagacagttttgtttttaaaaaacagatttaactcaaagattcaaatttggaaccagaatcccatttaaagaaagcagttgtggtttctacaagtgttctaagacagtcctgtggtggttttttttttttcttttttttggttgggggcggtgggggttggtagacatagcctaccaattctccacaagggacaaaatgtatcttgtgttaagccaacgagactttctggcaattttttttttttttttttaatggagtcttactctgtccctcaggctggagtgcagtgtggcatgatcacagctcactgtagcctcaacctcccaggctcaagcgatcctcccacttcagcctcgaagtagctggcaccaccacacccagctaatttttaatatttttactagagatggggtttcaccacgttgcccaggctggtcttgcactcctgggctcaagtgatccacccaccttggcttcccaaggtgctagcattacaggcatgagccaccacgcccagcctgttctattaaaaacatcttgacctttttttttttttaagtttatgatataaaaacagtctggtggctttccctcaggttggatatctgaagttgtgggagcagatgtagctccatttccattttaatattaactggataaatcccacatcttcccagaacacatctgctaaacactttaacatgacaaggagcaaattacaattatgtgtaaacttatatcatccagtacaatggcccctagccacatgtgactgaaatttaaattagaaactcagtgccttcagtcacactagccacatttcaagtgctcagcacccacatacggcgtaggacaatgctggtctaaattttcactccaaagaataaaactttgccatcatgtttaggtcttacaactttgagtcctaaaagataatagggagatgtgtgcttaaattaatttacaatgctaaattatattaggttaaactgtatgaaaccctgctatttgatgagttctgatctacaaaaatgacagctccacctgatctgatgtatcacacattaacatcacatctaattcaacctgaaatgtgagtctcctttgatcttgcaaagtatctcctatgaatccgggctcttttgcttagaaggtagacagctgtaacctctaacattgatacttcgatcttcagtctctctgaatgggcagctgttaaacagtaaaggcctgggcagagttgatggtgaaaaaaagctgtatttttataccaaatggaacttcagcaacacgttggactactttgtcgggcagagtggtcttcagacaggtgatgctgttggcttaagagatgaacacgtcttctctctgaatttgtttttattggttggttttacttgaacagaaacgtttgaatggtgtgaagattctttagaaaagtgattggatccatctcaattgtgcacttgaacagcagtgatgtaaatgtgcttatttgtgttttcatttttaactgtgcagccttaccacacctattttgaaagctgatcttttgtcctcttcagggcttttcccttgtgccatgttgtctccagcaatatatgtggcttctggctcagagcttctgctgaggcagggcctcgcgctgagtcacatggctccttggaacaagaaaactttctcagaagtccccacacgggtgggtgacagaaacagtttgtggcaacacaaatctctctccatggtggagaaacctttgcttatccactgtattctactcagtgtatagtgatgacagatgtactagaattaaaccagtcaagtgtactggcccggggtgagtgttaaatgtgtatctcgcctgtggaacctactcagcagcttggtttctggggttgggggcatatttatttcttaaagccaaacctctccttcattggtttagtgtacataagtctatttagatacacttatcccactttaatctccaccagcccctaaactctctcctgtaccctctgttgctgaagtggcctcttcacctgggccctggaaaagccgatggaaaaagtctgttcctgcagccaaggcctgggtcccaggtgactaggagtagccataggaaggtgaggaaggagaagtgggcatgtggtgtcatctgtagtccaaggtctctgcgtctcgtcagtgggtgcagtgccttccccctcaggtgtgagcgtgatggactctagactgccttccatgagtgttggtcatgctatgatgtcatcatttgccattaaaacccagtttgtatgatgccaagaggattaattgtgcaagtgactgattcatttaaattgtaatcacatcccttttctgcttcaccaacctgaactgtttttaaaaatatcattaaaagtctgttctctttccttttga

SEQ ID NO: 197300 - DNA, 2333 bp, Homo sapiens
  Payload ID: 18923
  Gene Name: ubiquitin specific peptidase 3
  Uniprot ID: Q9Y6I4
  ENST ID: ENST00000380324
  CDS Start-End: 130-1692
ctcgagacgcagccgccgtcggccgagcgcccggctagaagcgacaccagacggagcctccggagttcctccgcccccacctcgccgggtcctggagccgcagtcctcccagctgccctcctcgtggccatggagtgtccacacctgagctccagcgtctgcattgctccggactcagccaagttccccaacggctccccgtcgtcctggtgctgcagcgtgtgccggtccaacaaaagcccttgggtctgtttgacttgttcaagtgtccactgtggaaggtatgtgaatggccatgcaaaaaaacattatgaagatgcacaagtacctttaaccaaccataagaaatcagaaaagcaagataaagttcagcacacagtatgtatggattgcagtagctacagtacatactgttatcgctgtgatgattttgtggttaatgacaccaagctgggactggtacagaaagtcagagaacacttacagaacttggaaaactcagctttcacagctgacaggcataagaaaagaaaacttttggaaaactcaacactaaacagcaagttattaaaagtaaatggaagcaccactgccatttgtgccacaggccttcggaatttggggaacacatgtttcatgaatgccatccttcagtcactcagtaacattgagcagttttgctgttatttcaaagaactgcccgccgtggagttaaggaatgggaaaacagcaggaaggcggacataccacaccaggagccaaggggataacaatgtgtctttggtagaagagtttagaaagacactctgtgctttatggcaaggcagccagactgcatttagcccagagtccttattttatgttgtttggaagattatgccaaactttaggggctatcaacagcaggacgcccatgaattcatgcgctaccttttggaccacctacacttggaacttcagggcggtttcaacggtgtttcccgctcagcaattctgcaggagaattctactctgtctgcaagtaacaagtgttgcataaatggagcatctactgttgtcacggctatattcggaggcattctccaaaatgaggttaactgcctcatatgtgggacagaatctagaaagtttgatccattcctagacctttcattagatattccaagtcagttcagaagtaagcgctctaagaatcaagaaaatggaccagtttgttcgttacgagattgtcttcgcagttttaccgacttagaagaacttgatgagacagagttatatatgtgccataaatgcaaaaagaaacaaaagtccacaaaaaagttttggattcaaaaactacccaaggtgctatgcttacatttgaaaagatttcattggacagcatatttaagaaataaagttgatacatacgtagaatttccactgagaggcctagacatgaaatgctacttactagagcctgagaacagtggcccggagagctgcctgtatgacctcgccgctgtggtggtgcaccatggttccggggttggttctggacattacacagcatacgcaactcacgaaggccgctggttccacttcaatgacagtactgtaacactgactgacgaggagactgtggtgaaggcgaaggcctacatccttttctacgtggaacaccaggccaaagctggatcggataaactttaatacctcctccaaatcatcattcaccaaccataccagagaaacatttccagttttccacaaatacttgatacaagatttaatttcattatgcacttttcaatttcctattttggatttagttttgtcaatggtagtgacttactgaacatgggcaccaactaattttgttgttgttctaccagaaaacctcagcagatgttttgatttgctgctttagttgtaataattcaatttttataggtagttgtaagaacttagtcttatttgacttttttattttatgttaatgttttcagttctcactttgaggcacatttacatcaatgcttttgttcctctcacatgctgaaagcaagatgtgttccttattgtgaagagcgacacaactgcctgctgcctttccacagctataatggacatcaggttgactctaaatcaaggatcatgtgtgcacaatacttgtggcccacaaaatttcacaatgactgctgaggaatcattctttttgcctgtaaaatataacaaagggcatcattaagtagaccaggtaattactgcttgtctctcaaggctgctgtctttatcagcactaactaaataaatttgttggttcagttgtacttgtcctgcaaatacaagaa

SEQ ID NO: 197301 - DNA, 2077 bp, Homo sapiens
  Payload ID: 18923
  Gene Name: ubiquitin specific peptidase 3
  ENST ID: ENST00000538686
  CDS Start-End: 1-20
gtagctacagtacatactgatgagtgaagaatggtttgctttgggaatattttcttagttcttcaaggacatgatgtggaagtcatgacttgagtaacttcaatagcactaacaacaggaattgaaaaaaacttagaattttaaagctgagaaagagttatcgctgtgatgattttgtggttaatgacaccaagctgggactggtacagaaagtcagagaacacttacagaacttggaaaactcagctttcacagctgacaggcataagaaaagaaaacttttggaaaactcaacactaaacagcaagttattaaaagtaaatggaagcaccactgccatttgtgccacaggccttcggaatttggggaacacatgtttcatgaatgccatccttcagtcactcagtaacattgagcagttttgctgttatttcaaagaactgcccgccgtggagttaaggaatgggaaaacagcaggaaggcggacataccacaccaggagccaaggggataacaatgtgtctttggtagaagagtttagaaagacactctgtgctttatggcaaggcagccagactgcatttagcccagagtccttattttatgttgtttggaagattatgccaaactttaggggctatcaacagcaggacgcccatgaattcatgcgctaccttttggaccacctacacttggaacttcagggcggtttcaacggtgtttcccgctcagcaattctgcaggagaattctactctgtctgcaagtaacaagtgttgcataaatggagcatctactgttgtcacggctatattcggaggcattctccaaaatgaggttaactgcctcatatgtgggacagaatctagaaagtttgatccattcctagacctttcattagatattccaagtcagttcagaagtaagcgctctaagaatcaagaaaatggaccagtttgttcgttacgagattgtcttcgcagttttaccgacttagaagaacttgatgagacagagttatatatgtgccataaatgcaaaaagaaacaaaagtccacaaaaaagttttggattcaaaaactacccaaggtgctatgcttacatttgaaaagatttcattggacagcatatttaagaaataaagttgatacatacgtagaatttccactgagaggcctagacatgaaatgctacttactagagcctgagaacagtggcccggagagctgcctgtatgacctcgccgctgtggtggtgcaccatggttccggggttggttctggacattacacagcatacgcaactcacgaaggccgctggttccacttcaatgacagtactgtaacactgactgacgaggagactgtggtgaaggcgaaggcctacatccttttctacgtggaacaccaggccaaagctggatcggataaactttaatacctcctccaaatcatcattcaccaaccataccagagaaacatttccagttttccacaaatacttgatacaagatttaatttcattatgcacttttcaatttcctattttggatttagttttgtcaatggtagtgacttactgaacatgggcaccaactaattttgttgttgttctaccagaaaacctcagcagatgttttgatttgctgctttagttgtaataattcaatttttataggtagttgtaagaacttagtcttatttgacttttttattttatgttaatgttttcagttctcactttgaggcacatttacatcaatgcttttgttcctctcacatgctgaaagcaagatgtgttccttattgtgaagagcgacacaactgcctgctgcctttccacagctataatggacatcaggttgactctaaatcaaggatcatgtgtgcacaatacttgtggcccacaaaatttcacaatgactgctgaggaatcattctttttgcctgtaaaatataacaaagggcatcattaagtagaccaggtaattactgcttgtctctcaaggctgctgtctttatcagcactaactaaataaatttgttggttcagttgtacttgtcctgcaaatacaagaa

SEQ ID NO: 197302 - DNA, 5474 bp, Homo sapiens
  Payload ID: 18923
  Gene Name: ubiquitin specific peptidase 3
  Uniprot ID: Q9Y6I4
  ENST ID: ENST00000540797
  CDS Start-End: 230-1660
cccggatctcggagttacacgttctacggagcggggcgccgggagacggcgggcgagaaaacccggcgtccggaagcccgtgctttctttgacgcaagggctcgagacgcagccgccgtcggccgagcgcccggctagaagcgacaccagacggagcctccggagttcctccgcccccacctcgccgggtcctggagccgcagtcctcccagctgccctcctcgtggccatggagtgtccacacctgagctccagcgtctgcattgctccggactcagccaagttccccaacggctccccgtcgtcctggtgctgcagcgtgtgccggtccaacaaaagcccttgggtctgtttgacttgttcaagtgtccactgtggaagttatcgctgtgatgattttgtggttaatgacaccaagctgggactggtacagaaagtcagagaacacttacagaacttggaaaactcagctttcacagctgacaggcataagaaaagaaaacttttggaaaactcaacactaaacagcaagttattaaaagtaaatggaagcaccactgccatttgtgccacaggccttcggaatttggggaacacatgtttcatgaatgccatccttcagtcactcagtaacattgagcagttttgctgttatttcaaagaactgcccgccgtggagttaaggaatgggaaaacagcaggaaggcggacataccacaccaggagccaaggggataacaatgtgtctttggtagaagagtttagaaagacactctgtgctttatggcaaggcagccagactgcatttagcccagagtccttattttatgttgtttggaagattatgccaaactttaggggctatcaacagcaggacgcccatgaattcatgcgctaccttttggaccacctacacttggaacttcagggcggtttcaacggtgtttcccgctcagcaattctgcaggagaattctactctgtctgcaagtaacaagtgttgcataaatggagcatctactgttgtcacggctatattcggaggcattctccaaaatgaggttaactgcctcatatgtgggacagaatctagaaagtttgatccattcctagacctttcattagatattccaagtcagttcagaagtaagcgctctaagaatcaagaaaatggaccagtttgttcgttacgagattgtcttcgcagttttaccgacttagaagaacttgatgagacagagttatatatgtgccataaatgcaaaaagaaacaaaagtccacaaaaaagttttggattcaaaaactacccaaggtgctatgcttacatttgaaaagatttcattggacagcatatttaagaaataaagttgatacatacgtagaatttccactgagaggcctagacatgaaatgctacttactagagcctgagaacagtggcccggagagctgcctgtatgacctcgccgctgtggtggtgcaccatggttccggggttggttctggacattacacagcatacgcaactcacgaaggccgctggttccacttcaatgacagtactgtaacactgactgacgaggagactgtggtgaaggcgaaggcctacatccttttctacgtggaacaccaggccaaagctggatcggataaactttaatacctcctccaaatcatcattcaccaaccataccagagaaacatttccagttttccacaaatacttgatacaagatttaatttcattatgcacttttcaatttcctattttggatttagttttgtcaatggtagtgacttactgaacatgggcaccaactaattttgttgttgttctaccagaaaacctcagcagatgttttgatttgctgctttagttgtaataattcaatttttataggtagttgtaagaacttagtcttatttgacttttttattttatgttaatgttttcagttctcactttgaggcacatttacatcaatgcttttgttcctctcacatgctgaaagcaagatgtgttccttattgtgaagagcgacacaactgcctgctgcctttccacagctataatggacatcaggttgactctaaatcaaggatcatgtgtgcacaatacttgtggcccacaaaatttcacaatgactgctgaggaatcattctttttgcctgtaaaatataacaaagggcatcattaagtagaccaggtaattactgcttgtctctcaaggctgctgtctttatcagcactaactaaataaatttgttggttcagttgtacttgtcctgcaaatacaagaattactctctttgttggtttttttggttttggggcatacttgtttgcggggaggtaagatgggagtaaagaccaaatacatgtaatgtttaaaaaaaatgctgtgactcactgacatggtataggtgttaccagtgaggtaaagccatggcgtctgcctccttttgaatcagtatctcattcccccttagttgtaccactggaagtcacgacatgtccattatagacttacttactgcttgtgtttggcatctgagtctgaggtgtgaccctctgggatttacttggatcatcacccgcacttcagtttatcactggggggtgtgcttccacaggaggaaatttagaatcttcgctgctctgggttttaacacctctctctggcctatcctgattgataggacaagttgaaaatactgttggagtaagtaagtggagttttcgttttgttttttgggggtttttggagacaagagtctctctctgttgcccaggctggagtgcagtggcacgatctcagctcattgcaacctcggcctcccgagtagcaattctcctgcctcaacctcctgagtagctgggattacaggtgcccaccactacacctggctaattttttttttgtatttttagtaaagacgggggtttaccatgttggctagggtggtctcaacctccctcctgacctcaggtgatccgcctgcctcagcctcccaaagtgctgagattacaggcgtgagccatcacgcccagacagttttgtttttaaaaaacagatttaactcaaagattcaaatttggaaccagaatcccatttaaagaaagcagttgtggtttctacaagtgttctaagacagtcctgtggtggttttttttttttcttttttttggttgggggcggtgggggttggtagacatagcctaccaattctccacaagggacaaaatgtatcttgtgttaagccaacgagactttctggcaattttttttttttttttttaatggagtcttactctgtccctcaggctggagtgcagtgtggcatgatcacagctcactgtagcctcaacctcccaggctcaagcgatcctcccacttcagcctcgaagtagctggcaccaccacacccagctaatttttaatatttttactagagatggggtttcaccacgttgcccaggctggtcttgcactcctgggctcaagtgatccacccaccttggcttcccaaggtgctagcattacaggcatgagccaccacgcccagcctgttctattaaaaacatcttgacctttttttttttttaagtttatgatataaaaacagtctggtggctttccctcaggttggatatctgaagttgtgggagcagatgtagctccatttccattttaatattaactggataaatcccacatcttcccagaacacatctgctaaacactttaacatgacaaggagcaaattacaattatgtgtaaacttatatcatccagtacaatggcccctagccacatgtgactgaaatttaaattagaaactcagtgccttcagtcacactagccacatttcaagtgctcagcacccacatacggcgtaggacaatgctggtctaaattttcactccaaagaataaaactttgccatcatgtttaggtcttacaactttgagtcctaaaagataatagggagatgtgtgcttaaattaatttacaatgctaaattatattaggttaaactgtatgaaaccctgctatttgatgagttctgatctacaaaaatgacagctccacctgatctgatgtatcacacattaacatcacatctaattcaacctgaaatgtgagtctcctttgatcttgcaaagtatctcctatgaatccgggctcttttgcttagaaggtagacagctgtaacctctaacattgatacttcgatcttcagtctctctgaatgggcagctgttaaacagtaaaggcctgggcagagttgatggtgaaaaaaagctgtatttttataccaaatggaacttcagcaacacgttggactactttgtcgggcagagtggtcttcagacaggtgatgctgttggcttaagagatgaacacgtcttctctctgaatttgtttttattggttggttttacttgaacagaaacgtttgaatggtgtgaagattctttagaaaagtgattggatccatctcaattgtgcacttgaacagcagtgatgtaaatgtgcttatttgtgttttcatttttaactgtgcagccttaccacacctattttgaaagctgatcttttgtcctcttcagggcttttcccttgtgccatgttgtctccagcaatatatgtggcttctggctcagagcttctgctgaggcagggcctcgcgctgagtcacatggctccttggaacaagaaaactttctcagaagtccccacacgggtgggtgacagaaacagtttgtggcaacacaaatctctctccatggtggagaaacctttgcttatccactgtattctactcagtgtatagtgatgacagatgtactagaattaaaccagtcaagtgtactggcccggggtgagtgttaaatgtgtatctcgcctgtggaacctactcagcagcttggtttctggggttgggggcatatttatttcttaaagccaaacctctccttcattggtttagtgtacataagtctatttagatacacttatcccactttaatctccaccagcccctaaactctctcctgtaccctctgttgctgaagtggcctcttcacctgggccctggaaaagccgatggaaaaagtctgttcctgcagccaaggcctgggtcccaggtgactaggagtagccataggaaggtgaggaaggagaagtgggcatgtggtgtcatctgtagtccaaggtctctgcgtctcgtcagtgggtgcagtgccttccccctcaggtgtgagcgtgatggactctagactgccttccatgagtgttggtcatgctatgatgtcatcatttgccattaaaacccagtttgtatgatgccaagaggattaattgtgcaagtgactgattcatttaaattgtaatcacatcccttttctgcttcaccaacctgaactgtttttaaaaatatcattaaaagtctgttctctttccttttga

SEQ ID NO: 197303 - DNA, 2439 bp, Homo sapiens
  Payload ID: 18923
  Gene Name: ubiquitin specific peptidase 3
  ENST ID: ENST00000558157
  CDS Start-End: 106-276
gagcgcccggctagaagcgacaccagacggagcctccggagttcctccgcccccacctcgccgggtcctggagccgcagtcctcccagctgccctcctcgtggccatggagtgtccacacctgagctccagcgtctgcattgctccggactcagccaagttccccaacggctccccgtcgtcctggtgctgcagcgccttcaaatgtttatctggtgtgactgtattatgccctcagagagtactgtatgttgcccaggctggcctcgaactctaggctcaagtgattcttctgcctcagcctcccaagtagctgggactacagatgcaatcaccaccacacttggcagtgtgccggtccaacaaaagcccttgggtctgtttgacttgttcaagtgtccactgtggaaggtatgtgaatggccatgcaaaaaaacattatgaagatgcacaagtacctttaaccaaccataagaaatcagaaaagcaagataaagttcagcacacagtatgtatggattgcagtagctacagtacatactgttatcgctgtgatgattttgtggttaatgacaccaagctgggactggtacagaaagtcagagaacacttacagaacttggaaaactcagctttcacagctgacaggcataagaaaagaaaacttttggaaaactcaacactaaacagcaagttattaaaagtaaatggaagcaccactgccatttgtgccacaggccttcggaatttggggaacacatgtttcatgaatgccatccttcagtcactcagtaacattgagcagttttgctgttatttcaaagaactgcccgccgtggagttaaggaatgggaaaacagcaggaaggcggacataccacaccaggagccaaggggataacaatgtgtctttggtagaagagtttagaaagacactctgtgctttatggcaaggcagccagactgcatttagcccagagtccttattttatgttgtttggaagattatgccaaactttaggggctatcaacagcaggacgcccatgaattcatgcgctaccttttggaccacctacacttggaacttcagggcggtttcaacggtgtttcccgctcagcaattctgcaggagaattctactctgtctgcaagtaacaagtgttgcataaatggagcatctactgttgtcacggctatattcggaggcattctccaaaatgaggttaactgcctcatatgtgggacagaatctagaaagtttgatccattcctagacctttcattagatattccaagtcagttcagaagtaagcgctctaagaatcaagaaaatggaccagtttgttcgttacgagattgtcttcgcagttttaccgacttagaagaacttgatgagacagagttatatatgtgccataaatgcaaaaagaaacaaaagtccacaaaaaagttttggattcaaaaactacccaaggtgctatgcttacatttgaaaagatttcattggacagcatatttaagaaataaagttgatacatacgtagaatttccactgagaggcctagacatgaaatgctacttactagagcctgagaacagtggcccggagagctgcctgtatgacctcgccgctgtggtggtgcaccatggttccggggttggttctggacattacacagcatacgcaactcacgaaggccgctggttccacttcaatgacagtactgtaacactgactgacgaggagactgtggtgaaggcgaaggcctacatccttttctacgtggaacaccaggccaaagctggatcggataaactttaatacctcctccaaatcatcattcaccaaccataccagagaaacatttccagttttccacaaatacttgatacaagatttaatttcattatgcacttttcaatttcctattttggatttagttttgtcaatggtagtgacttactgaacatgggcaccaactaattttgttgttgttctaccagaaaacctcagcagatgttttgatttgctgctttagttgtaataattcaatttttataggtagttgtaagaacttagtcttatttgacttttttattttatgttaatgttttcagttctcactttgaggcacatttacatcaatgcttttgttcctctcacatgctgaaagcaagatgtgttccttattgtgaagagcgacacaactgcctgctgcctttccacagctataatggacatcaggttgactctaaatcaaggatcatgtgtgcacaatacttgtggcccacaaaatttcacaatgactgctgaggaatcattctttttgcctgtaaaatataacaaagggcatcattaagtagaccaggtaattactgcttgtctctcaaggctgctgtctttatcagcactaactaaataaatttgttggttcagttg

SEQ ID NO: 197304 - DNA, 2217 bp, Homo sapiens
  Payload ID: 18923
  Gene Name: ubiquitin specific peptidase 3
  ENST ID: ENST00000559257
  CDS Start-End: 1-1331
ataaagttcagcacacagtatgtatggattgcagtagctacagtacatactgttatcgctgtgatgattttgtggttaatgacaccaagctgggactggtacagaaagtcagagaacacttacagaacttggaaaactcagctttcacagctgacaggcataagaaaagaaaacttttggaaaactcaacactaaacagcaagttattaaaagtaaatggaagcaccactgccatttgtgccacaggccttcggaatttggggaacacatgtttcatgaatgccatccttcagtcactcagtaacattgagcagttttgctgttatttcaaagaactgcccgccgtggagttaaggaatgggaaaacagcaggaaggcggacataccacaccaggagccaaggggataacaatgtgtctttggtagaagagtttagaaagacactctgtgctttatggcaaggcagccagactgcatttagcccagagtccttattttatgttgtttggaagattatgccaaactttaggggctatcaacagcaggacgcccatgaattcatgcgctaccttttggaccacctacacttggaacttcagggcggtttcaacggtgtttcccgctcagcaattctgcaggagaattctactctgtctgcaagtaacaagtgttgcataaatggagcatctactgttgtcacggctatattcggaggcattctccaaaatgaggttaactgcctcatatgtgggacagaatctagaaagtttgatccattcctagacctttcattagatattccaagtcagttcagaagtaagcgctctaagaatcaagaaaatggaccagtttgttcgttacgagattgtcttcgcagttttaccgacttagaagaacttgatgagacagagttatatatgtgccataaatgcaaaaagaaacaaaagtccacaaaaaagttttggattcaaaaactacccaaggtgctatgcttacatttgaaaagatttcattggacagcatatttaagaaataaagttgatacatacgtagaatttccactgagaggcctagacatgaaatgctacttactagagcctgagaacagtggcccggagagctgcctgtatgacctcgccgctgtggtggtgcaccatggttccggggttggttctggacattacacagcatacgcaactcacgaaggccgctggttccacttcaatgacagtactgtaacactgactgacgaggagactgtggtgaaggcgaaggcctacatccttttctacgtggaacaccaggccaaagctggatcggataaactttaatacctcctccaaatcatcattcaccaaccataccagagaaacatttccagttttccacaaatacttgatacaagatttaatttcattatgcacttttcaatttcctattttggatttagttttgtcaatggtagtgacttactgaacatgggcaccaactaattttgttgttgttctaccagaaaacctcagcagatgttttgatttgctgctttagttgtaataattcaatttttataggtagttgtaagaacttagtcttatttgacttttttattttatgttaatgttttcagttctcactttgaggcacatttacatcaatgcttttgttcctctcacatgctgaaagcaagatgtgttccttattgtgaagagcgacacaactgcctgctgcctttccacagctataatggacatcaggttgactctaaatcaaggatcatgtgtgcacaatacttgtggcccacaaaatttcacaatgactgctgaggaatcattctttttgcctgtaaaatataacaaagggcatcattaagtagaccagggcttttcccttgtgccatgttgtctccagcaatatatgtggcttctggctcagagcttctgctgaggcagggcctcgcgctgagtcacatggctccttggaacaagaaaactttctcagaagtccccacacgggtgtgagcgtgatggactctagactgccttccatgagtgttggtcatgctatgatgtcatcatttgccattaaaacccagtttgtatgatgccaagaggattaattgtgcaagtgactgattcatttaaattgtaatcacatcccttttctgcttcaccaacctgaactgtttttaaaaatatcattaaaagtctgttctctttc

SEQ ID NO: 197305 - DNA, 561 bp, Homo sapiens
  Payload ID: 18923
  Gene Name: ubiquitin specific peptidase 3
  ENST ID: ENST00000559771
  CDS Start-End: 184-561
tttgcctctgtgtgggaagtcagcaggaccagatgcccctctcttctttggctctccttcaaatgtttatctggtgtgactgtattatgccctcagagagtactgtatgttgcccaggctggcctcgaactctaggctcaagtgattcttctgcctcagcctcccaagtagctgggactacagatgcaatcaccaccacacttggcagtgtgccggtccaacaaaagcccttgggtctgtttgacttgttcaagtgtccactgtggaaggtatgtgaatggccatgcaaaaaaacattatgaagatgcacaagtacctttaaccaaccataagaaatcagaaaagcaagataaagttcagcacacagtatgtatggattgcagtagctacagtacatactgttatcgctgtgatgattttgtggttaatgacaccaagctgggactggtacagaaagtcagagaacacttacagaacttggaaaactcagctttcacagctgacaggcataagaaaagaaaacttttggaaaactcaacactaaacagcaagttattaaaa

SEQ ID NO: 197306 - DNA, 1693 bp, Homo sapiens
  Payload ID: 18923
  Gene Name: ubiquitin specific peptidase 3
  ENST ID: ENST00000559711
  CDS Start-End: 88-1383
atttttggagaatgggggaagaatgtaaagatggagatgaccgaatgaggaatattgttttgccattaaataagtgaatagtgcgaaatggaaaataccgagggttatcgctgtgatgattttgtggttaatgacaccaagctgggactggtacagaaagtcagagaacacttacagaacttggaaaactcagctttcacagctgacaggcataagaaaagaaaacttttggaaaactcaacactaaacagcaagttattaaaagtaaatggaagcaccactgccatttgtgccacaggccttcggaatttggggaacacatgtttcatgaatgccatccttcagtcactcagtaacattgagcagttttgctgttatttcaaagaactgcccgccgtggagttaaggaatgggaaaacagcaggaaggcggacataccacaccaggagccaaggggataacaatgtgtctttggtagaagagtttagaaagacactctgtgctttatggcaaggcagccagactgcatttagcccagagtccttattttatgttgtttggaagattatgccaaactttaggggctatcaacagcaggacgcccatgaattcatgcgctaccttttggaccacctacacttggaacttcagggcggtttcaacggtgtttcccgctcagcaattctgcaggagaattctactctgtctgcaagtaacaagtgttgcataaatggagcatctactgttgtcacggctatattcggaggcattctccaaaatgaggttaactgcctcatatgtgggacagaatctagaaagtttgatccattcctagacctttcattagatattccaagtcagttcagaagtaagcgctctaagaatcaagaaaatggaccagtttgttcgttacgagattgtcttcgcagttttaccgacttagaagaacttgatgagacagagttatatatgtgccataaatgcaaaaagaaacaaaagtccacaaaaaagttttggattcaaaaactacccaaggtgctatgcttacatttgaaaagatttcattggacagcatatttaagaaataaagttgatacatacgtagaatttccactgagaggcctagacatgaaatgctacttactagagcctgagaacagtggcccggagagctgcctgtatgacctcgccgctgtggtggtgcaccatggttccggggttggttctggacattacacagcatacgcaactcacgaaggccgctggttccacttcaatgacagtactgtaacactgactgacgaggagactgtggtgaaggcgaaggcctacatccttttctacgtggaacaccaggccaaagctggatcggataaactttaatacctcctccaaatcatcattcaccaaccataccagagaaacatttccagttttccacaaatacttgatacaagatttaatttcattatgcacttttcaatttcctattttggatttagttttgtcaatggtagtgacttactgaacatgggcaccaactaattttgttgttgttctaccagaaaacctcagcagatgttttgatttgctgctttagttgtaataattcaatttttataggtagttgtaagaacttagtcttatttgacttttttattttatgttaatgttttcagttctcactttgagg

SEQ ID NO: 197307 - DNA, 545 bp, Homo sapiens
  Payload ID: 18923
  Gene Name: ubiquitin specific peptidase 3
  ENST ID: ENST00000560070
  CDS Start-End: 146-545
ttctttgacgcaagggctcgagacgcagccgccgtcggccgagcgcccggctagaagcgacaccagacggagcctccggagttcctccgcccccacctcgccgggtcctggagccgcagtcctcccagctgccctcctcgtggccatggagtgtccacacctgagctccagcgtctgcattgctccggactcagccaagttccccaacggctccccgtcgtcctggtgctgcagcgtgtgccggtccaacaaaagcccttgggtctgtttgacttgttcaagtgtccactgtggaagttatcgctgtgatgattttgtggttaatgacaccaagctgggactggtacagaaagtcagagaacacttacagaacttggaaaactcagctttcacagctgacaggcataagaaaagaaaacttttggaaaactcaacactaaacagcaagttattaaaagtaaatggaagcaccactgccatttgtgccacaggccttcggaatttggggaacacatgtttcatgaatgccatccttcagtcactca

SEQ ID NO: 197308 - DNA, 5499 bp, Homo sapiens
  Payload ID: 18923
  Gene Name: ubiquitin specific peptidase 3
  ENST ID: ENST00000559192
  CDS Start-End: 7-174
gtggccatggagtgtccacacctgagctccagcgtctgcattgctccggactcagccaagttccccaacggctccccgtcgtcctggtgctgcagcgtgtgccggtccaacaaaagcccttgggtctgtttgacttgttcaagtgtccactgtggaaggatttggggaacctgaaaatactttgtacagataacttttttttaaaaaagaagaaaagtagaagcacttaaattctgcagttgaagagacagattcctctcctagattttgagaggtatgtgaatggccatgcaaaaaaacattatgaagatgcacaagtacctttaaccaaccataagaaatcagaaaagcaagataaagttcagcacacagtatgtatggattgcagtagctacagtacatactgttatcgctgtgatgattttgtggttaatgacaccaagctgggactggtacagaaagtcagagaacacttacagaacttggaaaactcagctttcacagctgacaggcataagaaaagaaaacttttggaaaactcaacactaaacagcaagttattaaaagtaaatggaagcaccactgccatttgtgccacaggccttcggaatttggggaacacatgtttcatgaatgccatccttcagtcactcagtaacattgagcagttttgctgttatttcaaagaactgcccgccgtggagttaaggaatgggaaaacagcaggaaggcggacataccacaccaggagccaaggggataacaatgtgtctttggtagaagagtttagaaagacactctgtgctttatggcaaggcagccagactgcatttagcccagagtccttattttatgttgtttggaagattatgccaaactttaggggctatcaacagcaggacgcccatgaattcatgcgctaccttttggaccacctacacttggaacttcagggcggtttcaacggtgtttcccgctcagcaattctgcaggagaattctactctgtctgcaagtaacaagtgttgcataaatggagcatctactgttgtcacggctatattcggaggcattctccaaaatgaggttaactgcctcatatgtgggacagaatctagaaagtttgatccattcctagacctttcattagatattccaagtcagttcagaagtaagcgctctaagaatcaagaaaatggaccagtttgttcgttacgagattgtcttcgcagttttaccgacttagaagaacttgatgagacagagttatatatgtgccataaatgcaaaaagaaacaaaagtccacaaaaaagttttggattcaaaaactacccaaggtgctatgcttacatttgaaaagatttcattggacagcatatttaagaaataaagttgatacatacgtagaatttccactgagaggcctagacatgaaatgctacttactagagcctgagaacagtggcccggagagctgcctgtatgacctcgccgctgtggtggtgcaccatggttccggggttggttctggacattacacagcatacgcaactcacgaaggccgctggttccacttcaatgacagtactgtaacactgactgacgaggagactgtggtgaaggcgaaggcctacatccttttctacgtggaacaccaggccaaagctggatcggataaactttaatacctcctccaaatcatcattcaccaaccataccagagaaacatttccagttttccacaaatacttgatacaagatttaatttcattatgcacttttcaatttcctattttggatttagttttgtcaatggtagtgacttactgaacatgggcaccaactaattttgttgttgttctaccagaaaacctcagcagatgttttgatttgctgctttagttgtaataattcaatttttataggtagttgtaagaacttagtcttatttgacttttttattttatgttaatgttttcagttctcactttgaggcacatttacatcaatgcttttgttcctctcacatgctgaaagcaagatgtgttccttattgtgaagagcgacacaactgcctgctgcctttccacagctataatggacatcaggttgactctaaatcaaggatcatgtgtgcacaatacttgtggcccacaaaatttcacaatgactgctgaggaatcattctttttgcctgtaaaatataacaaagggcatcattaagtagaccaggtaattactgcttgtctctcaaggctgctgtctttatcagcactaactaaataaatttgttggttcagttgtacttgtcctgcaaatacaagaattactctctttgttggtttttttggttttggggcatacttgtttgcggggaggtaagatgggagtaaagaccaaatacatgtaatgtttaaaaaaaatgctgtgactcactgacatggtataggtgttaccagtgaggtaaagccatggcgtctgcctccttttgaatcagtatctcattcccccttagttgtaccactggaagtcacgacatgtccattatagacttacttactgcttgtgtttggcatctgagtctgaggtgtgaccctctgggatttacttggatcatcacccgcacttcagtttatcactggggggtgtgcttccacaggaggaaatttagaatcttcgctgctctgggttttaacacctctctctggcctatcctgattgataggacaagttgaaaatactgttggagtaagtaagtggagttttcgttttgttttttgggggtttttggagacaagagtctctctctgttgcccaggctggagtgcagtggcacgatctcagctcattgcaacctcggcctcccgagtagcaattctcctgcctcaacctcctgagtagctgggattacaggtgcccaccactacacctggctaattttttttttgtatttttagtaaagacgggggtttaccatgttggctagggtggtctcaacctccctcctgacctcaggtgatccgcctgcctcagcctcccaaagtgctgagattacaggcgtgagccatcacgcccagacagttttgtttttaaaaaacagatttaactcaaagattcaaatttggaaccagaatcccatttaaagaaagcagttgtggtttctacaagtgttctaagacagtcctgtggtggttttttttttttcttttttttggttgggggcggtgggggttggtagacatagcctaccaattctccacaagggacaaaatgtatcttgtgttaagccaacgagactttctggcaattttttttttttttttttaatggagtcttactctgtccctcaggctggagtgcagtgtggcatgatcacagctcactgtagcctcaacctcccaggctcaagcgatcctcccacttcagcctcgaagtagctggcaccaccacacccagctaatttttaatatttttactagagatggggtttcaccacgttgcccaggctggtcttgcactcctgggctcaagtgatccacccaccttggcttcccaaggtgctagcattacaggcatgagccaccacgcccagcctgttctattaaaaacatcttgacctttttttttttttaagtttatgatataaaaacagtctggtggctttccctcaggttggatatctgaagttgtgggagcagatgtagctccatttccattttaatattaactggataaatcccacatcttcccagaacacatctgctaaacactttaacatgacaaggagcaaattacaattatgtgtaaacttatatcatccagtacaatggcccctagccacatgtgactgaaatttaaattagaaactcagtgccttcagtcacactagccacatttcaagtgctcagcacccacatacggcgtaggacaatgctggtctaaattttcactccaaagaataaaactttgccatcatgtttaggtcttacaactttgagtcctaaaagataatagggagatgtgtgcttaaattaatttacaatgctaaattatattaggttaaactgtatgaaaccctgctatttgatgagttctgatctacaaaaatgacagctccacctgatctgatgtatcacacattaacatcacatctaattcaacctgaaatgtgagtctcctttgatcttgcaaagtatctcctatgaatccgggctcttttgcttagaaggtagacagctgtaacctctaacattgatacttcgatcttcagtctctctgaatgggcagctgttaaacagtaaaggcctgggcagagttgatggtgaaaaaaagctgtatttttataccaaatggaacttcagcaacacgttggactactttgtcgggcagagtggtcttcagacaggtgatgctgttggcttaagagatgaacacgtcttctctctgaatttgtttttattggttggttttacttgaacagaaacgtttgaatggtgtgaagattctttagaaaagtgattggatccatctcaattgtgcacttgaacagcagtgatgtaaatgtgcttatttgtgttttcatttttaactgtgcagccttaccacacctattttgaaagctgatcttttgtcctcttcagggcttttcccttgtgccatgttgtctccagcaatatatgtggcttctggctcagagcttctgctgaggcagggcctcgcgctgagtcacatggctccttggaacaagaaaactttctcagaagtccccacacgggtgggtgacagaaacagtttgtggcaacacaaatctctctccatggtggagaaacctttgcttatccactgtattctactcagtgtatagtgatgacagatgtactagaattaaaccagtcaagtgtactggcccggggtgagtgttaaatgtgtatctcgcctgtggaacctactcagcagcttggtttctggggttgggggcatatttatttcttaaagccaaacctctccttcattggtttagtgtacataagtctatttagatacacttatcccactttaatctccaccagcccctaaactctctcctgtaccctctgttgctgaagtggcctcttcacctgggccctggaaaagccgatggaaaaagtctgttcctgcagccaaggcctgggtcccaggtgactaggagtagccataggaaggtgaggaaggagaagtgggcatgtggtgtcatctgtagtccaaggtctctgcgtctcgtcagtgggtgcagtgccttccccctcaggtgtgagcgtgatggactctagactgccttccatgagtgttggtcatgctatgatgtcatcatttgccattaaaacccagtttgtatgatgccaagaggattaattgtgcaagtgactgattcatttaaattgtaatcacatcccttttctgcttcaccaacctgaactgtttttaaaaatatcattaaaagtctgttctctttccttttga

SEQ ID NO: 197309 - DNA, 1681 bp, Homo sapiens
  Payload ID: 18923
  Gene Name: ubiquitin specific peptidase 3
  ENST ID: ENST00000560202
  CDS Start-End: 1-321
cattggacagcatatttaagaaataaagttgatacatacgtagaatttccactgagaggcctagacatgaaatgctacttactagagcctgagaacagtggcccggagagctgcctgtatgacctcgccgctgtggtggtgcaccatggttccggggttggttctggacattacacagcatacgcaactcacgaaggccgctggttccacttcaatgacagtactgtaacactgactgacgaggagactgtggtgaaggcgaaggcctacatccttttctacgtggaacaccaggccaaagctggatcggataaactttaatacctcctccaaatcatcattcaccaaccataccagagaaacatttccagttttccacaaatacttgatacaagatttaatttcattatgcacttttcaatttcctattttggatttagttttgtcaatggtagtgacttactgaacatgggcaccaactaattttgttgttgttctaccagaaaacctcagcagatgttttgatttgctgctttagttgtaataattcaatttttataggtagttgtaagaacttagtcttatttgacttttttattttatgttaatgttttcagttctcactttgaggcacatttacatcaatgcttttgttcctctcacatgctgaaagcaagatgtgttccttattgtgaagagcgacacaactgcctgctgcctttccacagctataatggacatcaggttgactctaaatcaaggatcatgtgtgcacaatacttgtggcccacaaaatttcacaatgactgctgaggaatcattctttttgcctgtaaaatataacaaagggcatcattaagtagaccagggcttttcccttgtgccatgttgtctccagcaatatatgtggcttctggctcagagcttctgctgaggcagggcctcgcgctgagtcacatggctccttggaacaagaaaactttctcagaagtccccacacgggtgggtgacagaaacagtttgtggcaacacaaatctctctccatggtggagaaacctttgcttatccactgtattctactcagtgtatagtgatgacagatgtactagaattaaaccagtcaagtgtactggcccggggtgagtgttaaatgtgtatctcgcctgtggaacctactcagcagcttggtttctggggttgggggcatatttatttcttaaagccaaacctctccttcattggtttagtgtacataagtctatttagatacacttatcccactttaatctccaccagcccctaaactctctcctgtaccctctgttgctgaagtggcctcttcacctgggccctggaaaagccgatggaaaaagtctgttcctgcagccaaggcctgggtcccaggtgactaggagtagccataggaaggtgaggaaggagaagtgggcatgtggtgtcatctgtagtccaaggtctctgcgtctcgtcagtgggtgcagtgccttccccctcaggtgtgagcgtgatggactctagactgccttccatgagtgttggtcatgctatgatgtcatcatttgccattaaaacccagtttgtatgatgccaagaggattaattgtgcaagtgactgattcatttaaattgtaatcacatcccttttctgcttcaccaacctga

SEQ ID NO: 197310 - DNA, 1742 bp, Homo sapiens
  Payload ID: 18923
  Gene Name: ubiquitin specific peptidase 3
  ENST ID: ENST00000558285
  CDS Start-End: 102-1613
aaatgcattcacaaagcacggatttgcaacttcagcattcctacatagccatggaatttataacttaatcacaggaaaatggggagaaattgggaaataacatgatgcaattggtatattgtgtatttttctttttattagtgtgccggtccaacaaaagcccttgggtctgtttgacttgttcaagtgtccactgtggaaggtatgtgaatggccatgcaaaaaaacattatgaagatgcacaagtacctttaaccaaccataagaaatcagaaaagcaagataaagttcagcacacagtatgtatggattgcagtagctacagtacatactgttatcgctgtgatgattttgtggttaatgacaccaagctgggactggtacagaaagtcagagaacacttacagaacttggaaaactcagctttcacagctgacaggcataagaaaagaaaacttttggaaaactcaacactaaacagcaagttattaaaagtaaatggaagcaccactgccatttgtgccacaggccttcggaatttggggaacacatgtttcatgaatgccatccttcagtcactcagtaacattgagcagttttgctgttatttcaaagaactgcccgccgtggagttaaggaatgggaaaacagcaggaaggcggacataccacaccaggagccaaggggataacaatgtgtctttggtagaagagtttagaaagacactctgtgctttatggcaaggcagccagactgcatttagcccagagtccttattttatgttgtttggaagattatgccaaactttaggggctatcaacagcaggacgcccatgaattcatgcgctaccttttggaccacctacacttggaacttcagggcggtttcaacggtgtttcccgctcagcaattctgcaggagaattctactctgtctgcaagtaacaagtgttgcataaatggagcatctactgttgtcacggctatattcggaggcattctccaaaatgaggttaactgcctcatatgtgggacagaatctagaaagtttgatccattcctagacctttcattagatattccaagtcagttcagaagtaagcgctctaagaatcaagaaaatggaccagtttgttcgttacgagattgtcttcgcagttttaccgacttagaagaacttgatgagacagagttatatatgtgccataaatgcaaaaagaaacaaaagtccacaaaaaagttttggattcaaaaactacccaaggtgctatgcttacatttgaaaagatttcattggacagcatatttaagaaataaagttgatacatacgtagaatttccactgagaggcctagacatgaaatgctacttactagagcctgagaacagtggcccggagagctgcctgtatgacctcgccgctgtggtggtgcaccatggttccggggttggttctggacattacacagcatacgcaactcacgaaggccgctggttccacttcaatgacagtactgtaacactgactgacgaggagactgtggtgaaggcgaaggcctacatccttttctacgtggaacaccaggccaaagctggatcggataaactttaatacctcctccaaatcatcattcaccaaccataccagagaaacatttccagttttccacaaatacttgatacaagatttaatttcattatgcacttttcaatttcctattttggatttagttttgtcaat

SEQ ID NO: 197311 - DNA, 542 bp, Homo sapiens
  Payload ID: 18923
  Gene Name: ubiquitin specific peptidase 3
  ENST ID: ENST00000561442
  CDS Start-End: 147-542
tttctttgacgcaagggctcgagacgcagccgccgtcggccgagcgcccggctagaagcgacaccagacggagcctccggagttcctccgcccccacctcgccgggtcctggagccgcagtcctcccagctgccctcctcgtggccatggagtgtccacacctgagctccagcgtctgcattgctccggactcagccaagttccccaacggctccccgtcgtcctggtgctgcagcgagatggagtttcaccattttaccaaagctggtctcgaactcctggactcaagcaatctgcctgcctcggcctcccaaagtgttgggactacagtgtgccggtccaacaaaagcccttgggtctgtttgacttgttcaagtgtccactgtggaaggtatgtgaatggccatgcaaaaaaacattatgaagatgcacaagtacctttaaccaaccataagaaatcagaaaagcaagataaagttcagcacacagtatgtatggattgcagtagctacagtacatactgttatcgctgtgatgatttt

SEQ ID NO: 197312 - DNA, 584 bp, Homo sapiens
  Payload ID: 18923
  Gene Name: ubiquitin specific peptidase 3
  ENST ID: ENST00000559873
  CDS Start-End: 67-306
agttcctccgcccccacctcgccgggtcctggagccgcagtcctcccagctgccctcctcgtggccatggagtgtccacacctgagctccagcgtctgcattgctccggactcagccaagttccccaacggctccccgtcgtcctggtgctgcagcggggctatcaacagcaggacgcccatgaattcatgcgctaccttttggaccacctacacttggaacttcagggcggtttcaacggtgtttcccgctcagcaattctgcaggagaattctactctgtctgcaagtaacaagtgttgcataaatggagcatctactgttgtcacggctatattcggaggcattctccaaaatgaggttaactgcctcatatgtgggacagaatctagaaagtttgatccattcctagacctttcattagatattccaagtcagttcagaagtaagcgctctaagaatcaagaaaatggaccagtttgttcgttacgagattgtcttcgcagttttaccgacttagaagaacttgatgagacagagttatatatgtgccataaatgcaaaaagaaacaaaagtccacaaaa

SEQ ID NO: 197313 - DNA, 958 bp, Homo sapiens
  Payload ID: 18923
  Gene Name: ubiquitin specific peptidase 3
  ENST ID: ENST00000557884
  CDS Start-End: 129-299
tcgagacgcagccgccgtcggccgagcgcccggctagaagcgacaccagacggagcctccggagttcctccgcccccacctcgccgggtcctggagccgcagtcctcccagctgccctcctcgtggccatggagtgtccacacctgagctccagcgtctgcattgctccggactcagccaagttccccaacggctccccgtcgtcctggtgctgcagcgccttcaaatgtttatctggtgtgactgtattatgccctcagagagtactgtatgttgcccaggctggcctcgaactctaggctcaagtgattcttctgcctcagcctcccaagtagctgggactacagatgcaatcaccaccacacttggcagtgtgccggtccaacaaaagcccttgggtctgtttgacttgttcaagtgtccactgtggaaggatttggggaacctgaaaatactttgtacagataacttttttttaaaaaagaagaaaagtagaagcacttaaattctgcagttgaagagacagattcctctcctagattttgagaggtatgtgaatggccatgcaaaaaaacattatgaagatgcacaagtacctttaaccaaccataagaaatcagaaaagcaagataaagttcagcacacagtatgtatggattgcagtagctacagtacatactgttatcgctgtgatgattttgtggttaatgacaccaagctgggactggtacagaaagtcagagaacacttacagaacttggaaaactcagctttcacagctgacaggcataagaaaagaaaacttttggaaaactcaacactaaacagcaagttattaaaagtaaatggaagcaccactgccatttgtgccacaggccttcggaatttggggaacacatgtttcatgaatgccatccttcagtcactcagtaacattgagcagttttgctgttatttc

SEQ ID NO: 197314 - DNA, 554 bp, Homo sapiens
  Payload ID: 18923
  Gene Name: ubiquitin specific peptidase 3
  ENST ID: ENST00000559276
  CDS Start-End: 437-554
ctttgtgtgccttcggttctcatctggttttcaggagagttaaatgtttaagtggttttaggaggaagacttgagtctgagacatgttttagaggctggggctcttcccaccctctccatggcccagcatatgtgatagcttctaccttctggagaatggctctagctcaggagaggatagagcttcttcatctcctccatgcaaaggagccctcctgccatcttgaagagcttgaggctgaggtgagaacagggacagaggaagattctgaagccgtagctgaagaggaggcagtgaaaggagcctaccttcaaatgtttatctggtgtgactgtattatgccctcagagagtactgtatgttgcccaggctggcctcgaactctaggctcaagtgattcttctgcctcagcctcccaagtagctgggactacagatgcaatcaccaccacacttggcagtgtgccggtccaacaaaagcccttgggtctgtttgacttgttcaagtgtccactgtggaaggtatgtgaatggccatgcaaaaaaacattatg

SEQ ID NO: 197315 - DNA, 3742 bp, Homo sapiens
  Payload ID: 18924
  Gene Name: ubiquitin specific peptidase 30
  Uniprot ID: Q70CQ3
  ENST ID: ENST00000257548
  CDS Start-End: 94-1647
gttccgctgtctcgggaaccgtcgtatccctcggtccggcggcggcggcggcggtagcggaggagacggtttcaggcctccggtgcggctgcaatgctgagctcccgggccgaggcggcgatgaccgcggccgacagggccatccagcgcttcctgcggaccggggcggccgtcagatataaagtcatgaagaactggggagttataggtggaattgctgctgctcttgcagcaggaatatatgttatttggggtcccattacagaaagaaagaagcgtagaaaagggcttgtgcctggccttgttaatttagggaacacctgcttcatgaactccctgctacaaggcctgtctgcctgtcctgctttcatcaggtggctggaagagttcacctcccagtactccagggatcagaaggagcccccctcacaccagtatttatccttaacactcttgcaccttctgaaagccttgtcctgccaagaagttactgatgatgaggtcttagatgcaagctgcttgttggatgtcttaagaatgtacagatggcagatctcatcatttgaagaacaggatgctcacgaattattccatgtcattacctcgtcattggaagatgagcgagaccgccagcctcgggtcacacatttgtttgatgtgcattccctggagcagcagtcagaaataactcccaaacaaattacctgccgcacaagagggtcacctcaccctacatccaatcactggaagtctcaacatccttttcatggaagactcactagtaatatggtctgcaaacactgtgaacaccagagtcctgttcgatttgatacctttgatagcctttcactaagtattccagccgccacatggggtcacccattgaccctggaccactgccttcaccacttcatctcatcagaatcagtgcgggatgttgtgtgtgacaactgtacaaagattgaagccaagggaacgttgaacggggaaaaggtggaacaccagaggaccacttttgttaaacagttaaaactagggaagctccctcagtgtctctgcatccacctacagcggctgagctggtccagccacggcacgcctctgaagcggcatgagcacgtgcagttcaatgagttcctgatgatggacatttacaagtaccacctccttggacataaacctagtcaacacaaccctaaactgaacaagaacccagggcctacactggagctgcaggatgggccgggagcccccacaccagttctgaatcagccaggggcccccaaaacacagatttttatgaatggcgcctgctccccatctttattgccaacgctgtcagcgccgatgcccttccctctcccagttgttcccgactacagctcctccacatacctcttccggctgatggcagttgtcgtccaccatggagacatgcactctggacactttgtcacttaccgacggtccccaccttctgccaggaaccctctctcaactagcaatcagtggctgtgggtctccgatgacactgtccgcaaggccagcctgcaggaggtcctgtcctccagcgcctacctgctgttctacgagcgcgtcctttccaggatgcagcaccagagccaggagtgcaagtctgaagaatgactgtgccctcctgcaaggctagagctgatggcactgtctgcactgtccaggaaaaaagtaaaactgtactgttgcgtgtgcaagcggccccactagagccttccagccttctggtgtgttctaagagcaggctccacctgggagccagccccagttcacaccaaaccaggctccctgaacagtcctgttcatgtgtgtaggtggttctgttgtgttaagaaagcattcattatgtccggagtgtctttttactcatctgatacaggtaattaaaagaactcagattcttgaagccaccgttttcatattgtaatgttaggtgttctcagaggggaggtacctttgtctaatcaacgtttccacttagatcttttatttttaataagcaggcccataaaaattgttgacaagaattaatgaaattattaaaggcaacaatttagaagaaaaagtgcctttcactttcgattgcttttgtagcacgtccattgtgaaatattccttccaggctactcaaaggatagcaagagaacaggtaaatgatgcctaaagaacaccttcctttttctatgccttttctaatctttcaattctttctatggagtaaaggctcatctgccaaatctgccccctggggaaactctttcactactttgtcagttataagtgaagagcttacttgttgcttttatcttttgtatattggactgagatgtaattacactgtattataaaactctgtgaatagccagaactgagctggatctttgcaacacctgattcctctgctctgtggaaaactttttcttacacaaggatccactgtggacggttactttcatctgtttatttattgcccatgcagagctcttaaggtttacaggtgggagcttggggctgtataaaaaaataatccctgccctgagttgacacctggcttaggaaggaagggctgactatggggctgcagtctctctgaacctcagtttcctcatttgtgaagtgaagggttagatttgatgaccaccaaagttcagcccttttcacgaaaaggagaaagcagcttttgactttttaaaaaacatataactacagctggcatctagtattgtcatgttgctctaggtccatattctgaatttattcatttccaatagcctaatacaaaaagtatatattgagcactttcttcccttttcaggtaagtctctgaatgcagcccagggccaaaggaattttgatgacacagtagtacctatgttttaagctatatttttaatttagaaaaatggataccaaattcaaaccgactcatcagaggtaagatttggaatcagacctttccaaaaggtcatctgaggtaaggctaagaccgcacttcctctgctgggggtgagctggcagacacaccaaacagtgccttggcagcagctcacagtgcaggaagcccaggtgatcactcttctgctgggcccaggctgcaccctgaggactcagtaactcactctcaacagaatattctgtgcaggctctccaggctctgggcgtcagggtgcaaggggcagcttgaactgtacggtccgtcctgcactcacccgatgcagaccttgactttgatgttgaaatgaacacacttgttttacccaagtctggtggaacaaatgcccaatcatgtgaccttaaagtgtactgcaaagctgtagctttaagtaattgctgttctgccactgcttactctgaaatctaccatcaaagaaagatagagaaaaggggctgagccttggaatatatggttataagcagatctttctttggtcagagaccagggtttgagccaaggctgtaaatgtgaacaatagctgtgcaaagccttttaacctgacttcttcattttgtaaattattatgcattaagtagcagcccaataatctgatttctagttttattttcaaagtaagtagcttcttttgggaaaaacctaagttaaactagtagttttgccataataactgctgatttatgtatttgctaaaggtacttttgtatctgctgtgtattatagcaataaaataatcattttgttagaaaaaaatca

SEQ ID NO: 197316 - DNA, 2483 bp, Homo sapiens
  Payload ID: 18924
  Gene Name: ubiquitin specific peptidase 30
  ENST ID: ENST00000392784
  CDS Start-End: 577-2037
atccccattgttgcatagctgggaaagggagctggacaacctggtaccttttcgattatggattcaaatgtctctgaagtattgacaggatttcaccatgttagccaggatggtctcgatctcctgatctcgtgatccacctgccttggccccccaaagtgctgggattacaggcgtgaaccaccacaccagcctaaagcagcattttttggtgtgtctgtaagggtgtttcaagaggagattgctgtgtgagtctgagtggacaaagttcaggaagatctgccctcgatgtgtgaatgagcaccatcaaatcagctagaggcccagacagaacagaaacagaggaaagagacagagtcttgctatgtaacccaggctggtctcgaactccggcttcaagcaatcctcctgcctcagcctcccaaagtgctgggattatagaccggacactaagacccagcgctgaggacaaaaggaagcaagctctgcatatttgaagtgttgcaaactagggtccatcctctgggccagccctctcctctagtgacttactcagagtgtgttggatataaagtcatgaagaactggggagttataggtggaattgctgctgctcttgcagcaggaatatatgttatttggggtcccattacagaaagaaagaagcgtagaaaagggcttgtgcctggccttgttaatttagggaacacctgcttcatgaactccctgctacaaggcctgtctgcctgtcctgctttcatcaggtggctggaagagttcacctcccagtactccagggatcagaaggagcccccctcacaccagtatttatccttaacactcttgcaccttctgaaagccttgtcctgccaagaagttactgatgatgaggtcttagatgcaagctgcttgttggatgtcttaagaatgtacagatggcagatctcatcatttgaagaacaggatgctcacgaattattccatgtcattacctcgtcattggaagatgagcgagaccgccagcctcgggtcacacatttgtttgatgtgcattccctggagcagcagtcagaaataactcccaaacaaattacctgccgcacaagagggtcacctcaccctacatccaatcactggaagtctcaacatccttttcatggaagactcactagtaatatggtctgcaaacactgtgaacaccagagtcctgttcgatttgatacctttgatagcctttcactaagtattccagccgccacatggggtcacccattgaccctggaccactgccttcaccacttcatctcatcagaatcagtgcgggatgttgtgtgtgacaactgtacaaagattgaagccaagggaacgttgaacggggaaaaggtggaacaccagaggaccacttttgttaaacagttaaaactagggaagctccctcagtgtctctgcatccacctacagcggctgagctggtccagccacggcacgcctctgaagcggcatgagcacgtgcagttcaatgagttcctgatgatggacatttacaagtaccacctccttggacataaacctagtcaacacaaccctaaactgaacaagaacccagggcctacactggagctgcaggatgggccgggagcccccacaccagttctgaatcagccaggggcccccaaaacacagatttttatgaatggcgcctgctccccatctttattgccaacgctgtcagcgccgatgcccttccctctcccagttgttcccgactacagctcctccacatacctcttccggctgatggcagttgtcgtccaccatggagacatgcactctggacactttgtcacttaccgacggtccccaccttctgccaggaaccctctctcaactagcaatcagtggctgtgggtctccgatgacactgtccgcaaggccagcctgcaggaggtcctgtcctccagcgcctacctgctgttctacgagcgcgtcctttccaggatgcagcaccagagccaggagtgcaagtctgaagaatgactgtgccctcctgcaaggctagagctgatggcactgtctgcactgtccaggaaaaaagtaaaactgtactgttgcgtgtgcaagcggccccactagagccttccagccttctggtgtgttctaagagcaggctccacctgggagccagccccagttcacaccaaaccaggctccctgaacagtcctgttcatgtgtgtaggtggttctgttgtgttaagaaagcattcattatgtccggagtgtctttttactcatctgatacaggtaattaaaagaactcagattcttgaagccaccgttttcatattgtaatgttaggtgttctcagaggggaggtacctttgtctaatcaacgtttccacttagatcttttatttttaataagcaggcccataaaaattgttgacaagaattaatgaaattattaaaggcaacaatttagaag

SEQ ID NO: 197317 - DNA, 476 bp, Homo sapiens
  Payload ID: 18924
  Gene Name: ubiquitin specific peptidase 30
  ENST ID: ENST00000536393
  CDS Start-End: 38-476
gcggaggagacggtttcaggcctccggtgcggctgcaatgctgagctcccgggccgaggcggcgatgaccgcggccgacagggccatccagcgcttcctgcggaccggggcggccgtcagatataaagtcatgaagaactggggagttataggtggaattgctgctgctcttgcagcaggaatatatgttatttggggtcccattacagaaagaaagaagcgtagaaaagccttgtcctgccaagaagttactgatgatgaggtcttagatgcaagctgcttgttggatgtcttaagaatgtacagatggcagatctcatcatttgaagaacaggatgctcacgaattattccatgtcattacctcgtcattggaagatgagcgagaccgccagcctcgggtcacacatttgtttgatgtgcattccctggagcagcagtcagaaataactcccaaacaaattacctgccgcacaa

SEQ ID NO: 197318 - DNA, 534 bp, Homo sapiens
  Payload ID: 18924
  Gene Name: ubiquitin specific peptidase 30
  ENST ID: ENST00000539121
  CDS Start-End: 249-534
agggttggaggcctgggcccgtaggtgggaggactgacgggctccagtccttcggcaacaccaattctgtctgcactccccagtttccatcttgaacttcgtggttttaagcacagacctggggagacagacaggcatgattcagagccatgttccttcactcactgtgaccaagttgggctcttagtttcttctgctataaaaatgaaagtgatagtagaacctgcatctgtggggttgttttaaaaatgagatataaagtcatgaagaactggggagttataggtggaattgctgctgctcttgcagcaggaatatatgttatttggggtcccattacagaaagaaagaagcgtagaaaagggcttgtgcctggccttgttaatttagggaacacctgcttcatgaactccctgctacaaggcctgtctgcctgtcctgctttcatcaggtggctggaagagttcacctcccagtactccagggatcagaaggagcccccctcacaccagtatttatccttaacactcttgc

SEQ ID NO: 197319 - DNA, 826 bp, Homo sapiens
  Payload ID: 18924
  Gene Name: ubiquitin specific peptidase 30
  ENST ID: ENST00000536723
  CDS Start-End: 295-826
gctgtctcgggaaccgtcgtatccctcggtccggcggcggcggcggcggtagcggaggagacggtttcaggcctccggtgcggctgcaatgctgagctcccgggccgaggcggcgatgaccgcggccgacagggccatccagcgcttcctgcggaccggggcggccgtcagccctatgaggtaggtcttatggattgtccccattgtacagatgaggaaactgaggcttagaaggtgaagtgatgccaaatgaaatagcaaagccaggattgaaccagaataagatataaagtcatgaagaactggggagttataggtggaattgctgctgctcttgcagcaggaatatatgttatttggggtcccattacagaaagaaagaagcgtagaaaagggcttgtgcctggccttgttaatttagggaacacctgcttcatgaactccctgctacaaggcctgtctgcctgtcctgctttcatcaggtggctggaagagttcacctcccagtactccagggatcagaaggagcccccctcacaccagtatttatccttaacactcttgcaccttctgaaagccttgtcctgccaagaagttactgatgatgaggtcttagatgcaagctgcttgttggatgtcttaagaatgtacagatggcagatctcatcatttgaagaacaggatgctcacgaattattccatgtcattacctcgtcattggaagatgagcgagaccgccagcctcgggtcacacatttgtttgatgtgcattccctggagcagcagtcagaaataactcccaaacaaattacctgccgcacaagag

SEQ ID NO: 197320 - DNA, 805 bp, Homo sapiens
  Payload ID: 18924
  Gene Name: ubiquitin specific peptidase 30
  ENST ID: ENST00000377883
  CDS Start-End: 76-183
ccgtcgtatccctcggtccggcggcggcggcggcggtagcggaggagacggtttcaggcctccggtgcggctgcaatgctgagctcccgggccgaggcggcgatgaccgcggccgacagggccatccagcgcttcctgcggaccggggcggccgtcagccttgtcctgccaagaagttactgatgatgaggtcttagatgcaagctgcttgttggatgtcttaagaatgtacagatggcagatctcatcatttgaagaacaggatgctcacgaattattccatgtcattacctcgtcattggaagatgagcgagaccgccagcctcgggtcacacatttgtttgatgtgcattccctggagcagcagtcagaaataactcccaaacaaattacctgccgcacaagagggtcacctcaccctacatccaatcactggaagtctcaacatccttttcatggaagactcactagtaatatggtctgcaaacactgtgaacaccagagtcctgttcgatttgatacctttgatagcctttcactaagtattccagccgccacatggggtcacccattgaccctggaccactgccttcaccacttcatctcatcagaatcagtgcgggatgttgtgtgtgacaactgtacaaagattgaagccaagggaacgttgaacggggaaaaggtggaacaccagaggaccacttttgttaaacagttaaaactagggaagctccctcagtgtctctgcatccacctacagcggctgagctggtccagccacggcacgcctctgaagcggcatgag

SEQ ID NO: 197321 - DNA, 615 bp, Homo sapiens
  Payload ID: 18924
  Gene Name: ubiquitin specific peptidase 30
  ENST ID: ENST00000470117
  CDS Start-End: 1-276
cccgactacagctcctccacatacctcttccggctgatggcagttgtcgtccaccatggagacatgcactctggacactttgtcacttaccgacggtccccaccttctgccaggaaccctctctcaactagcaatcagtggctgtgggtctccgatgacactgtccgcaaggccagcctgcaggaggtcctgtcctccagcgcctacctgctgttctacgagcgcgtcctttccaggatgcagcaccagagccaggagtgcaagtctgaagaatgactgtgccctcctgcaaggctagagctgatggcactgtctgcactgtccaggaaaaaagtaaaactgtactgttgcgtgtgcaagcggccccactagagccttccagccttctggtgtgttctaagagcaggctccacctgggagccagccccagttcacaccaaaccaggctccctgaacagtcctgttcatgtgtgtaggtggttctgttgtgttaagaaagcattcattatgtccggagtgtctttttactcatctgatacaggtgttctcagaggggaggtacctttgtctaatcaacgtttccacttagatcttttatttttaataagcaggccc

SEQ ID NO: 197322 - DNA, 10699 bp, Homo sapiens
  Payload ID: 18925
  Gene Name: ubiquitin specific peptidase 31
  Uniprot ID: Q70CQ4
  ENST ID: ENST00000219689
  CDS Start-End: 1-4059
atgtccaaggtaacggcgcctgggtccgggccgccggcggcggcgagcgggaaggagaagcgctccttcagcaagcggctgtttcggagcggccgcgctggcggcggcggcgcggggggccccggggcgtccgggccggccgcgccttcctcgccctcctcgccctcctctgcacgctcggtgggcagcttcatgagccgcgttctcaagacgctgtccacgctctcgcaccttagctctgagggcgccgccccagaccgcggcggcctccgcagctgcttcccgcccgggccggccgccgcgcccacgccgccgccgtgcccgccgccgcccgcctctcccgcgccgcccgcttgcgccgccgagccggtgcccggcgtggcggggctccgcaaccacggcaacacgtgcttcatgaacgccacgctgcagtgcctcagcaacaccgagctcttcgccgagtacctggcgctgggccagtaccgggcggggcggcccgagccctcgcctgacccggagcagcctgcgggccgcggcgcgcagggccagggcgaggtcactgagcagctggcgcacctggtgcgggccctctggaccctggagtacaccccgcagcacagccgcgacttcaagactattgtgtcaaagaatgcactgcagtaccggggaaattcccaacatgatgcccaggagtttctgctgtggcttttggaccgagttcatgaagacctcaaccattcagtgaagcagagtggccagcctcctctgaagccaccatcagagactgatatgatgcctgagggaccatctttccctgtctgtagcacttttgtacaagaactctttcaagcgcaatacagatcttctttgacgtgtcctcattgtcagaaacagagcaacacttttgatcctttcctttgcatttctttgccaattcctctgccccacacaaggcctctctatgtcactgtagtgtatcaaggcaaatgttctcactgcatgaggattggtgtggccgtacctctgtctgggactgtcgccagacttcgggaagcagtgtctatggaaacaaagatccccactgatcagattgtgttaacagaaatgtactatgatgggttccatcgttccttttgtgatacagacgacctggaaacagtccatgaaagcgactgcatttttgcctttgagactcccgaaatatttaggcctgaaggaattctcagtcaaagaggaattcatttaaacaacaacctaaaccacttgaaatttggcttggattatcatagactgtcttctcctacacaaacagcagcaaagcaggggaaaatggattctcccacatcaagagcaggcagcgacaagattgtcctgttggtgtgtaaccgagcctgcactgggcaacaagggaaaagatttggactgccttttgtgctgcacttagagaagacaatagcttgggaccttctgcagaaggaaatcttggagaagatgaagtatttcttgaggcccacggtttgcattcaggtgtgtccattcagcttgcgtgtggtcagtgttgttggaataacatatttgctgccccaggaggagcagcccttgtgccacccaatagtagaaagggcattaaaatcttgtggaccaggtggcactgctcatgtgaaattagtagtcgagtgggacaaggagacaagagatttcttatttgtaaatactgaggatgagtatattcctgatgcagaaagtgttcgtctgcaaagggagcgtcatcatcagcctcaaacctgcactttatcccagtgtttccaactgtacaccaaagaggagcggcttgcccccgatgatgcctggcgttgcccacactgtaagcagctgcagcagggaagcattacgttaagcctctggactctgcctgatgtgcttattatacatctaaagagatttcggcaggaaggagacaggcgcatgaaacttcagaacatggtcaaattccccttgactggcctggacatgacacctcacgtggttaagaggagccagagcagctggagtttgccatcgcattggtccccgtggagacggccctatggactcgggagggaccctgaggactacatctatgacctgtatgctgtgtgcaatcaccatggcaccatgcaaggggggcactacacagcgtactgtaagaactctgtggacggcctctggtactgcttcgatgacagcgatgtgcagcagctgtcagaagatgaggtctgcacgcagacagcatacatcctcttctaccagaggcggacagccatcccgtcatggtcagccaacagctcggtggcaggctccacaagttcttccctgtgtgaacactgggtgagccggctcccgggcagcaagccagccagcgtgacctctgcagcttcctccagacgcacctccctggcgtcgctctctgagtccgtggagatgactggagaaaggagtgaagatgatggaggcttttcaactcgaccatttgtgagaagtgtccagcgtcagagtttgtcatccagatcttctgtcaccagccccttggccgtcaatgaaaattgcatgagaccttcatggtccctgtctgctaagctgcagatgcgctccaattctccatcccgattttcaggggattcgccaattcacagctctgcttccaccttggagaagattggggaggcagcagatgacaaggtctccatctcttgctttggtagcttgcggaacctttctagcagttaccaggaaccaagcgacagtcatagtcgccgtgagcacaaggctgtgggccgggcccctctggctgtcatggaaggcgtgttcaaagacgaatcggacacccgcagattgaactccagtgtcgtagatacacagagcaaacattcagcacaaggggaccgcctgcccccgctctctggtccatttgataacaataatcagatcgcttatgtggatcagagcgactccgtagacagctctccagtcaaagaggtgaaagcccccagccacccaggctcactcgcaaagaaaccagagagcacaactaagagatcccccagttccaaaggcacttctgagccagagaaaagcttgcggaaggggagaccagccttggcaagccaggagtcatccctttcaagtacatccccttcttctcctcttcctgtaaaagtctctctaaagccctcccgctcccgcagcaaagcagattcttcttccaggggcagtggacggcattcatcccctgcccctgcccaacccaaaaaggagtcatccccgaaatctcaggactccgtgtcatctccttcgccacagaagcagaagtcagcctcggccctcacctacactgcttcctccacatctgccaaaaaggcctcgggccctgccacaaggagccctttcccacctgggaagagcaggacttcagaccacagcttgagtagagagggctccagacaaagcttgggttctgacagagccagcgccacctccacctccaaacccaattcccctcgggtgagccaggcccgagcaggggagggcaggggggccgggaagcacgtgcggagctcctccatggccagcctgcgctcccccagcacaagcatcaagtctggtttgaagagggacagcaagtctgaggacaaggggctgtccttcttcaaatcagccttgagacagaaggaaacccggcgctcgacggatcttggcaagacagccttgctctctaaaaaggctggtgggagctctgttaagtctgtctgtaagaacaccggggacgacgaggcagagagaggccaccagcctccagcttcccagcagccaaatgcaaatacaacgggaaaagagcagcttgtcaccaaggaccctgcttctgccaaacattccctgctgtccgctcgcaaatccaagtcttcccaactagactctggagttccctcgtctccgggtggcaggcagtctgcagagaaatcctcaaaaaagttatcttctagcatgcaaacctctgcacggccttctcaaaaacctcagtgatatttctgcaatcaaagtgttttatctgtaaagatgtttatttatttagaacccctgccctcccaccaaagcctcctgtgcttttgttttgtacttttttgagtcacgtgcccgactgtgtgtgtgtgtgtgagtgtatgcgtgtgtgtgtctaattcaattgcaaattgttcaaagcgtcgccttattctgccattgaaccaaataacagccataggcaaaacattgacaccaagctaactggaataattgtagacgatacccaggacggtccctttagcaattgtacatatttctttctagagaactctaatgactttctttggatatgagggttttgaaacctgtgaaccagaaaagctaccattagtgcgtagaaggaggaaggagctgactcgtgtttcttctgagcaggacttgtccttactgtggattgtgggtggcaccaggagctctaaaaactgtgactctaacaacgaaacaaatcgagggaaaaactcttgctttctgcactttcgccccatctaccagtctttgtaaagggcaatattttaacactaatgtttctcaggtatatactcagctagtctaggatggttgcacaccagtaaatggattaaagaggaaggtgccatgtgggtgactgtgtcatttctcctactgccacagatagacattttcgaggtagaaatgaagcctttcaccaccttcctatctgtggtgacatgtgcaccaaaacctgtcttgactcttgggataggtcctaggaagtggcagattggatagccagaaagccagtcactcgtttaattttttttccttctgaaattactagctaaggctcttggaattttgcactgtagtagagcagttaacacctttgacagattcctggaaaaaacttctagattctaaactgggtgaaagactggacatcattttccttgtcaggtgttgcatttttccgttagaggtgggaagctccacgatgccctgtgtctgtgggctcatgttccctcatcttgtagcttggagaggaaagaagttgccttctgccaaaagccaatggtggtatgttgaagcgttgtgtgatcaagtgttacatatgcacttcagatcctgtctgtcagtctctgttagggctgcctttcagtaactcatttattatttcttctttgttcttaagatttcatctcatgcccagaactcacaagcaggttttggagtgtgttccatctggccgtgtcagtgcaaattgcatttcttacaaaggagaacctcaccaaaaaaaacctcacagataagcaaagtatatagttttgcaagctttttcaaggtctcctggcaatactttcctgctcaatttttagcttttcttttttttttaaatgtcaagagagtgaaggtcttgattctctctgaatagcatttgtcactttgccagtaaatacagcatgctaagtttatgtgcttttaaatattagcgtttttcgtcagactcttcaagttcttcttgaacccttggtgcacagatccatatataacctcccttttcagtattgctgtgtgtgaattaactacaacacatatgcatgcatagctgtgaattctgcactactttttttttcttttttccccccaagaatatctcttgggaaaagtttttagtacgttacttaactttattttgctgctaatttgcgcattagccggtaacttgcaagtctggagaccacttactgttgagggtagctggaattttagacccttggcagtatttaagatttagacatttagccttgtgaaagttaccacagtgctccatgtgattcattgactgtgagcctgttgtccattgcactcagccctgtactcacttcttcactcgctgtcctggttttactgttcagattttggtgggttctcaaagcagtaccactctcatctgctcagtacatctgcggcaactggctgccttcgatgctgtcattgcgttcagcccagcacatcacagccccatcagtgtgtagccaccgctctcgtttttctgtatcgcttttatctcctgaaaaagatgcaccaaataagagatcatctatatcaggaattgaatgtctaactcaaacctctcatttttgtttaataggtagatctcatttgaagtctcctatctgaatctctgaaacaattatagtttgattagacaaaggtttttaataacacttcttttttgctgtagtcaagcattaatagaaactagtttaattttcacagtggtaaatatttttattcttgagttatctaggaatggattttccacgatgtctagtgacttaaaaaaaaaaaggaaaaacgtttctacaaatccctttggttttccatgggatctggaataaaatgtcagtgtctataaactgtatgtcatggagtttagtccttgtttcaggtttaatagaaaaaatcaggaagtatcatggcattgtctagacatcatgaagctattttatttccatagttggtaaacagtgaaaatttcattatctccaactactaggtacaactttaggccacaggaaaggttatttggcccgaaagtttggaggtgctccttgaggtgggaagtatcttgtgggaaagtagttacttgattcaatttagttcattggtagggttggggacttggtgttggtttctttctttcttttctttttttttttttttttaattttcccagcaatatttagcacaatgagcgtgtatgtgctttggggttaaaaattatctgctagggatgataggcctgggtttctcgttgacatctagatgggcctgattagagcagtcatctcctggtaggcacaaaataatcaccaacagtaatgttgtatctgtaatgtttgtttgctttttaaagttttattcttgatttcttgtaaacatccattgcactgaggccgtatcattccttaagacagccctacatcttgccttggtaatcccttagataatgtggaaactcaaaccgttaggctccagtcatcttagaccatttcccatccgttttgtattttctcgtcctgaaagcagctgaactgaaagtaagtaataatatgctggaccagtgggaacggatgtgggagtatttgtggtgtgctaaaatactgtaattatctgtgaggctgcctgacacgcttttgcaatcttgttttcatcattcattctgcaaacgtttatggagggccttctttgagcacagaggcaaaactgaaagcttcagggatttgctgtagctgaggagccctgggagcacagcccatcaagcaagggatgtgatggtgtcctaaatggagtgacagttctcctgggaaaagagatcacgtggattccggtcaaatcggctaaggcttgtggttctcttgagcaagtctgttccttctggaaaccaaaagtgcccttcatctttagagacattttactcttccatccaccttttcagactgagctgtctctactatttaggggttgaaaatccattacacagtcactttacgttaacattgggtcatcttatgtttgtatgagacggatgtgggatttgaggggaacattgtcattcccttaaaataactatcatgaaaaaaatagcaacagtatgtaaagggaccaagagtggcagcctttagggaaaatggagcagagaagagctgtgaacaaagctcatttatttgaaataagcgtgctttatttcacatagaggggcatcagacgttacatttcattcggacaaattactgaacagccgaagtgattgtttccaatgtaggttattataattattggatacaaagatttaactagtgtttctgggttggatttttgaaatagtatgcaagtcataagcacagtttcaataaaacacgtattctggaggtgcgtggaactttgtattatttgtagttgagaaaggcaaactttgctgacaaaccagtacctatcacaaacgaacacaaaaagtagctgttactgtgcaggctgtctttaactttcatttcataaagggtacattattgttaaactctactacatggtttggggagaaatccagtggttttatttaaatgaacactctcacactgccttttgatcaactttcaaagtattttgcagatgcattttgagcatgaccatttttttccccaagtaaaaacaattgtgcgtggcctccatataactcagaaagcatgctcttactacctatgcaagcaaacaataaaacatatagacatgaaatgttaagtcttaaaaaaaaaaggcaacaattatggagctctatttttaaatttgtgattttcaaaatatggcttactcatcattgtgtagaagagcatgaatgcgatttcttgttttgctctgcatatatttctctgctgtttttctgatcattggcgagattgtaaagtattttgcaagcagaagtggaattggatatgttgaacacacatcattggtgtacatactgtatttagcctgaagactttcctaaagtgttttgttctaaaaataacctgccattttctatagattttaattttttatatcttcaagggttctattttggtcacaaggaaagaatgtggcttctaatagtgctaagaattaaaagatgcttttatagagacttagagctattttgaaaagctttggggcttcccagccactgatcacaattagactaagcccatggaatttctgggagtgttgtgcagtggattcggttctagatccatcttacatttgtttagtgtttcccaatttttgggagaaggggtgcacagcaaatttgagagacttttttgaatctcacacatgtattttcctcaagattcttttaagcctcttctgaatgacttgtctgagatagtgaagacccacattaactagaatcagctggggaactttaaaaaatacagtgcctgggtcccagtccctagcttttgatctaattcatgtaggggtgggatccaggaattaccatgtattttaaaagcttctgggtgtttctaatttgcagacagattgagaaccactatgatacgtcatccctttactgagaattatggcgagaatcactgccatttgaattactcaggagtgactgattcctcagttgtgtaggagaagcagaaaaaataagaataaaaagaattgagagatactgatatcaaactcccatttgaaatacaagggcccttctgattcaaggcccagttggggagcttggaccatgttgtgaatggcctagcactcgccagtctggtggaaattggtggtcttagttgctggagcaggctgagtgtccccgcggggtttgcatctgtccccagaaccttttccccaggcccgtgggggaatagggaagtcactctgagctagaaattgtcgaagaagaaaagaaacaaccttcctagccttggaaagcctgtccctgcttttgatagaattattgcctttttgtaggaattacagtagcaaaccccaggctgccgctgaatttcctacttttgctcattctctaggatagttcttatccagaatgtggtttcaggaattcttttttttagtttgaaaatgaatgtgaaacattttctttggtgtcttttttttaaaaaaaaaaaacccttattgctattttttcgtgtttttgttttgttttgttttttgtttgttttaccattaagtaatacacatcccagaatttggcactctgtgttaactgtggaggcaaataaaatttagttttaatctgtggtgagctgaatgcactacaacaccttcgaagtaatctgatggtttcattctgtcgagcctcatgctgcctacaaaacaccacaatttacctggtgttttcaacattttaaggaatgaagatacaagtagacatgcaagttggaaatgtttctttagaaaggccatccagaataatgatatctgttgcagtcgtccaaatgcaatatgaaatttcctaggtgctattataaacggtgtggtgtcataccaaatgcaaaagcagttacagtatttccgaagttggagttctctttgtaggcctttcaaatacgtgtttgcattccatagaggtctgctcaccaactgtgcctctcaccactggttaaaattgaatttaagcctcattgacataagtcgtttcttgattgaactcttcagtttttacactggaatttctgtagttgtcttgaaagctgcatgtcacatcactgtacacaaagtgctttggtattactcatgcaccgtggatagtgatttctgtgtcgttttcattttcagttgtacagtaatatggaaggcaggatgtctttcctagaggctggaagaaaagtgtatcgtacattttaaatttattttagaacaagtgcatgagatgtgtcactgatttctgttatttatttgtatgttttattattcaaagtgtatgcacttttaagaagcagaatttatatttttacgtttgaaacgttttatttctgaaacagcgttgattatatagtatacagttggaattaagagaaaagtggaaaatgtaacaaaatacaataaatttattacaagatgtcctcttcaa

SEQ ID NO: 197323 - DNA, 2142 bp, Homo sapiens
  Payload ID: 18925
  Gene Name: ubiquitin specific peptidase 31
  ENST ID: ENST00000567975
  CDS Start-End: 138-2075
catgtagatgcttcataaatatttgtagaatgaatgtatgagtgcttgtctattccattctcttgccaattctttagactcagacttacattataaagtattcatccctatccttgcattttattactacaaatttcatgcgtcaggaagtctgccttacatcttttcatcttaactggggatattcggacaggcacgacatgacacagggtctgggaattgatgctgacctcggggtgaggacatcaacgccccccagctcagctcgtaacaccttcatgagggtgtgtgtggctcagggctggccgagggaccccagcctgacctctatgcctgttttcttctctgcaggctccacaagttcttccctgtgtgaacactgggtgagccggctcccgggcagcaagccagccagcgtgacctctgcagcttcctccagacgcacctccctggcgtcgctctctgagtccgtggagatgactggagaaaggagtgaagatgatggaggcttttcaactcgaccatttgtgagaagtgtccagcgtcagagtttgtcatccagatcttctgtcaccagccccttggccgtcaatgaaaattgcatgagaccttcatggtccctgtctgctaagctgcagatgcgctccaattctccatcccgattttcaggggattcgccaattcacagctctgcttccaccttggagaagattggggaggcagcagatgacaaggtctccatctcttgctttggtagcttgcggaacctttctagcagttaccaggaaccaagcgacagtcatagtcgccgtgagcacaaggctgtgggccgggcccctctggctgtcatggaaggcgtgttcaaagacgaatcggacacccgcagattgaactccagtgtcgtagatacacagagcaaacattcagcacaaggggaccgcctgcccccgctctctggtccatttgataacaataatcagatcgcttatgtggatcagagcgactccgtagacagctctccagtcaaagaggtgaaagcccccagccacccaggctcactcgcaaagaaaccagagagcacaactaagagatcccccagttccaaaggcacttctgagccagagaaaagcttgcggaaggggagaccagccttggcaagccaggagtcatccctttcaagtacatccccttcttctcctcttcctgtaaaagtctctctaaagccctcccgctcccgcagcaaagcagattcttcttccaggggcagtggacggcattcatcccctgcccctgcccaacccaaaaaggagtcatccccgaaatctcaggactccgtgtcatctccttcgccacagaagcagaagtcagcctcggccctcacctacactgcttcctccacatctgccaaaaaggcctcgggccctgccacaaggagccctttcccacctgggaagagcaggacttcagaccacagcttgagtagagagggctccagacaaagcttgggttctgacagagccagcgccacctccacctccaaacccaattcccctcgggtgagccaggcccgagcaggggagggcaggggggccgggaagcacgtgcggagctcctccatggccagcctgcgctcccccagcacaagcatcaagtctggtttgaagagggacagcaagtctgaggacaaggggctgtccttcttcaaatcagccttgagacagaaggaaacccggcgctcgacggatcttggcaagacagccttgctctctaaaaaggctggtgggagctctgttaagtctgtctgtaagaacaccggggacgacgaggcagagagaggccaccagcctccagcttcccagcagccaaatgcaaatacaacgggaaaagagcagcttgtcaccaaggaccctgcttctgccaaacattccctgctgtccgctcgcaaatccaagtcttcccaactagactctggagttccctcgtctccgggtggcaggcagtctgcagagaaatcctcaaaaaagttatcttctagcatgcaaacctctgcacggccttctcaaaaacctcagtgatatttctgcaatcaaagtgttttatctgtaaagatgtttatttatttagaacccctgccctcccacc

SEQ ID NO: 197324 - DNA, 1560 bp, Homo sapiens
  Payload ID: 18925
  Gene Name: ubiquitin specific peptidase 31
  ENST ID: ENST00000563525
  CDS Start-End: 1-799
ccaggaggagcagcccttgtgccacccaatagtagaaagggcattaaaatcttgtggaccaggtggcactgctcatgtgaaattagtagtcgagtgggacaaggagacaagagatttcttatttgtaaatactgaggatgagtatattcctgatgcagaaagtgttcgtctgcaaagggagcgtcatcatcagcctcaaacctgcactttatcccagtgtttccaactgtacaccaaagaggagcggcttgcccccgatgatgcctggcgttgcccacactgtaagcagctgcagcagggaagcattacgttaagcctctggactctgcctgatgtgcttattatacatctaaagagatttcggcaggaaggagacaggcgcatgaaacttcagaacatggtcaaattccccttgactggcctggacatgacacctcacgtggttaagaggagccagagcagctggagtttgccatcgcattggtccccgtggagacggccctatggactcgggagggaccctgaggactacatctatgacctgtatgctgtgtgcaatcaccatggcaccatgcaaggggggcactacacaggtctgcagtgtgagaggctgcgtgtctgtgctggcgagtccttcagacgggtttgcttgtggcagggtgacttgactttagagcctcatttcccctccggtaggcagtgtgccaactgtgagggcagtttccatcctctggatctctgcccaagagcaaataaacgaacattcttcctccttttcctgagttgggtcgtccagtaggtagctgactgattggggagtggtatgtgcagatggcattgtctggtcaactgaggatttgctctttgtttacctaacctgcgctccccatttacggttttgctagatagagttccttgagttctatcttctctctcattttaaatgattgtgaactactttttttttttttaattaaagatgagctgttgctgtgttgcccaggctggagtacagtagctattcacagatgtgattatcacacactacagccttgaacttctgggctcaagcaagtctcctgccttattctccagagtagctgggatacaagtgcatgacacttttatagtgtctttaaagtgacttagaagggtttttctttttgttttaaggttaaattgaccttgtcatttataaaagcaactatgttcatcatgaaatttagagtctagaggtggaaagaataccatcatccatgggcttatcactgagataaccactggtaacattttttttaattgcgataaaatatacataagaaaatgtaccattttaaccatttttaagtgtacagttcagtgacattaagtacactcacattgttgtgcaaccattatcactatccatctctacaagttttttaatcttcccagacttaaactctgtacctaataaacactaattcccattttctctcccttcagccatgacaagcaccatactttctgtctctgtgaatttgactactcttggtacctcttttaaatggaatcattcaa

SEQ ID NO: 197325 - DNA, 5171 bp, Homo sapiens
  Payload ID: 18926
  Gene Name: ubiquitin specific peptidase 32
  Uniprot ID: Q8NFA0
  ENST ID: ENST00000300896
  CDS Start-End: 196-5010
acgtgatccggcatggaggcggtggcggcgaccgggaggagccgccggggcagaagccgcacttgttagtgtggggggaggtgggggcgggggacgccgacaccgtcaccgtcacccagggacgccgaggagaaggcgggaggggggtgggggcgagatcaggctccgaccccccgccgaggggatgaggggagcatgggtgccaaggagtcacggatcggattcctcagctacgaggaggcgctgaggagagttacagatgtagagctaaaacgactgaaggatgctttcaagaggacctgtggactctcatattacatgggccagcactgcttcatccgggaagtgcttggggatggagtgcctccaaaggttgctgaggtgatttactgttcttttggtggaacatccaaagggctgcacttcaataatttaatagttggacttgtcctccttacaagaggcaaagatgaagagaaagcaaaatacatttttagtcttttttcaagtgaatctgggaactatgttatacgggaagaaatggaaagaatgctccacgtggtggatggtaaagtcccagatacactcaggaagtgtttctcagagggtgaaaaggtaaactatgaaaagtttagaaattggctttttctaaacaaagatgcttttactttctctcgatggcttctatctggaggtgtgtatgttaccctcactgatgatagtgatactcctactttctaccaaactctggctggagtcacacatttggaggaatcagacatcattgatcttgagaaacgctattggttattgaaggctcaatcccggactggacgatttgatttagagacatttggcccattggtttcaccacctattcgtccatctctaagtgaaggtttgtttaatgcttttgatgaaaatcgtgacaatcacatagattttaaggagatatcctgtgggttatcagcctgttgcaggggacccctggctgaaagacaaaaattttgcttcaaggtatttgatgttgaccgtgatggagttctctccagggttgaactgagagacatggtggttgcacttttagaagtctggaaggacaaccgcactgatgatattcctgaattacatatggatctctctgatattgtagaaggcatactgaatgcacatgacaccacaaagatgggtcatcttactctggaagactatcagatctggagtgtgaaaaatgttcttgccaatgagtttttgaacctccttttccaggtgtgtcacatagttctggggttaagaccagctactccggaagaagaaggacaaattattagaggatggttagaacgagagagcaggtatggtctgcaagcaggacacaactggtttatcatctccatgcagtggtggcaacagtggaaagaatatgtcaaatacgatgccaaccctgtggtaattgagccatcatctgttttgaatggaggaaaatactcatttggaactgcagcccatcctatggagcaggtcgaagatagaattggaagcagcctcagttacgtgaatactacagaagagaaattttcagacaacatttctactgcatctgaagcctcagaaactgctggcagcggctttctgtattctgccacaccaggggcagatgtttgctttgctcgacaacataacacttctgacaataacaaccagtgtttgctgggagccaatgggaatattttgttgcaccttaaccctcagaaaccaggggctattgataatcagccattagtaactcaagaaccagtaaaggctacatcattaacactagaaggaggacgattaaaacgaactccacagctgattcatggaagagactatgaaatggtcccagaacctgtgtggagagcactttatcactggtatggagcaaacctggccttacctagaccagttatcaagaacagcaagacagacatcccagagctggaattatttccccgctatcttctcttcctgagacagcagcctgccactcggacacagcagtctaacatctgggtgaatatgggaaatgtaccttctccgaatgcacctttaaagcgggtattagcctatacaggctgttttagtcgaatgcagaccatcaaggaaattcacgaatatctatctcaaaggctgcgcattaaagaggaagatatgcgcctgtggctatacaacagtgagaactaccttactcttctggatgatgaggatcataaattggaatatttgaaaatccaggatgaacaacacctggtaattgaagttcgcaacaaagatatgagttggcctgaggagatgtcttttatagcaaatagtagtaaaatagatagacacaaggttcccacagaaaagggagccacaggtctaagcaatctgggaaacacatgcttcatgaactcaagcatccagtgtgttagtaacacacagccactgacacagtattttatctcagggagacatctttatgaactcaacaggacaaatcccattggtatgaaggggcatatggctaaatgctatggtgatttagtgcaggaactttggagtggaactcagaagaatgttgccccattaaagcttcggtggaccatagcaaaatatgctcccaggtttaatgggtttcagcaacaggactcccaagaacttctggcttttctcttggatggtcttcatgaagatcttaatcgagtccatgaaaagccatatgtggaactgaaggacagtgatgggcgaccagactgggaagtagctgcagaggcctgggacaaccatctaagaagaaatagatcaattgttgtggatttgttccatgggcagctaagatctcaagtaaaatgcaagacatgtgggcatataagtgtccgatttgaccctttcaattttttgtctttgccactaccaatggacagttatatgcacttagaaataacagtgattaagttagatggtactacccctgtacggtatggactaagactgaatatggatgaaaagtacacaggtttaaaaaaacagctgagtgatctctgtggacttaattcagaacaaatccttctagcagaagtacatggttccaacataaagaactttcctcaggacaaccaaaaagtacgactctcagtgagtggatttttgtgtgcatttgaaattcctgtccctgtgtctccaatttcagcttctagtccaacacagacagatttctcctcttcgccatctacaaatgaaatgttcaccctaactaccaatggggacctaccccgaccaatattcatccccaatggaatgccaaacactgttgtgccatgtggaactgagaagaacttcacaaatggaatggttaatggtcacatgccatctcttcctgacagcccctttacaggttacatcattgcagtccaccgaaaaatgatgaggacagaactgtatttcctgtcatctcagaagaatcgccccagcctctttggaatgccattgattgttccatgtactgtgcatacccggaagaaagacctatatgatgcggtttggattcaagtatcccggttagcgagcccactcccacctcaggaagctagtaatcatgcccaggattgtgacgacagtatgggctatcaatatccattcactctacgagttgtgcagaaagatgggaactcctgtgcttggtgcccatggtatagattttgcagaggctgtaaaattgattgtggggaagacagagctttcattggaaatgcctatatcgctgtggattgggatcccacagcccttcaccttcgctatcaaacatcccaggaaagggttgtagatgagcatgagagtgtggagcagagtcggcgagcgcaagccgagcccatcaacctggacagctgtctccgtgctttcaccagtgaggaagagctaggggaaaatgagatgtactactgttccaagtgtaagacccactgcttagcaacaaagaagctggatctctggaggcttccacccatcctgattattcaccttaagcgatttcaatttgtaaatggtcggtggataaaatcacagaaaattgtcaaatttcctcgggaaagttttgatccaagtgcttttttggtaccaagagacccggctctctgccagcataaaccactcacaccccagggggatgagctctctgagcccaggattctggcaagggaggtgaagaaagtggatgcgcagagttcggctggggaagaggacgtgctcctgagcaaaagcccatcctcactcagcgctaacatcatcagcagcccgaaaggttctccttcttcatcaagaaaaagtggaaccagctgtccctccagcaaaaacagcagccctaatagcagcccacggactttggggaggagcaaagggaggctccggctgccccagattggcagcaaaaataaactgtcaagtagtaaagagaacttggatgccagcaaagaaaatggggctgggcagatatgtgagctggctgacgccttgagtcgagggcatgtgctggggggcagccaaccagagttggtcactcctcaggaccatgaggtagctttggccaatggattcctttatgagcatgaagcatgtggcaatggctacagcaatggtcagcttggaaaccacagtgaagaagacagcactgatgaccaaagagaagatactcgtattaagcctatttataatctatatgcaatttcgtgccattcaggaattctgggtgggggccattacgtcacttatgccaaaaacccaaactgcaagtggtactgttacaatgacagcagctgtaaggaacttcacccggatgaaattgacaccgactctgcctacattcttttctatgagcagcaggggatagactatgcacaatttctgccaaagactgatggcaaaaagatggcagacacaagcagtatggatgaagactttgagtctgattacaaaaagtactgtgtgttacagtaaagctaccactctggctgctagacagcttggcggtgagggagatgactccttgtagctgacatttggcaaaagcgtcactgaaaggcaagctaaatgtagttattttatcctgtggccctgaagcacaaaataaaaattctaattaaaatagttaactttaa

SEQ ID NO: 197326 - DNA, 1868 bp, Homo sapiens
  Payload ID: 18926
  Gene Name: ubiquitin specific peptidase 32
  Uniprot ID: Q8NFA0
  ENST ID: ENST00000393003
  CDS Start-End: 37-1209
caggctccgaccccccgccgaggggatgaggggagcatgggtgccaaggagtcacggatcggattcctcagctacgaggaggcgctgaggagagttacagatgtagagctaaaacgactgaaggatgctttcaagaggacctgtggactctcatattacatgggccagcactgcttcatccgggaagtgcttggggatggagtgcctccaaaggttgctgaggtgatttactgttcttttggtggaacatccaaagggctgcacttcaataatttaatagttggacttgtcctccttacaagaggcaaagatgaagagaaagcaaaatacatttttagtcttttttcaagtgaatctgggaactatgttatacgggaagaaatggaaagaatgctccacgtggtggatggtaaagtcccagatacactcaggaagtgtttctcagagggtgaaaaggtaaactatgaaaagtttagaaattggctttttctaaacaaagatgcttttactttctctcgatggcttctatctggaggtgtgtatgttaccctcactgatgatagtgatactcctactttctaccaaactctggctggagtcacacatttggaggaatcagacatcattgatcttgagaaacgctattggttattgaaggctcaatcccggactggacgatttgatttagagacatttggcccattggtttcaccacctattcgtccatctctaagtgaaggtttgtttaatgcttttgatgaaaatcgtgacaatcacatagattttaaggagatatcctgtgggttatcagcctgttgcaggggacccctggctgaaagacaaaaattttgcttcaaggtatttgatgttgaccgtgatggagttctctccagggttgaactgagagacatggtggttgcacttttagaagtctggaaggacaaccgcactgatgatattcctgaattacatatggatctctctgatattgtagaaggcatactgaatgcacatgacaccacaaagatgggtcatcttactctggaagactatcagatctggagtgtgaaaaatgttcttgccaatgagtttttgaacctccttttccaggtgtgtcacatagttctggggttaagaccagctactccggaagaagaaggacaaattattaggactctggaaactgaccaaatatatacaagaaattgagaagcatttattcaagaactactaatccttggtgagaacaatggaagtgtgtggtaatttaaccaggagcagctttcatttcctcccatccagcaagtctgcatgggctgtcagtctgattcatgatttgaaggagagcaggaataaatgcctgtccaaggataataaaataaatacataccatcatggtggtaaacagtgagggaaaactgacatcaccagcttggggataaaatactggttaggggaagcagcagactaacaacagaccagtcaaatttttaacagggaacaggatcaccatagtgagccttagcaagctttctcatgtccccagtgatctgtagactgcttgtacaaggctatacacaaactcaggagaaaccaaagtgggctttagcactttattcttccctagttgaaggtgaagccttgcatgtgcagaaagtaaaagccagggtaggcttgtaacctgcccaaactttaaatgcattccccaaaccatgtacagatccatcaggaaaagggtgtgaatgttactggctaaacacaaccagtaaactgctgagagcacaacctctcagcagtcattggctgaccagtaagttaggctcaccccaagaaggccaagcttaaaaataaaaacagataataaaaaa

SEQ ID NO: 197327 - DNA, 739 bp, Homo sapiens
  Payload ID: 18926
  Gene Name: ubiquitin specific peptidase 32
  ENST ID: ENST00000591768
  CDS Start-End: 1-739
gaagcctcagaaactgctggcagcggctttctgtattctgccacaccaggggcagatgtttgctttgctcgacaacataacacttctgacaataacaaccagtgtttgctgggagccaatgggaatattttgttgcaccttaaccctcagaaaccaggggctattgataatcagccattagtaactcaagaaccagtaaaggctacatcattaacactagaaggaggacgattaaaacgaactccacagctgattcatggaagagactatgaaatggtcccagaacctgtgtggagagcactttatcactggtatggagcaaacctggccttacctagaccagttatcaagaacagcaagacagacatcccagagctggaattatttccccgctatcttctcttcctgagacagcagcctgccactcggacacagcagtctaacatctgggtgaatatgggtatgatgagcctgagaatgtttcctcagcatttaccgagaggaaatgtaccttctccgaatgcacctttaaagcgggtattagcctatacaggctgttttagtcgaatgcagaccatcaaggaaattcacgaatatctatctcaaaggctgcgcattaaagaggaagatatgcgcctgtggctatacaacagtgagaactaccttactcttctggatgatgaggatcataaattggaatatttgaaaatccaggatgaacaacacctggtaattgaag

SEQ ID NO: 197328 - DNA, 691 bp, Homo sapiens
  Payload ID: 18926
  Gene Name: ubiquitin specific peptidase 32
  ENST ID: ENST00000589335
  CDS Start-End: 292-691
gtggcaagagggcgtgaggagggaaggagagggaggagagagaggagagagaagggcggagtaggaggcaggggaagggggcggggcggaagagtcacgtgatccggcatggaggcggtggcggcgaccgggaggagccgccggggcagaagccgcacttgttagtgtggggggaggtgggggcgggggacgccgacaccgtcaccgtcacccagggacgccgaggagaaggcgggaggggggtgggggcgagatcaggctccgaccccccgccgaggggatgaggggagcatgggtgccaaggagtcacggatcggattcctcagctacgaggaggcgctgaggagagttacagatgtagagctaaaacgactgaaggatgctttcaagaggacctgtggactctcatattacatgggccagcactgcttcatccgggaagtgcttggggatggagtgcctccaaaggttgctgaggtgtgtcacatagttctggggttaagaccagctactccggaagaagaaggacaaattattagaggatggttagaacgagagagcaggtatggtctgcaagcaggacacaactggtttatcatctccatgcagtggtggcaacagtggaaagaatatgtcaaatacgatgccaaccctgtggtaattgagccatcatctgttttgaatggaggaa

SEQ ID NO: 197329 - DNA, 2563 bp, Homo sapiens
  Payload ID: 18926
  Gene Name: ubiquitin specific peptidase 32
  ENST ID: ENST00000590133
  CDS Start-End: 22-2563
gattggcgggaagatgggacgatgcgttacgtgcggagatgcgtccccctccccggcgctcctgcgcgcgttacagatgtagagctaaaacgactgaaggatgctttcaagaggacctgtggactctcatattacatgggccagcactgcttcatccgggaagtgcttggggatggagtgcctccaaaggttgctgaggtgatttactgttcttttggtggaacatccaaagggctgcacttcaataatttaatagttggacttgtcctccttacaagaggcaaagatgaagagaaagcaaaatacatttttagtcttttttcaagtgaatctgggaactatgttatacgggaagaaatggaaagaatgctccacgtggtggatggtaaagtcccagatacactcaggaagtgtttctcagagggtgaaaaggtaaactatgaaaagtttagaaattggctttttctaaacaaagatgcttttactttctctcgatggcttctatctggaggtgtgtatgttaccctcactgatgatagtgatactcctactttctaccaaactctggctggagtcacacatttggaggaatcagacatcattgatcttgagaaacgctattggttattgaaggctcaatcccggactggacgatttgatttagagacatttggcccattggtttcaccacctattcgtccatctctaagtgaaggtttgtttaatgcttttgatgaaaatcgtgacaatcacatagattttaaggagatatcctgtgggttatcagcctgttgcaggggacccctggctgaaagacaaaaattttgcttcaaggtatttgatgttgaccgtgatggagttctctccagggttgaactgagagacatggtggttgcacttttagaagtctggaaggacaaccgcactgatgatattcctgaattacatatggatctctctgatattgtagaaggcatactgaatgcacatgacaccacaaagatgggtcatcttactctggaagactatcagatctggagtgtgaaaaatgttcttgccaatgagtttttgaacctccttttccaggtgtgtcacatagttctggggttaagaccagctactccggaagaagaaggacaaattattagaggatggttagaacgagagagcaggtatggtctgcaagcaggacacaactggtttatcatctccatgcagtggtggcaacagtggaaagaatatgtcaaatacgatgccaaccctgtggtaattgagccatcatctgttttgaatggaggaaaatactcatttggaactgcagcccatcctatggagcaggtcgaagatagaattggaagcagcctcagttacgtgaatactacagaagagaaattttcagacaacatttctactgcatctgaagcctcagaaactgctggcagcggctttctgtattctgccacaccaggggcagatgtttgctttgctcgacaacataacacttctgacaataacaaccagtgtttgctgggagccaatgggaatattttgttgcaccttaaccctcagaaaccaggggctattgataatcagccattagtaactcaagaaccagtaaaggctacatcattaacactagaaggaggacgattaaaacgaactccacagctgattcatggaagagactatgaaatggtcccagaacctgtgtggagagcactttatcactggtatggagcaaacctggccttacctagaccagttatcaagaacagcaagacagacatcccagagctggaattatttccccgctatcttctcttcctgagacagcagcctgccactcggacacagcagtctaacatctgggtgaatatgggaaatgtaccttctccgaatgcacctttaaagcgggtattagcctatacaggctgttttagtcgaatgcagaccatcaaggaaattcacgaatatctatctcaaaggctgcgcattaaagaggaagatatgcgcctgtggctatacaacagtgagaactaccttactcttctggatgatgaggatcataaattggaatatttgaaaatccaggatgaacaacacctggtaattgaagttcgcaacaaagatatgagttggcctgaggagatgtcttttatagcaaatagtagtaaaatagatagacacaaggttcccacagaaaagggagccacaggtctaagcaatctgggaaacacatgcttcatgaactcaagcatccagtgtgttagtaacacacagccactgacacagtattttatctcagggagacatctttatgaactcaacaggacaaatcccattggtatgaaggggcatatggctaaatgctatggtgatttagtgcaggaactttggagtggaactcagaagaatgttgccccattaaagcttcggtggaccatagcaaaatatgctcccaggtttaatgggtttcagcaacaggactcccaagaacttctggcttttctcttggatggtcttcatgaagatcttaatcgagtccatgaaaagccatatgtgg

SEQ ID NO: 197330 - DNA, 486 bp, Homo sapiens
  Payload ID: 18926
  Gene Name: ubiquitin specific peptidase 32
  ENST ID: ENST00000589552
  CDS Start-End: 1-264
gatgccaaccctgtggtaattgagccatcatctgttttgaatggaggaaaatactcatttggaactgcagcccatcctatggagcaggtcgaagatagaattggaagcagcctcagttacgtgaatactacagaagagaaattttcagacaacatttctactgcatctgaagcctcagaaactgctggcagcggctacatcattaacactagaaggaggacgattaaaacgaactccacagctgattcatggaagagactatgaaatggtcccagaacctgtgtggagagcactttatcactggtatggagcaaacctggccttacctagaccagttatcaagaacagcaagacagacatcccagagctggaattatttccccgctatcttctcttcctgagacagcagcctgccactcggacacagcagtctaacatctgggtgaatatgggtatgatgagcctgagaatgtttcctcagcattt

SEQ ID NO: 197331 - DNA, 668 bp, Homo sapiens
  Payload ID: 18926
  Gene Name: ubiquitin specific peptidase 32
  ENST ID: ENST00000593071
  CDS Start-End: 1-524
ggactttggggaggagcaaagggaggctccggctgccccagattggcagcaaaaataaactgtcaagtagtaaagagaacttggatgccagcaaagaaaatggggctgggcagatatgtgagctggctgacgccttgagtcgagggcatgtgctggggggcagccaaccagagttggtcactcctcaggaccatgaggtagctttggccaatggattcctttatgagcatgaagcatgtggcaatggctacagcaatggtcagcttggaaaccacagtgaagaagacagcactgatgaccaaagagaagatactcgtattaagcctatttataatctatatgcaatttcggaacttcacccggatgaaattgacaccgactctgcctacattcttttctatgagcagcaggggatagactatgcacaatttctgccaaagactgatggcaaaaagatggcagacacaagcagtatggatgaagactttgagtctgattacaaaaagtactgtgtgttacagtaaagctaccactctggctgctagacagcttggcggtgagggagatgactccttgtagctgacatttggcaaaagcgtcactgaaaggcaagctaaatgtagttattttatcctgtggccctgaagcacaaaataaaaattctaatt

SEQ ID NO: 197332 - DNA, 578 bp, Homo sapiens
  Payload ID: 18926
  Gene Name: ubiquitin specific peptidase 32
  ENST ID: ENST00000588898
  CDS Start-End: 120-578
aaagccacggcaaccgccaacacagaacccagccccccaccccgctcccatttcctcattcttaggggtggctgcagctggcccctccagctgggatctggactagggaacggagcaagatgtgcggggtcgagcgaagactttggcagagcgcacagcaggccaggagaggctggcgccccttctcccaagaatactgtcagatgctgatcctgacaccacctgttacagatgtagagctaaaacgactgaaggatgctttcaagaggacctgtggactctcatattacatgggccagcactgcttcatccgggaagtgcttggggatggagtgcctccaaaggttgctgaggtgatttactgttcttttggtggaacatccaaagggctgcacttcaataatttaatagttggacttgtcctccttacaagaggcaaagatgaagagaaagcaaaatacatttttagtcttttttcaagtgaatctgggaactatgttatacgggaagaaatggaaagaatgctccacgtggtggatggtaaagtcccagatacactcaggaagtgtttctcagag

SEQ ID NO: 197333 - DNA, 436 bp, Homo sapiens
  Payload ID: 18926
  Gene Name: ubiquitin specific peptidase 32
  ENST ID: ENST00000590297
  CDS Start-End: 1-262
gcgaagactttggcagagcgcacagcaggccaggagaggctggcgccccttctcccaagaatactgtcagatgctgatcctgacaccacctggaattccttctcccggaccttccttcgtgtcctctgggcccgggcccagttgtccccactcagtgtggccctgttcttcgcctgccttcgcgacagtgcggtgggaccgccgtcggcccgggcctcccctgccacccagcggccacctcgggcacaggagaggggcatagcggcttcaagtaggggtagcccggaggcccggagctttggaggagcaccctttgagtccagaaactttttaacttgtcctctatgccagcatgttcagcaaacgtcttgttgttattgttgtcgttgttgttgttgtaaggggaggaataaaccttccacttatccgcctccaa

SEQ ID NO: 197334 - DNA, 4045 bp, Homo sapiens
  Payload ID: 18926
  Gene Name: ubiquitin specific peptidase 32
  ENST ID: ENST00000592339
  CDS Start-End: 71-3895
gttcctttcctcacagcaacagataccacactacagtgggacaatttagacactcctgttaacctaacgtatgggtcatcttactctggaagactatcagatctggagtgtgaaaaatgttcttgccaatgagtttttgaacctccttttccaggtgtgtcacatagttctggggttaagaccagctactccggaagaagaaggacaaattattagaggatggttagaacgagagagcaggtatggtctgcaagcaggacacaactggtttatcatctccatgcagtggtggcaacagtggaaagaatatgtcaaatacgatgccaaccctgtggtaattgagccatcatctgttttgaatggaggaaaatactcatttggaactgcagcccatcctatggagcaggtcgaagatagaattggaagcagcctcagttacgtgaatactacagaagagaaattttcagacaacatttctactgcatctgaagcctcagaaactgctggcagcggctttctgtattctgccacaccaggggcagatgtttgctttgctcgacaacataacacttctgacaataacaaccagtgtttgctgggagccaatgggaatattttgttgcaccttaaccctcagaaaccaggggctattgataatcagccattagtaactcaagaaccagtaaaggctacatcattaacactagaaggaggacgattaaaacgaactccacagctgattcatggaagagactatgaaatggtcccagaacctgtgtggagagcactttatcactggtatggagcaaacctggccttacctagaccagttatcaagaacagcaagacagacatcccagagctggaattatttccccgctatcttctcttcctgagacagcagcctgccactcggacacagcagtctaacatctgggtgaatatgggaaatgtaccttctccgaatgcacctttaaagcgggtattagcctatacaggctgttttagtcgaatgcagaccatcaaggaaattcacgaatatctatctcaaaggctgcgcattaaagaggaagatatgcgcctgtggctatacaacagtgagaactaccttactcttctggatgatgaggatcataaattggaatatttgaaaatccaggatgaacaacacctggtaattgaagttcgcaacaaagatatgagttggcctgaggagatgtcttttatagcaaatagtagtaaaatagatagacacaaggttcccacagaaaagggagccacaggtctaagcaatctgggaaacacatgcttcatgaactcaagcatccagtgtgttagtaacacacagccactgacacagtattttatctcagggagacatctttatgaactcaacaggacaaatcccattggtatgaaggggcatatggctaaatgctatggtgatttagtgcaggaactttggagtggaactcagaagaatgttgccccattaaagcttcggtggaccatagcaaaatatgctcccaggtttaatgggtttcagcaacaggactcccaagaacttctggcttttctcttggatggtcttcatgaagatcttaatcgagtccatgaaaagccatatgtggaactgaaggacagtgatgggcgaccagactgggaagtagctgcagaggcctgggacaaccatctaagaagaaatagatcaattgttgtggatttgttccatgggcagctaagatctcaagtaaaatgcaagacatgtgggcatataagtgtccgatttgaccctttcaattttttgtctttgccactaccaatggacagttatatgcacttagaaataacagtgattaagttagatggtactacccctgtacggtatggactaagactgaatatggatgaaaagtacacaggtttaaaaaaacagctgagtgatctctgtggacttaattcagaacaaatccttctagcagaagtacatggttccaacataaagaactttcctcaggacaaccaaaaagtacgactctcagtgagtggatttttgtgtgcatttgaaattcctgtccctgtgtctccaatttcagcttctagtccaacacagacagatttctcctcttcgccatctacaaatgaaatgttcaccctaactaccaatggggacctaccccgaccaatattcatccccaatggaatgccaaacactgttgtgccatgtggaactgagaagaacttcacaaatggaatggttaatggtcacatgccatctcttcctgacagcccctttacaggttacatcattgcagtccaccgaaaaatgatgaggacagaactgtatttcctgtcatctcagaagaatcgccccagcctctttggaatgccattgattgttccatgtactgtgcatacccggaagaaagacctatatgatgcggtttggattcaagtatcccggttagcgagcccactcccacctcaggaagctagtaatcatgcccaggattgtgacgacagtatgggctatcaatatccattcactctacgagttgtgcagaaagatgggaactcctgtgcttggtgcccatggtatagattttgcagaggctgtaaaattgattgtggggaagacagagctttcattggaaatgcctatatcgctgtggattgggatcccacagcccttcaccttcgctatcaaacatcccaggaaagggttgtagatgagcatgagagtgtggagcagagtcggcgagcgcaagccgagcccatcaacctggacagctgtctccgtgctttcaccagtgaggaagagctaggggaaaatgagatgtactactgttccaagtgtaagacccactgcttagcaacaaagaagctggatctctggaggcttccacccatcctgattattcaccttaagcgatttcaatttgtaaatggtcggtggataaaatcacagaaaattgtcaaatttcctcgggaaagttttgatccaagtgcttttttggtaccaagagacccggctctctgccagcataaaccactcacaccccagggggatgagctctctgagcccaggattctggcaagggaggtgaagaaagtggatgcgcagagttcggctggggaagaggacgtgctcctgagcaaaagcccatcctcactcagcgctaacatcatcagcagcccgaaaggttctccttcttcatcaagaaaaagtggaaccagctgtccctccagcaaaaacagcagccctaatagcagcccacggactttggggaggagcaaagggaggctccggctgccccagattggcagcaaaaataaactgtcaagtagtaaagagaacttggatgccagcaaagaaaatggggctgggcagatatgtgagctggctgacgccttgagtcgagggcatgtgctggggggcagccaaccagagttggtcactcctcaggaccatgaggtagctttggccaatggattcctttatgagcatgaagcatgtggcaatggctacagcaatggtcagcttggaaaccacagtgaagaagacagcactgatgaccaaagagaagatactcgtattaagcctatttataatctatatgcaatttcgtgccattcaggaattctgggtgggggccattacgtcacttatgccaaaaacccaaactgcaagtggtactgttacaatgacagcagctgtaaggaacttcacccggatgaaattgacaccgactctgcctacattcttttctatgagcagcaggggatagactatgcacaatttctgccaaagactgatggcaaaaagatggcagacacaagcagtatggatgaagactttgagtctgattacaaaaagtactgtgtgttacagtaaagctaccactctggctgctagacagcttggcggtgagggagatgactccttgtagctgacatttggcaaaagcgtcactgaaaggcaagctaaatgtagttattttatcctgtggccctgaagcacaaaataaaaattctaattaaaata

SEQ ID NO: 197335 - DNA, 4155 bp, Homo sapiens
  Payload ID: 18927
  Gene Name: ubiquitin specific peptidase 33
  Uniprot ID: Q8TEY7
  ENST ID: ENST00000357428
  CDS Start-End: 1-2829
atgacaggatcaaattcacacataacgatattaaccttaaaggtgttacctcattttgaaagtcttgggaaacaggaaaaaattcctaacaaaatgtcagcttttcgaaatcattgtccacatttggattcagttggtgaaataacaaaagaagatttgatacaaaaatcccttggtacttgtcaggattgtaaagtccaaggaccaaatctttgggcatgtctggagaatagatgttcatatgttggctgtggtgaatcacaagtagatcacagcaccatacattctcaggagacaaagcattatctaactgtgaaccttaccactcttcgagtatggtgttatgcttgcagcaaagaagtatttttggataggaaattaggaactcagccttcattgcctcatgtaagacaacctcaccaaatacaagaaaacagtgtccaggattttaaaatacccagtaatacaacattaaaaactcctctggttgccgtatttgatgatctggatatagaagcggatgaagaagatgaacttagggccagaggtcttacaggtttgaaaaatattggaaatacttgttacatgaatgcagctttgcaggctctttctaattgcccacctttgacacagttttttcttgattgtggaggactagctcgaacagataagaaacctgccatttgtaaaagttatctcaaactaatgacagagctgtggcataaaagcaggccaggatctgttgtgcctactactctgtttcaaggaattaaaactgtaaatccaacatttcgggggtattctcagcaggatgctcaagaattccttcgatgtttaatggatttgcttcatgaagaattgaaagagcaagtcatggaagtagaagaagatccgcaaaccataaccactgaggagacaatggaagaagacaagagccagtcggatgtagattttcagtcttgtgaatcttgtagcaacagtgatagagcagaaaatgaaaatggctctagatgcttttctgaagataataatgaaacaacaatgttaattcaggatgatgaaaacaattcagaaatgtcaaaggattggcaaaaagagaagatgtgcaataagattaataaagtaaattctgaaggcgaatttgataaagatagagactctatatctgaaacagtcgacttaaacaaccaggaaactgtcaaagtgcaaatacacagcagagcttcagaatatatcactgatgtccattcgaatgacctgtctacaccacagatccttccatcaaatgaaggtgttaatccacgtttatcggcaagccctcctaaatcaggcaatttgtggccaggattggcaccaccacacaaaaaagctcagtctgcatctccaaagagaaaaaaacagcacaagaaatacagaagtgttatttcagacatatttgatggaacaatcattagttcagtgcagtgtctgacttgtgacagggtgtctgtaaccctcgagacctttcaagatctgtccttgccaattcctggcaaggaagaccttgctaagctgcattcatcaagtcatccaacttctatagtcaaagcaggatcatgtggcgaagcatatgctccacaagggtggatagcttttttcatggaatatgtgaagaggtttgttgtctcatgtgtccctagctggttttggggtccagtagtaaccttgcaagattgtcttgctgccttctttgccagagatgaactaaaaggtgacaatatgtacagttgtgaaaaatgcaaaaagttgagaaatggagtgaagttttgtaaagtacaaaactttcctgagattttgtgcatccaccttaaaagattcagacatgaactaatgttttccaccaaaatcagtacccatgtttcatttccgctagaaggcttggatcttcagccatttcttgctaaggatagtccagctcaaattgtgacatatgatcttctgtcagtcatttgccatcatggaactgcaagtagtggacactatatagcctactgccgaaacaatctaaataatctctggtatgaatttgatgatcagagtgtcactgaagtttcagaatctactgtacaaaatgcagaagcttacgttcttttctataggaagagcagcgaagaggcacaaaaagagaggagaaggatatcaaatttattgaacataatggaaccaagcctccttcagttttatatttctcgacagtggcttaataaatttaagacctttgccgaacctggccctatttcaaataatgactttctttgtattcatggaggtgttcctccaagaaaagctggttatattgaagacctggttttgatgctgcctcagaacatttgggataacctatatagcaggtatggtggaggaccagctgtcaaccatctgtacatttgtcatacttgccaaattgaggcggagaaaattgaaaaaagaagaaaaactgaattggaaatttttattcggcttaacagagcgttccaaaaagaggactctccagctactttttattgcatcagtatgcagtggtttagagaatgggaaagttttgtgaagggtaaagatggagatcctccaggtcctattgacaatactaagattgcagtcactaaatgtggtaatgtgatgcttaggcaaggagcagattctggccagatttctgaagaaacatggaattttctgcagtctatttatggtggagggcctgaagttatcctgcgacctccggttgttcatgttgatccagatatacttcaagcagaagaaaaaattgaagtagaaactcggtctttgtaatttttaggatgtagagagttctaatgaggaatcattttcatgtgccctgacatgtacacatgcgaaaacattcctaaaagcgtgtttatttgctttattttttttcatcatttatcccatttatttcttcttagtgggcattatggaagaatatattaaaatgtgtaatataccacaggttggtatatttagttttaaatacttaccataaagtctttcagtgtaatttttttttgagacagagtcttgctttgtcacccaggctggagtgctgtggtgttacctcagctcactgcagcctccacctcctgggttcaagcgattctcctgcctcagcctctcgagtagctgggattacaggcacctgccaccatgcccggctaatttttgtattttagtagagatggggtttcaccatgttggccaggctagtctcaaactcctgacctcaggtgatccacccacctcggcctcccaaagtgctgggattacaggtgtgagccacagcgcctggcccagtgtaatatttttgaaagaggagggacaattgtgaaatcagtaggttatctttaatctttacactacatgcagatccatagtatcctttgtagtgttgtaaatacttttgctttgaaaactttttcattgtcctaaatcaccctgactctgaccagtctttcagttctccaaaagcccaatttaattgtatagttttgtcatggcttcatataataaagagcctattttaagttgaaagtagtagtcagaaaattgttaatttcctaaagctcaggaaactagggtgtcactttttttgcactgcagcatatacactaactagcttattaaaatttacaaaatgtctttttgaatgtatcaaggatatatttagtttgagtggaatttgtcagcagatatcagtaacttattgccgcttatattgtacaatgttaaacttcaattcctgtaacctggttagtattaatgtcagtgactaaaaaacttagagttagttttagggcactttttattttgagagcatgaagtgtggaatgtgtcactacgattgttgataaagctgaggccacttgcaacttgattttttaaatgaaatagataaagtctttttgaataatatagtatgcactgctatttgcttgattatgtaatgtcaaaagtttaactatattccaagtacaaaaacatactggattacattgaggatgttgaatagcattcatgatggctttgttttggtttggggcagctgtcaccagctaaagcaatgttgttaaaattagctcaataaaaatgtctttaaaatgt

SEQ ID NO: 197336 - DNA, 2917 bp, Homo sapiens
  Payload ID: 18927
  Gene Name: ubiquitin specific peptidase 33
  Uniprot ID: Q8TEY7
  ENST ID: ENST00000370792
  CDS Start-End: 348-2834
ggagacaccggaaggagccgcggctgctgcgggaagtggccagttcaggaggcggaccccccgagggcagcgctgcggggccgttttccggccctcctgacgcgacactgcccctctccgagagctgagaaggaaaagaggagcttgcggaggtgcggctgcaggccgttgttggtcgagctggcgggtcccgcgggccaggccgtggagagctcctgaaggaagcactaaacatggaaaggaacaaccggtaccagccactgcaaaaacatgccaaattgtaaagaccatcgatgttaggaagaaactgcctcaactaatgagcaaaataaccagctaacatcgtaatgacaggatcaaattcacacataacgatattaaccttaaaggtgttacctcattttgaaagtcttgggaaacaggaaaaaattcctaacaaaatgtcagcttttcgaaatcattgtccacatttggattcagttggtgaaataacaaaagaagatttgatacaaaaatcccttggtacttgtcaggattgtaaagtccaaggaccaaatctttgggcatgtctggagaatagatgttcatatgttggctgtggtgaatcacaagtagatcacagcaccatacattctcaggagacaaagcattatctaactgtgaaccttaccactcttcgagtatggtgttatgcttgcagcaaagaagtatttttggataggaaattaggaactcagccttcattgcctcatgtaagacaacctcaccaaatacaagaaaacagtgtccaggattttaaaatacccagtaatacaacattaaaaactcctctggttgccgtatttgatgatctggatatagaagcggatgaagaagatgaacttagggccagaggtcttacaggtttgaaaaatattggaaatacttgttacatgaatgcagctttgcaggctctttctaattgcccacctttgacacagttttttcttgattgtggaggactagctcgaacagataagaaacctgccatttgtaaaagttatctcaaactaatgacagagctgtggcataaaagcaggccaggatctgttgtgcctactactctgtttcaaggaattaaaactgtaaatccaacatttcgggggtattctcagcaggatgctcaagaattccttcgatgtttaatggatttgcttcatgaagaattgaaagagcaagtcatggaagtagaagaagatccgcaaaccataaccactgaggagacaatggaagaagacaagagccagtcggatgtagattttcagtcttgtgaatcttgtagcaacagtgatagagcagaaaatgaaaatggctctagatgcttttctgaagataataatgaaacaacaatgttaattcaggatgatgaaaacaattcagaaatgtcaaaggattggcaaaaagagaagatgtgcaataagattaataaagtaaattctgaaggcgaatttgataaagatagagactctatatctgaaacagtcgacttaaacaaccaggaaactgtcaaagtgcaaatacacagcagagcttcagaatatatcactgatgtccattcgaatgacctgtctacaccacagatccttccatcaaatgaaggtgttaatccacgtttatcggcaagccctcctaaatcaggcaatttgtggccaggattggcaccaccacacaaaaaagctcagtctgcatctccaaagagaaaaaaacagcacaagaaatacagaagtgttatttcagacatatttgatggaacaatcattagttcagtgcagtgtctgacttgtgacagggtgtctgtaaccctcgagacctttcaagatctgtccttgccaattcctggcaaggaagaccttgctaagctgcattcatcaagtcatccaacttctatagtcaaagcaggatcatgtggcgaagcatatgctccacaagggtggatagcttttttcatggaatatgtgaagagctggttttggggtccagtagtaaccttgcaagattgtcttgctgccttctttgccagagatgaactaaaaggtgacaatatgtacagttgtgaaaaatgcaaaaagttgagaaatggagtgaagttttgtaaagtacaaaactttcctgagattttgtgcatccaccttaaaagattcagacatgaactaatgttttccaccaaaatcagtacccatgtttcatttccgctagaaggcttggatcttcagccatttcttgctaaggatagtccagctcaaattgtgacatatgatcttctgtcagtcatttgccatcatggaactgcaagtagtggacactatatagcctactgccgaaacaatctaaataatctctggtatgaatttgatgatcagagtgtcactgaagtttcagaatctactgtacaaaatgcagaagcttacgttcttttctataggaagagcagcgaagaggcacaaaaagagaggagaaggatatcaaatttattgaacataatggaaccaagcctccttcagttttatatttctcgacagtggcttaataaatttaagacctttgccgaacctggccctatttcaaataatgactttctttgtattcatggaggtgttcctccaagaaaagctggttatattgaagacctggttttgatgctgcctcagaacatttgggataacctatatagcaggtatggtggaggaccagctgtcaaccatctgtacatttgtcatacttgccaaattgaggcggagaaaattgaaaaaagaagaaaaactgaattggaaatttttattcgggtaaaaaagtgatgcttttcaaattgatctaggataaagatgaagacctgacaattatcagagttatatgatattaataaaatgattagatgaaa

SEQ ID NO: 197337 - DNA, 4502 bp, Homo sapiens
  Payload ID: 18927
  Gene Name: ubiquitin specific peptidase 33
  Uniprot ID: Q8TEY7
  ENST ID: ENST00000370793
  CDS Start-End: 348-3176
ggagacaccggaaggagccgcggctgctgcgggaagtggccagttcaggaggcggaccccccgagggcagcgctgcggggccgttttccggccctcctgacgcgacactgcccctctccgagagctgagaaggaaaagaggagcttgcggaggtgcggctgcaggccgttgttggtcgagctggcgggtcccgcgggccaggccgtggagagctcctgaaggaagcactaaacatggaaaggaacaaccggtaccagccactgcaaaaacatgccaaattgtaaagaccatcgatgttaggaagaaactgcctcaactaatgagcaaaataaccagctaacatcgtaatgacaggatcaaattcacacataacgatattaaccttaaaggtgttacctcattttgaaagtcttgggaaacaggaaaaaattcctaacaaaatgtcagcttttcgaaatcattgtccacatttggattcagttggtgaaataacaaaagaagatttgatacaaaaatcccttggtacttgtcaggattgtaaagtccaaggaccaaatctttgggcatgtctggagaatagatgttcatatgttggctgtggtgaatcacaagtagatcacagcaccatacattctcaggagacaaagcattatctaactgtgaaccttaccactcttcgagtatggtgttatgcttgcagcaaagaagtatttttggataggaaattaggaactcagccttcattgcctcatgtaagacaacctcaccaaatacaagaaaacagtgtccaggattttaaaatacccagtaatacaacattaaaaactcctctggttgccgtatttgatgatctggatatagaagcggatgaagaagatgaacttagggccagaggtcttacaggtttgaaaaatattggaaatacttgttacatgaatgcagctttgcaggctctttctaattgcccacctttgacacagttttttcttgattgtggaggactagctcgaacagataagaaacctgccatttgtaaaagttatctcaaactaatgacagagctgtggcataaaagcaggccaggatctgttgtgcctactactctgtttcaaggaattaaaactgtaaatccaacatttcgggggtattctcagcaggatgctcaagaattccttcgatgtttaatggatttgcttcatgaagaattgaaagagcaagtcatggaagtagaagaagatccgcaaaccataaccactgaggagacaatggaagaagacaagagccagtcggatgtagattttcagtcttgtgaatcttgtagcaacagtgatagagcagaaaatgaaaatggctctagatgcttttctgaagataataatgaaacaacaatgttaattcaggatgatgaaaacaattcagaaatgtcaaaggattggcaaaaagagaagatgtgcaataagattaataaagtaaattctgaaggcgaatttgataaagatagagactctatatctgaaacagtcgacttaaacaaccaggaaactgtcaaagtgcaaatacacagcagagcttcagaatatatcactgatgtccattcgaatgacctgtctacaccacagatccttccatcaaatgaaggtgttaatccacgtttatcggcaagccctcctaaatcaggcaatttgtggccaggattggcaccaccacacaaaaaagctcagtctgcatctccaaagagaaaaaaacagcacaagaaatacagaagtgttatttcagacatatttgatggaacaatcattagttcagtgcagtgtctgacttgtgacagggtgtctgtaaccctcgagacctttcaagatctgtccttgccaattcctggcaaggaagaccttgctaagctgcattcatcaagtcatccaacttctatagtcaaagcaggatcatgtggcgaagcatatgctccacaagggtggatagcttttttcatggaatatgtgaagaggtttgttgtctcatgtgtccctagctggttttggggtccagtagtaaccttgcaagattgtcttgctgccttctttgccagagatgaactaaaaggtgacaatatgtacagttgtgaaaaatgcaaaaagttgagaaatggagtgaagttttgtaaagtacaaaactttcctgagattttgtgcatccaccttaaaagattcagacatgaactaatgttttccaccaaaatcagtacccatgtttcatttccgctagaaggcttggatcttcagccatttcttgctaaggatagtccagctcaaattgtgacatatgatcttctgtcagtcatttgccatcatggaactgcaagtagtggacactatatagcctactgccgaaacaatctaaataatctctggtatgaatttgatgatcagagtgtcactgaagtttcagaatctactgtacaaaatgcagaagcttacgttcttttctataggaagagcagcgaagaggcacaaaaagagaggagaaggatatcaaatttattgaacataatggaaccaagcctccttcagttttatatttctcgacagtggcttaataaatttaagacctttgccgaacctggccctatttcaaataatgactttctttgtattcatggaggtgttcctccaagaaaagctggttatattgaagacctggttttgatgctgcctcagaacatttgggataacctatatagcaggtatggtggaggaccagctgtcaaccatctgtacatttgtcatacttgccaaattgaggcggagaaaattgaaaaaagaagaaaaactgaattggaaatttttattcggcttaacagagcgttccaaaaagaggactctccagctactttttattgcatcagtatgcagtggtttagagaatgggaaagttttgtgaagggtaaagatggagatcctccaggtcctattgacaatactaagattgcagtcactaaatgtggtaatgtgatgcttaggcaaggagcagattctggccagatttctgaagaaacatggaattttctgcagtctatttatggtggagggcctgaagttatcctgcgacctccggttgttcatgttgatccagatatacttcaagcagaagaaaaaattgaagtagaaactcggtctttgtaatttttaggatgtagagagttctaatgaggaatcattttcatgtgccctgacatgtacacatgcgaaaacattcctaaaagcgtgtttatttgctttattttttttcatcatttatcccatttatttcttcttagtgggcattatggaagaatatattaaaatgtgtaatataccacaggttggtatatttagttttaaatacttaccataaagtctttcagtgtaatttttttttgagacagagtcttgctttgtcacccaggctggagtgctgtggtgttacctcagctcactgcagcctccacctcctgggttcaagcgattctcctgcctcagcctctcgagtagctgggattacaggcacctgccaccatgcccggctaatttttgtattttagtagagatggggtttcaccatgttggccaggctagtctcaaactcctgacctcaggtgatccacccacctcggcctcccaaagtgctgggattacaggtgtgagccacagcgcctggcccagtgtaatatttttgaaagaggagggacaattgtgaaatcagtaggttatctttaatctttacactacatgcagatccatagtatcctttgtagtgttgtaaatacttttgctttgaaaactttttcattgtcctaaatcaccctgactctgaccagtctttcagttctccaaaagcccaatttaattgtatagttttgtcatggcttcatataataaagagcctattttaagttgaaagtagtagtcagaaaattgttaatttcctaaagctcaggaaactagggtgtcactttttttgcactgcagcatatacactaactagcttattaaaatttacaaaatgtctttttgaatgtatcaaggatatatttagtttgagtggaatttgtcagcagatatcagtaacttattgccgcttatattgtacaatgttaaacttcaattcctgtaacctggttagtattaatgtcagtgactaaaaaacttagagttagttttagggcactttttattttgagagcatgaagtgtggaatgtgtcactacgattgttgataaagctgaggccacttgcaacttgattttttaaatgaaatagataaagtctttttgaataatatagtatgcactgctatttgcttgattatgtaatgtcaaaagtttaactatattccaagtacaaaaacatactggattacattgaggatgttgaatagcattcatgatggctttgttttggtttggggcagctgtcaccagctaaagcaatgttgttaaaattagctcaataaaaatgtctttaaaatgt

SEQ ID NO: 197338 - DNA, 4327 bp, Homo sapiens
  Payload ID: 18927
  Gene Name: ubiquitin specific peptidase 33
  Uniprot ID: Q8TEY7
  ENST ID: ENST00000370794
  CDS Start-End: 262-2997
ggagacaccggaaggagccgcggctgctgcgggaagtggccagttcaggaggcggaccccccgagggcagcgctgcggggccgttttccggccctcctgacgcgacactgcccctctccgagagctgagaaggaaaagaggagcttgcggaggtgcggctgcaggccgttgttggtcgagctggcgggtcccgcgggccaggccgtggaggtgttacctcattttgaaagtcttgggaaacaggaaaaaattcctaacaaaatgtcagcttttcgaaatcattgtccacatttggattcagttggtgaaataacaaaagaagatttgatacaaaaatcccttggtacttgtcaggattgtaaagtccaaggaccaaatctttgggcatgtctggagaatagatgttcatatgttggctgtggtgaatcacaagtagatcacagcaccatacattctcaggagacaaagcattatctaactgtgaaccttaccactcttcgagtatggtgttatgcttgcagcaaagaagtatttttggataggaaattaggaactcagccttcattgcctcatgtaagacaacctcaccaaatacaagaaaacagtgtccaggattttaaaatacccagtaatacaacattaaaaactcctctggttgccgtatttgatgatctggatatagaagcggatgaagaagatgaacttagggccagaggtcttacaggtttgaaaaatattggaaatacttgttacatgaatgcagctttgcaggctctttctaattgcccacctttgacacagttttttcttgattgtggaggactagctcgaacagataagaaacctgccatttgtaaaagttatctcaaactaatgacagagctgtggcataaaagcaggccaggatctgttgtgcctactactctgtttcaaggaattaaaactgtaaatccaacatttcgggggtattctcagcaggatgctcaagaattccttcgatgtttaatggatttgcttcatgaagaattgaaagagcaagtcatggaagtagaagaagatccgcaaaccataaccactgaggagacaatggaagaagacaagagccagtcggatgtagattttcagtcttgtgaatcttgtagcaacagtgatagagcagaaaatgaaaatggctctagatgcttttctgaagataataatgaaacaacaatgttaattcaggatgatgaaaacaattcagaaatgtcaaaggattggcaaaaagagaagatgtgcaataagattaataaagtaaattctgaaggcgaatttgataaagatagagactctatatctgaaacagtcgacttaaacaaccaggaaactgtcaaagtgcaaatacacagcagagcttcagaatatatcactgatgtccattcgaatgacctgtctacaccacagatccttccatcaaatgaaggtgttaatccacgtttatcggcaagccctcctaaatcaggcaatttgtggccaggattggcaccaccacacaaaaaagctcagtctgcatctccaaagagaaaaaaacagcacaagaaatacagaagtgttatttcagacatatttgatggaacaatcattagttcagtgcagtgtctgacttgtgacagggtgtctgtaaccctcgagacctttcaagatctgtccttgccaattcctggcaaggaagaccttgctaagctgcattcatcaagtcatccaacttctatagtcaaagcaggatcatgtggcgaagcatatgctccacaagggtggatagcttttttcatggaatatgtgaagaggtttgttgtctcatgtgtccctagctggttttggggtccagtagtaaccttgcaagattgtcttgctgccttctttgccagagatgaactaaaaggtgacaatatgtacagttgtgaaaaatgcaaaaagttgagaaatggagtgaagttttgtaaagtacaaaactttcctgagattttgtgcatccaccttaaaagattcagacatgaactaatgttttccaccaaaatcagtacccatgtttcatttccgctagaaggcttggatcttcagccatttcttgctaaggatagtccagctcaaattgtgacatatgatcttctgtcagtcatttgccatcatggaactgcaagtagtggacactatatagcctactgccgaaacaatctaaataatctctggtatgaatttgatgatcagagtgtcactgaagtttcagaatctactgtacaaaatgcagaagcttacgttcttttctataggaagagcagcgaagaggcacaaaaagagaggagaaggatatcaaatttattgaacataatggaaccaagcctccttcagttttatatttctcgacagtggcttaataaatttaagacctttgccgaacctggccctatttcaaataatgactttctttgtattcatggaggtgttcctccaagaaaagctggttatattgaagacctggttttgatgctgcctcagaacatttgggataacctatatagcaggtatggtggaggaccagctgtcaaccatctgtacatttgtcatacttgccaaattgaggcggagaaaattgaaaaaagaagaaaaactgaattggaaatttttattcggcttaacagagcgttccaaaaagaggactctccagctactttttattgcatcagtatgcagtggtttagagaatgggaaagttttgtgaagggtaaagatggagatcctccaggtcctattgacaatactaagattgcagtcactaaatgtggtaatgtgatgcttaggcaaggagcagattctggccagatttctgaagaaacatggaattttctgcagtctatttatggtggagggcctgaagttatcctgcgacctccggttgttcatgttgatccagatatacttcaagcagaagaaaaaattgaagtagaaactcggtctttgtaatttttaggatgtagagagttctaatgaggaatcattttcatgtgccctgacatgtacacatgcgaaaacattcctaaaagcgtgtttatttgctttattttttttcatcatttatcccatttatttcttcttagtgggcattatggaagaatatattaaaatgtgtaatataccacaggttggtatatttagttttaaatacttaccataaagtctttcagtgtaatttttttttgagacagagtcttgctttgtcacccaggctggagtgctgtggtgttacctcagctcactgcagcctccacctcctgggttcaagcgattctcctgcctcagcctctcgagtagctgggattacaggcacctgccaccatgcccggctaatttttgtattttagtagagatggggtttcaccatgttggccaggctagtctcaaactcctgacctcaggtgatccacccacctcggcctcccaaagtgctgggattacaggtgtgagccacagcgcctggcccagtgtaatatttttgaaagaggagggacaattgtgaaatcagtaggttatctttaatctttacactacatgcagatccatagtatcctttgtagtgttgtaaatacttttgctttgaaaactttttcattgtcctaaatcaccctgactctgaccagtctttcagttctccaaaagcccaatttaattgtatagttttgtcatggcttcatataataaagagcctattttaagttgaaagtagtagtcagaaaattgttaatttcctaaagctcaggaaactagggtgtcactttttttgcactgcagcatatacactaactagcttattaaaatttacaaaatgtctttttgaatgtatcaaggatatatttagtttgagtggaatttgtcagcagatatcagtaacttattgccgcttatattgtacaatgttaaacttcaattcctgtaacctggttagtattaatgtcagtgactaaaaaacttagagttagttttagggcactttttattttgagagcatgaagtgtggaatgtgtcactacgattgttgataaagctgaggccacttgcaacttgattttttaaatgaaatagataaagtctttttgaataatatagtatgcactgctatttgcttgattatgtaatgtcaaaagtttaactatattccaagtacaaaaacatactggattacattgaggatgttgaatagcattcatgatggctttgttttggtttggggcagctgtcaccagctaaagcaatgttgttaaaattagctcaataaaaatgtctttaaaatgtaaaa

SEQ ID NO: 197339 - DNA, 2866 bp, Homo sapiens
  Payload ID: 18927
  Gene Name: ubiquitin specific peptidase 33
  ENST ID: ENST00000481579
  CDS Start-End: 1-1370
accaggaaactgtcaaagtgcaaatacacagcagagcttcagaatatatcactgatgtccattcgaatgacctgtctacaccacagatccttccatcaaatgaaggtgttaatccacgtttatcggcaagccctcctaaatcaggcaatttgtggccaggattggcaccaccacacaaaaaagctcagtctgcatctccaaagagaaaaaaacagcacaagaaatacagaagtgttatttcagacatatttgatggaacaatcattagttcagtgcagtgtctgacttgtgacagggtgtctgtaaccctcgagacctttcaagatctgtccttgccaattcctggcaaggaagaccttgctaagctgcattcatcaagtcatccaacttctatagtcaaagcaggatcatgtggcgaagcatatgctccacaagggtggatagcttttttcatggaatatgtgaagaggtttgttgtctcatgtgtccctagctggttttggggtccagtagtaaccttgcaagattgtcttgctgccttctttgccagagatgaactaaaaggtgacaatatgtacagttgtgaaaaatgcaaaaagttgagaaatggagtgaagttttgtaaagtacaaaactttcctgagattttgtgcatccaccttaaaagattcagacatgaactaatgttttccaccaaaatcagtacccatgtttcatttccgctagaaggcttggatcttcagccatttcttgctaaggatagtccagctcaaattgtgacatatgatcttctgtcagtcatttgccatcatggaactgcaagtagtggacactatatagcctactgccgaaacaatctaaataatctctggtatgaatttgatgatcagagtgtcactgaagtttcagaatctactgtacaaaatgcagaagcttacgttcttttctataggaagagcagcgaagaggcacaaaaagagaggagaaggatatcaaatttattgaacataatggaaccaagcctccttcagttttatatttctcgacagtggcttaataaatttaagacctttgccgaacctggccctatttcaaataatgactttctttgtattcatggaggtgttcctccaagaaaagctggttatattgaagacctggttttgatgctgcctcagaacatttgggataacctatatagcaggtatggtggaggaccagctgtcaaccatctgtacatttgtcatacttgccaaattgaggcggagaaaattgaaaaaagaagaaaaactgaattggaaatttttattcggatcctccaggtcctattgacaatactaagattgcagtcactaaatgtggtaatgtgatgcttaggcaaggagcagattctggccagatttctgaagaaacatggaattttctgcagtctatttatggtggagggcctgaagttatcctgcgacctccggttgttcatgttgatccagatatacttcaagcagaagaaaaaattgaagtagaaactcggtctttgtaatttttaggatgtagagagttctaatgaggaatcattttcatgtgccctgacatgtacacatgcgaaaacattcctaaaagcgtgtttatttgctttattttttttcatcatttatcccatttatttcttcttagtgggcattatggaagaatatattaaaatgtgtaatataccacaggttggtatatttagttttaaatacttaccataaagtctttcagtgtaatttttttttgagacagagtcttgctttgtcacccaggctggagtgctgtggtgttacctcagctcactgcagcctccacctcctgggttcaagcgattctcctgcctcagcctctcgagtagctgggattacaggcacctgccaccatgcccggctaatttttgtattttagtagagatggggtttcaccatgttggccaggctagtctcaaactcctgacctcaggtgatccacccacctcggcctcccaaagtgctgggattacaggtgtgagccacagcgcctggcccagtgtaatatttttgaaagaggagggacaattgtgaaatcagtaggttatctttaatctttacactacatgcagatccatagtatcctttgtagtgttgtaaatacttttgctttgaaaactttttcattgtcctaaatcaccctgactctgaccagtctttcagttctccaaaagcccaatttaattgtatagttttgtcatggcttcatataataaagagcctattttaagttgaaagtagtagtcagaaaattgttaatttcctaaagctcaggaaactagggtgtcactttttttgcactgcagcatatacactaactagcttattaaaatttacaaaatgtctttttgaatgtatcaaggatatatttagtttgagtggaatttgtcagcagatatcagtaacttattgccgcttatattgtacaatgttaaacttcaattcctgtaacctggttagtattaatgtcagtgactaaaaaacttagagttagttttagggcactttttattttgagagcatgaagtgtggaatgtgtcactacgattgttgataaagctgaggccacttgcaacttgattttttaaatgaaatagataaagtctttttgaataatatagtatgcactgctatttgcttgattatgtaatgtcaaaagtttaactatattccaagtacaaaaacatactggattacattgaggatgttgaatagcattcatgatggctttgttttggtttggggcagctgtcaccagctaaagcaatgttgttaaaattagctcaataaaaatgtctttaaaatgt

SEQ ID NO: 197340 - DNA, 661 bp, Homo sapiens
  Payload ID: 18927
  Gene Name: ubiquitin specific peptidase 33
  ENST ID: ENST00000527390
  CDS Start-End: 1-419
gtgacaatatgtacagttgtgaaaaatgcaaaaagttgagaaatggagtgaagttttgtaaagtacaaaactttcctgagattttgtgcatccaccttaaaagattcagacatgaactaatgttttccaccaaaatcagtacccatgtttcatttccgctagaaggcttggatcttcagccatttcttgctaaggatagtccagctcaaattgtgacatatgatcttctgtcagtcatttgccatcatggaactgcaagtagtggacactatatagcctactgccgaaacaatctaaataatctctggtatgaatttgatgatcagagtgtcactgaagtttcagaatctactgtacaaaatgcagaagcttacgttcttttctataggtgttcctccaagaaaagctggttatattgaagacctggttttgatgctgcctcagaacatttgggataacctatatagcaggtatggtggaggaccagctgtcaaccatctgtacatttgtcatacttgccaaattgaggcggagaaaattgaaaaaagaagaaaaactgaattggaaatttttattcgggtaaaaaagtgatgcttttcaaattgatctaggataaagatgaagacctgacaattatcagagttatatgatattaataaaa

SEQ ID NO: 197341 - DNA, 549 bp, Homo sapiens
  Payload ID: 18927
  Gene Name: ubiquitin specific peptidase 33
  ENST ID: ENST00000530709
  CDS Start-End: 218-549
aagggtcctcaggggttcttccctggaagcgggaggtgcagtgctttacttccaactatgtggtcaattttgtttacaagagctcctgaaggaagcactaaacatggaaaggaacaaccggtaccagccactgcaaaaacatgccaaattgtaaagaccatcgatgttaggaagaaactgcctcaactaatgagcaaaataaccagctaacatcgtaatgacaggatcaaattcacacataacgatattaaccttaaaggtgttacctcattttgaaagtcttgggaaacaggaaaaaattcctaacaaaatgtcagcttttcgaaatcattgtccacatttggattcagttggtgaaataacaaaagaagatttgatacaaaaatcccttggtacttgtcaggattgtaaagtccaaggaccaaatctttgggcatgtctggagaatagatgttcatatgttggctgtggtgaatcacaagtagatcacagcaccatacattctcaggagacaaagcattatctaactgtgaaccttaccactcttcg

SEQ ID NO: 197342 - DNA, 949 bp, Homo sapiens
  Payload ID: 18927
  Gene Name: ubiquitin specific peptidase 33
  ENST ID: ENST00000524536
  CDS Start-End: 343-949
ggccgttgttggtcgagctggcgggtcccgcgggccaggccgtggaggctttggtgtcaggatgatgctggcttcataaaatgagttacggaggattccttctttttatattgattggaatagtttcagaaggaatggtaccagctcctctttgtacctctggtagaattcggctgtgaatccgtctggtcctggactttttttgagctcctgaaggaagcactaaacatggaaaggaacaaccggtaccagccactgcaaaaacatgccaaattgtaaagaccatcgatgttaggaagaaactgcctcaactaatgagcaaaataaccagctaacatcgtaatgacaggatcaaattcacacataacgatattaaccttaaaggtgttacctcattttgaaagtcttgggaaacaggaaaaaattcctaacaaaatgtcagcttttcgaaatcattgtccacatttggattcagttggtgaaataacaaaagaagatttgatacaaaaatcccttggtacttgtcaggattgtaaagtccaaggaccaaatctttgggcatgtctggagaatagatgttcatatgttggctgtggtgaatcacaagtagatcacagcaccatacattctcaggagacaaagcattatctaactgtgaaccttaccactcttcgagtatggtgttatgcttgcagcaaagaagtatttttggataggaaattaggaactcagccttcattgcctcatgtaagacaacctcaccaaatacaagaaaacagtgtccaggattttaaaatacccagtaatacaacattaaaaactcctctggttgccgtatttgatgatctggatatagaagcggatgaagaagatgaacttagggccagaggtcttacaggtttgaaaaatattggaaatacttgttacatgaatgcagctttgcaggctc

SEQ ID NO: 197343 - DNA, 389 bp, Homo sapiens
  Payload ID: 18927
  Gene Name: ubiquitin specific peptidase 33
  ENST ID: ENST00000524778
  CDS Start-End: 172-389
gaagtggccagttcaggaggcggaccccccgagggcagcgctgcggggccgttttccggccctcctgacgcgacactgcccctctccgagagctgagaaggaaaagaggagcttgcggaggtgttacctcattttgaaagtcttgggaaacaggaaaaaattcctaacaaaatgtcagcttttcgaaatcattgtccacatttggattcagttggtgaaataacaaaagaagatttgatacaaaaatcccttggtacttgtcaggattgtaaagtccaaggaccaaatctttgggcatgtctggagaatagatgttcatatgttggctgtggtgaatcacaagtagatcacagcaccatacattctcaggagacaaagcattatctaac

SEQ ID NO: 197344 - DNA, 11357 bp, Homo sapiens
  Payload ID: 18928
  Gene Name: ubiquitin specific peptidase 34
  Uniprot ID: Q70CQ2
  ENST ID: ENST00000398571
  CDS Start-End: 78-10718
tctctcccctcccccccgccggtcgggatcagtcagtgtgatccgaagcgggggagggggggggcggcggccgaacgatgtgcgagaactgcgcagacctggtggaggtgttaaatgaaatatcagatgtagaaggtggtgatggactgcagctcagaaaggaacatactctcaaaatatttacttatatcaattcctggacacagaggcaatgtctatgctgcttcaaggaatataagcatttggagatttttaatcaagtagtgtgtgcacttattaacttagtgattgcccaagttcaagtgctccgggaccagctttgtaaacattgtactaccattaacatagattccacgtggcaagatgagagtaatcaagcagaagaaccactgaatatagatagagagtgtaatgaaggaagtacagaaagacaaaaatcaatagaaaaaaaatcaaactctacaagaatttgtaatctgactgaggaggaatcttcaaagagttctgatccttttagtttatggagtacagatgagaaggaaaaactcttactatgtgtggcaaaaatttttcaaattcagtttcccttatatactgcttacaagcataatactcaccctactattgaggatatatcaactcaagaaagtaacatattaggggcattctgtgatatgaatgatgtagaagtaccattgcatttgcttcgttatgtatgtttgttttgtgggaaaaatggcctttctctcatgaaggattgctttgaatatggaactcctgaaactttgccatttcttatagcacatgcgtttattacagttgtgtctaatattagaatatggctacatattcccgctgtcatgcagcacattataccttttaggacctatgttattaggtatttatgcaagctctcggatcaggagttacgacagagtgcagctcgtaacatggctgacttaatgtggagcacagtcaaagaaccattggatacaacattatgctttgataaagaaagcctagatcttgcatttaagtactttatgtcacctactttgactatgaggttggctggattgagtcagataacaaatcaactccataccttcaatgatgtgtgcaataatgaatcattagtatcggacacagaaacgtccattgcaaaagaacttgcagactggcttattagcaacaatgtggtggagcatatatttggaccaaatttacatattgagattatcaaacagtgccaagtgattttgaattttttggcagcagaagggcgactgagtactcaacatattgactgtatttgggctgcagcacagttgaaacattgtagtcggtatatacatgacttatttccttcactcatcaagaatttggatcccgtaccacttagacatctacttaatctggtctcagctcttgagccaagtgttcatactgaacagacactgtacttggcatccatgttaattaaagcactgtggaataacgcactagcagctaaggctcagttatctaaacagagttcttttgcatctttattaaatactaatattcccattggaaataagaaagaggaagaagagcttagaagaacagctccatcaccttggtcacctgcagctagtcctcaaagcagtgataatagcgatacacatcaaagtggaggtagtgacattgaaatggatgagcaacttattaatagaaccaaacatgtgcaacaacgactttcagacacagaggaatccatgcagggaagttctgacgaaactgccaacagtggtgaagatggaagcagtggtcctggtagcagtagtgggcatagtgatggatctagcaatgaggttaattctagccacgcaagccagtcagctgggagccctggcagtgaggtacagtcagaagacattgcagatattgaagccctcaaagaggaagatgaagacgatgatcatggtcataatcctcccaaaagcagttgtggtacagatcttcggaatagaaagttagagagtcaagcaggcatttgcctgggggactcccaaggcatgtcagaaagaaatgggacaagcagcggaacaggaaaggacctggtttttaacactgaatcattgccatcagtagataatcgaatgcgaatgctggatgcttgttcacactctgaagacccagaacatgatatttcaggggaaatgaatgctactcatatagcacaagggtctcaggagtcttgtatcacacgaactggggacttccttggggagactattgggaatgaattatttaattgtcgacaatttattggtccacagcatcaccaccaccaccaccaccatcaccaccaccacgatgggcatatggttgatgatatgctaagtgcagatgatgtcagttgtagtagctcccaggttagtgcaaaatcagaaaaaaatatggctgattttgatggtgaagaatctggatgtgaagaggagctagttcagattaattcacatgcggaactgacatctcacctccaacaacatcttcccaatttagcttccatttaccatgaacatcttagtcaaggacctgtagttcataaacatcaattcaacagtaatgctgttacagacattaatttggataatgtttgcaagaaaggaaatactttgttgtgggatatagtccaagatgaagatgcagttaatctttctgaaggattaataaatgaagcagagaaacttctttgttcgttagtatgttggtttacagatagacaaattcgaatgagattcattgaaggttgccttgaaaacttgggaaacaacagatcagtagtaatttcacttcgtcttcttccaaaactatttggtacttttcagcagtttgggagcagttacgatacacactggataacaatgtgggcagaaaaagaactgaacatgatgaagcttttctttgataatttggtatactacattcaaactgtgagagaaggaagacaaaaacatgcactgtacagccatagtgctgaagttcaagttcgtcttcaattcttgacttgtgtattttcaactctgggatcacctgatcatttcaggttaagtttagagcaagttgacatcttatggcattgtttagtagaagattctgaatgttatgatgatgcactccattggtttttaaatcaagttcgaagtaaagatcaacatgctatgggtatggaaacctacaaacatcttttcctggagaagatgccccagctaaaacctgaaacaattagcatgactggcttaaacctgtttcagcatctctgtaacttggctcgattggctaccagtgcctatgatggttgttcaaattctgagctgtgtggtatggaccaattttggggcattgctttaagagcacaatctggtgatgtcagtcgagcagctatccagtatattaactcctattatattaatggtaaaacaggtttggagaaggagcaagaatttattagtaagtgcatggagagtcttatgatagcttctagcagtcttgaacaggaatcacactcaagtctcatggttatagaaagaggactccttatgctgaagacacatctggaagcgtttaggagaaggtttgcatatcatctgagacagtggcaaattgaaggcactggtattagtagtcatttgaaagcactgagtgacaaacagtctctgccgctaagggttgtatgccagccagctggacttcctgacaagatgactattgaaatgtatcctagtgaccaggtagcagatcttagggctgaagtaactcattggtatgaaaatttacagaaagaacaaataaatcaacaagctcagcttcaggagtttggtcaaagcaaccgaaaaggagagtttcctggaggcctcatgggacctgtcaggatgatttcatctggacacgagttaacaacagattatgatgaaaaagcacttcatgagcttggttttaaggatatgcagatggtatttgtatctttgggtgcaccaaggagagagcggaaaggggaaggtgttcagctgccagcatcttgcctcccaccccctcagaaggacaacattccaatgcttttgcttttacaagagcctcatttaactactctttttgatttattagagatgcttgcatcatttaaaccaccctcaggaaaagtggcagtggatgatagtgagagcttacgatgtgaagaacttcatcttcatgcagaaaatctgtctaggcgggtctgggagctactgatgcttcttcctacatgtcctaatatgttgatggcattccagaatatctcagatgagcagagtaatgatggatttaattggaaagaacttctcaaaattaagagcgcccacaagctattgtatgctctggaaattattgaagcactgggaaaacctaatagaagaataaggagggagtctacgggaagttacagtgatctttatccagattcagatgattcaagtgaagatcaagtggaaaatagtaaaaattcctggagttgcaagtttgttgctgctggagggcttcaacagttattagaaatttttaattctggaattctagagcctaaagagcaggaatcatggactgtgtggcagctagactgtcttgcttgcttgctgaagttaatatgccagtttgcagtagatccatccgatttggatttagcttatcatgatgtctttgcctggtctggtatagcggaaagccataggaaaagaacctggcctggcaaatcaaggaaggctgctggtgatcatgctaagggtcttcatataccacgattaacagaggtatttcttgttcttgtccaaggaaccagtttgattcagcgacttatgtctgttgcttatacgtatgataatctggctcctagagttttaaaagctcagtctgatcacaggtctagacatgaagtttcacattattcaatgtggctcttggtgagttgggctcattgctgttctttagtgaaatctagccttgctgatagcgatcatttacaagattggctaaagaaattgactctccttattcctgagactgcagttcgtcatgaatcatgcagtggtctctataagttatccctgtcagggctggatggaggagactcaatcaatcgttcttttctgctattggctgcctcaacattattgaaatttcttcctgatgctcaagcactcaaacctattaggatagatgattatgaggaagaaccaatattaaaaccaggatgtaaagagtatttttggttgttatgcaaattagttgacaacatacatataaaggacgctagtcagacaacgctcctcgacttagatgccttggcaagacatttggctgactgtattcgaagtagggagatccttgatcatcaggatggtaatgtagaagatgatgggcttacaggactcctaaggcttgcaacaagtgttgttaaacacaaaccaccctttaaattttcaagggaaggacaggaatttttgagagatatcttcaatctcctgtttttgttgccaagtctaaaggaccgacaacagccaaagtgcaaatcacattcttcaagagctgccgcttacgatttgttagtagagatggtaaaggggtctgttgagaactacaggctaatacacaactgggttatggcacaacacatgcagtcccatgcaccttataaatgggattactggcctcatgaagatgtccgtgctgaatgtagatttgttggccttactaaccttggagctacttgttacttagcttctactattcagcaactttatatgatacctgaggcaagacaggctgtcttcactgccaagtattcagaggatatgaagcacaagaccactcttctggagcttcagaaaatgtttacatatttaatggagagtgaatgcaaagcatataatcctagacctttctgtaaaacatacaccatggataagcagcctctgaatactggggaacagaaagatatgacagagttttttactgatctaattaccaaaatcgaagaaatgtctcccgaactgaaaaataccgtcaaaagtttatttggaggtgtaattacaaacaatgttgtatccttggattgtgaacatgttagtcaaactgctgaagagttttatactgtgaggtgccaagtggctgatatgaagaacatttatgaatctcttgatgaagttactataaaagacactttggaaggtgataacatgtatacttgttctcattgtgggaagaaagtacgagctgaaaaaagggcatgttttaagaaattgcctcgcattttgagtttcaatactatgagatacacatttaatatggtcacgatgatgaaagagaaagtgaatacacacttttccttcccattacgtttggacatgacgccctatacagaagattttcttatgggaaagagtgagaggaaagaaggttttaaagaagtcagtgatcattcaaaagactcagagagctatgaatatgacttgataggagtgactgttcacacaggaacggcagatggtggacactattatagctttatcagagatatagtaaatccccatgcttataaaaacaataaatggtatctttttaatgatgctgaggtaaaaccttttgattctgctcaacttgcatctgaatgttttggtggagagatgacgaccaagacctatgattctgttacagataaatttatggacttctcttttgaaaagacacacagtgcatatatgctgttttacaaacgcatggaaccagaggaagaaaatggcagagaatacaaatttgatgtttcgtcagagttactagagtggatttggcatgataacatgcagtttcttcaagacaaaaacatttttgaacatacatattttggatttatgtggcaattgtgtagttgtattcccagtacattaccagatcctaaagctgtgtccttaatgacagcaaagttaagcacttcctttgtcctagagacatttattcattctaaagaaaagcccacgatgcttcagtggattgaactgttgacgaaacagtttaataatagtcaggcagcttgtgagtggtttttagatcgtatggctgatgacgactggtggccaatgcagatactaattaagtgccctaatcaaattgtgagacagatgtttcagcgtttgtgtatccatgtgattcagaggctgagacctgtgcatgctcatctctatttgcagccaggaatggaagatgggtcagatgatatggatacctcagtagaagatattggtggtcgttcatgtgtcactcgctttgtgagaaccctgttattaattatggaacatggtgtaaaacctcacagtaaacatcttacagagtattttgccttcctttacgaatttgcaaaaatgggtgaagaagagagccaatttttgctttcattgcaagctatatctacaatggtacatttttacatgggaacaaaaggacctgaaaatcctcaagttgaagtgttatcagaggaagaaggggaagaagaagaggaggaagaagatatcctctctctggcagaagaaaaatacaggccagctgcccttgaaaagatgatagctttagttgctcttttggttgaacagtctcgatcagaaaggcatttgacattatcacagactgacatggcagcattaacaggaggaaagggatttcccttcttgtttcaacatattcgtgatggcatcaatataagacaaacttgtaatctgattttcagcctgtgtcgatacaataatcgacttgcagaacatattgtatctatgcttttcacatcaatagcaaagttgactcctgaggcagccaatcctttctttaagttgttgactatgctaatggagtttgctggtggacctccaggaatgcctccctttgcatcttatattctgcagaggatatgggaggtgattgaatacaatccttctcagtgtctagattggttggcagtgcagacaccccgaaataaactggcacacagctgggtcttacagaatatggaaaactgggtcgagcggtttcttttggctcacaattatcctagagtgaggacttctgcagcttatcttctggtgtcccttataccaagcaattcattccgtcagatgttccggtcaacaaggtctttgcacatcccaacccgtgaccttccactcagtccagacacaacagtagtcctacatcaggtctacaacgtgctccttggtttgctctcaagagccaaactttatgttgatgctgctgttcatggcactacaaagctagtgccctattttagctttatgacttactgtttaatttccaaaactgagaagctgatgttttccacatatttcatggatttgtggaaccttttccagcctaaactttctgagccagcaatagctacaaatcacaataaacaggctttgctttcattttggtacaatgtctgtgctgactgtccagagaatatccgccttattgttcagaacccagtggtaaccaagaacattgccttcaattacatccttgctgaccatgatgatcaggatgtggtgctttttaaccgtgggatgctgccagcgtactatggcattctgaggctctgctgtgagcagtctcctgcattcacacgacaactggcttctcaccagaacatccagtgggcctttaagaatcttacaccacatgccagccaataccctggagcagtagaagaactgtttaacctgatgcagctgtttatagctcagaggccagatatgagagaagaagaattagaagatattaaacagttcaagaaaacaaccataagttgttacttacgttgcttagatggccgctcctgctggactactttaataagtgccttcagaatactattagaatctgatgaagacagacttcttgttgtatttaatcgaggattgattctaatgacagagtctttcaacactttgcacatgatgtatcacgaagctacagcttgccatgtgactggagatttagtagaacttctgtcaatatttctttcggttttgaagtctacacgcccttatcttcagagaaaagatgtgaaacaagcattaatccagtggcaggagcgaattgaatttgcccataaactgttaactcttcttaattcctatagtcctccagaacttagaaatgcctgtatagatgtcctcaaggaacttgtacttttgagtccccatgattttcttcatactctggttccctttctacaacacaaccattgtacttaccatcacagtaatataccaatgtctcttggaccttatttcccttgtcgagaaaatatcaagctaataggagggaaaagcaatattcggcctccgcgccctgaactcaatatgtgcctcttgcccacaatggtggaaaccagtaagggcaaagatgacgtttatgatcgtatgctgctagactacttcttttcttatcatcagttcatccatctattatgccgagttgcaatcaactgtgaaaaatttactgaaacattagttaagctgagtgtcctagttgcctatgaaggtttgccacttcatcttgcactgttccccaaactttggactgagctatgccagactcagtctgctatgtcaaaaaactgcatcaagcttttgtgtgaagatcctgttttcgcagaatatattaaatgtatcctaatggatgaaagaacttttttaaacaacaacattgtctacacgttcatgacacatttccttctaaaggttcaaagtcaagtgttttctgaagcaaactgtgccaatttgatcagcactcttattacaaacttgataagccagtatcagaacctacagtctgatttctccaaccgagttgaaatttccaaagcaagtgcttctttaaatggggacctgagggcactcgctttgctcctgtcagtacacactcccaaacagttaaacccagctctaattccaactctgcaagagcttttaagcaaatgcaggacttgtctgcaacagagaaactcactccaagagcaagaagccaaagaaagaaaaactaaagatgatgaaggagcaactcccattaaaaggcggcgtgttagcagtgatgaggagcacactgtagacagctgcatcagtgacatgaaaacagaaaccagggaggtcctgaccccaacgagcacttctgacaatgagaccagagactcctcaattattgatccaggaactgagcaagatcttccttcccctgaaaatagttctgttaaagaataccgaatggaagttccatcttcgttttcagaagacatgtcaaatatcaggtcacagcatgcagaagaacagtccaacaatggtagatatgacgattgtaaagaatttaaagacctccactgttccaaggattctaccctagctgaggaagaatctgagttcccttctacttctatctctgcagttctgtctgacttagctgacttgagaagctgtgatggccaagctttgccctcccaggaccctgaggttgctttatctctcagttgtggccattccagaggactctttagtcatatgcagcaacatgacattttagataccctgtgtaggaccattgaatctacaatccatgtcgtcacaaggatatctggcaaaggaaaccaagctgcttcttgacattaggtgtagcatgtctacttttaagtccctcacccccaacccccatgctgtttgtataagttttgcttatttgtttttgtgcttcagtttgtccagtgctctctgcttgaatggcaagatagatttataggcttaattcttggtcaggcagaactccagatgaaaaaaacttgcatcttcagtatacttcctaaagggcaatcagataatggatatgttttatgtaattaagagttcactttagtggctttcatttaatatggctgtctgggaagaacagggttgcctagccctgtacaatgtaatttaaacttacagcatttttactgtgtatgatatggtgtcctctgtgccagttttgtaccttatagaggcagattgcctccgatcgctgtggttcttattatcaaaattaagtttacttgtatacggaacaaccacaagaaatttgattctgtaaagaatcctctttagctgtggcctggcagtatataaatggtgctttatttaacagaatacctgtggaggaaataaagcacacttgatgtaaaaataattgttttatttttattgacatgactgattgattgattgctattctgtgcacttaattaaactgattgtgatgacttttca

SEQ ID NO: 197345 - DNA, 1409 bp, Homo sapiens
  Payload ID: 18928
  Gene Name: ubiquitin specific peptidase 34
  ENST ID: ENST00000453133
  CDS Start-End: 1-136
gtgcgagaactgcgcagacctggtggaggtgttaaatgaaatatcagatgtagaaggtggtgatggactgcagctcagaaaggaacatactctcaaaatatttacttatatcaattcctggacacagaggatgtagaagtaccattgcatttgcttcgttatgtatgtttgttttgtgggaaaaatggcctttctctcatgaaggattgctttgaatatggaactcctgaaactttgccatttcttatagcacatgcgtttattacagttgtgtctaatattagaatatggctacatattcccgctgtcatgcagcacattataccttttaggacctatgttattaggtatttatgcaagctctcggatcaggagttacgacagagtgcagctcgtaacatggctgacttaatgtggagcacagtcaaagaaccattggatacaacattatgctttgataaagaaagcctagatcttgcatttaagtactttatgtcacctactttgactatgaggttggctggattgagtcagataacaaatcaactccataccttcaatgatgtgtgcaataatgaatcattagtatcggacacagaaacgtccattgcaaaagaacttgcagactggcttattagcaacaatgtggtggagcatatatttggaccaaatttacatattgagattatcaaacagtgccaagtgattttgaattttttggcagcagaagggcgactgagtactcaacatattgactgtatttgggctgcagcacagttgaaacattgtagtcggtatatacatgacttatttccttcactcatcaagaatttggatcccgtaccacttagacatctacttaatctggtctcagctcttgagccaagtgttcatactgaacagacactgtacttggcatccatgttaattaaagcactgtggaataacgcactagcagctaaggctcagttatctaaacagagttcttttgcatctttattaaatactaatattcccattggaaataagaaagaggaagaagagcttagaagaacagctccatcaccttggtcacctgcagctagtcctcaaagcagtgataatagcgatacacatcaaagtggaggtagtgacattgaaatggatgagcaacttattaatagaaccaaacatgtgcaacaacgactttcagacacagaggaatccatgcagggaagttctgacgaaactgccaacagtggtgaagatggaagcagtggtcctggtagcagtagtgggcatagtgatggatctagcaatgaggttaattctagccacgcaagccagtcagctgggagccctggcagtgaggtacagtcagaagacattgcagatattgaagccctcaaagaggaagatgaagacgatga

SEQ ID NO: 197346 - DNA, 1827 bp, Homo sapiens
  Payload ID: 18928
  Gene Name: ubiquitin specific peptidase 34
  ENST ID: ENST00000436269
  CDS Start-End: 1-1275
gggaaaagcaatattcggcctccgcgccctgaactcaatatgtgcctcttgcccacaatggtggaaaccagtaagttcatccatctattatgccgagttgcaatcaactgtgaaaaatttactgaaacattagttaagctgagtgtcctagttgcctatgaaggtttgccacttcatcttgcactgttccccaaactttggactgagctatgccagactcagtctgctatgtcaaaaaactgcatcaagcttttgtgtgaagatcctgttttcgcagaatatattaaatgtatcctaatggatgaaagaacttttttaaacaacaacattgtctacacgttcatgacacatttccttctaaaggttcaaagtcaagtgttttctgaagcaaactgtgccaatttgatcagcactcttattacaaacttgataagccagtatcagaacctacagtctgatttctccaaccgagttgaaatttccaaagcaagtgcttctttaaatggggacctgagggcactcgctttgctcctgtcagtacacactcccaaacagttaaacccagctctaattccaactctgcaagagcttttaagcaaatgcaggacttgtctgcaacagagaaactcactccaagagcaagaagccaaagaaagaaaaactaaagatgatgaaggagcaactcccattaaaaggcggcgtgttagcagtgatgaggagcacactgtagacagctgcatcagtgacatgaaaacagaaaccagggaggtcctgaccccaacgagcacttctgacaatgagaccagagactcctcaattattgatccaggaactgagcaagatcttccttcccctgaaaatagttctgttaaagaataccgaatggaagttccatcttcgttttcagaagacatgtcaaatatcaggtcacagcatgcagaagaacagtccaacaatggtagatatgacgattgtaaagaatttaaagacctccactgttccaaggattctaccctagctgaggaagaatctgagttcccttctacttctatctctgcagttctgtctgacttagctgacttgagaagctgtgatggccaagctttgccctcccaggaccctgaggttgctttatctctcagttgtggccattccagaggactctttagtcatatgcagcaacatgacattttagataccctgtgtaggaccattgaatctacaatccatgtcgtcacaaggatatctggcaaaggaaaccaagctgcttcttgacattaggtgtagcatgtctacttttaagtccctcacccccaacccccatgctgtttgtataagttttgcttatttgtttttgtgcttcagtttgtccagtgctctctgcttgaatggcaagatagatttataggcttaattcttggtcaggcagaactccagatgaaaaaaacttgcatcttcagtatacttcctaaagggcaatcagataatggatatgttttatgtaattaagagttcactttagtggctttcatttaatatggctgtctgggaagaacagggttgcctagccctgtacaatgtaatttaaacttacagcatttttactgtgtatgatatggtgtcctctgtgccagttttgtaccttatagaggcagattgcctccgatcgctgtggttcttattatcaaaattaagtttacttgtatacggaacaaccacaagaaatttgattctgtaaagaatcctctttagctgtggcctggcagtatataaatggtgctttatttaacagaatacctgtggaggaaataaagcacacttgatgta

SEQ ID NO: 197347 - DNA, 4309 bp, Homo sapiens
  Payload ID: 18928
  Gene Name: ubiquitin specific peptidase 34
  ENST ID: ENST00000411912
  CDS Start-End: 1-3670
agaggaagaaaatggcagagaatacaaatttgatgtttcgtcagagttactagagtggatttggcatgataacatgcagtttcttcaagacaaaaacatttttgaacatacatattttggatttatgtggcaattgtgtagttgtattcccagtacattaccagatcctaaagctgtgtccttaatgacagcaaagttaagcacttcctttgtcctagagacatttattcattctaaagaaaagcccacgatgcttcagtggattgaactgttgacgaaacagtttaataatagtcaggcagcttgtgagtggtttttagatcgtatggctgatgacgactggtggccaatgcagatactaattaagtgccctaatcaaattgtgagacagatgtttcagcgtttgtgtatccatgtgattcagaggctgagacctgtgcatgctcatctctatttgcagccaggaatggaagatgggtcagatgatatggatacctcagtagaagatattggtggtcgttcatgtgtcactcgctttgtgagaaccctgttattaattatggaacatggtgtaaaacctcacagtaaacatcttacagagtattttgccttcctttacgaatttgcaaaaatgggtgaagaagagagccaatttttgctttcattgcaagctatatctacaatggtacatttttacatgggaacaaaaggacctgaaaatcctcaagttgaagtgttatcagaggaagaaggggaagaagaagaggaggaagaagatatcctctctctggcagaagaaaaatacaggccagctgcccttgaaaagatgatagctttagttgctcttttggttgaacagtctcgatcagaaaggcatttgacattatcacagactgacatggcagcattaacaggaggaaagggatttcccttcttgtttcaacatattcgtgatggcatcaatataagacaaacttgtaatctgattttcagcctgtgtcgatacaataatcgacttgcagaacatattgtatctatgcttttcacatcaatagcaaagttgactcctgaggcagccaatcctttctttaagttgttgactatgctaatggagtttgctggtggacctccaggaatgcctccctttgcatcttatattctgcagaggatatgggaggtgattgaatacaatccttctcagtgtctagattggttggcagtgcagacaccccgaaataaactggcacacagctgggtcttacagaatatggaaaactgggtcgagcggtttcttttggctcacaattatcctagagtgaggacttctgcagcttatcttctggtgtcccttataccaagcaattcattccgtcagatgttccggtcaacaaggtctttgcacatcccaacccgtgaccttccactcagtccagacacaacagtagtcctacatcaggtctacaacgtgctccttggtttgctctcaagagccaaactttatgttgatgctgctgttcatggcactacaaagctagtgccctattttagctttatgacttactgtttaatttccaaaactgagaagctgatgttttccacatatttcatggatttgtggaaccttttccagcctaaactttctgagccagcaatagctacaaatcacaataaacaggctttgctttcattttggtacaatgtctgtgctgactgtccagagaatatccgccttattgttcagaacccagtggtaaccaagaacattgccttcaattacatccttgctgaccatgatgatcaggatgtggtgctttttaaccgtgggatgctgccagcgtactatggcattctgaggctctgctgtgagcagtctcctgcattcacacgacaactggcttctcaccagaacatccagtgggcctttaagaatcttacaccacatgccagccaataccctggagcagtagaagaactgtttaacctgatgcagctgtttatagctcagaggccagatatgagagaagaagaattagaagatattaaacagttcaagaaaacaaccataagttgttacttacgttgcttagatggccgctcctgctggactactttaataagtgccttcagaatactattagaatctgatgaagacagacttcttgttgtatttaatcgaggattgattctaatgacagagtctttcaacactttgcacatgatgtatcacgaagctacagcttgccatgtgactggagatttagtagaacttctgtcaatatttctttcggttttgaagtctacacgcccttatcttcagagaaaagatgtgaaacaagcattaatccagtggcaggagcgaattgaatttgcccataaactgttaactcttcttaattcctatagtcctccagaacttagaaatgcctgtatagatgtcctcaaggaacttgtacttttgagtccccatgattttcttcatactctggttccctttctacaacacaaccattgtacttaccatcacagtaatataccaagtgtcctagttgcctatgaaggtttgccacttcatcttgcactgttccccaaactttggactgagctatgccagactcagtctgctatgtcaaaaaactgcatcaagcttttgtgtgaagatcctgttttcgcagaatatattaaatgtatcctaatggatgaaagaacttttttaaacaacaacattgtctacacgttcatgacacatttccttctaaaggttcaaagtcaagtgttttctgaagcaaactgtgccaatttgatcagcactcttattacaaacttgataagccagtatcagaacctacagtctgatttctccaaccgagttgaaatttccaaagcaagtgcttctttaaatggggacctgagggcactcgctttgctcctgtcagtacacactcccaaacagttaaacccagctctaattccaactctgcaagagcttttaagcaaatgcaggacttgtctgcaacagagaaactcactccaagagcaagaagccaaagaaagaaaaactaaagatgatgaaggagcaactcccattaaaaggcggcgtgttagcagtgatgaggagcacactgtagacagctgcatcagtgacatgaaaacagaaaccagggaggtcctgaccccaacgagcacttctgacaatgagaccagagactcctcaattattgatccaggaactgagcaagatcttccttcccctgaaaatagttctgttaaagaataccgaatggaagttccatcttcgttttcagaagacatgtcaaatatcaggtcacagcatgcagaagaacagtccaacaatggtagatatgacgattgtaaagaatttaaagacctccactgttccaaggattctaccctagctgaggaagaatctgagttcccttctacttctatctctgcagttctgtctgacttagctgacttgagaagctgtgatggccaagctttgccctcccaggaccctgaggttgctttatctctcagttgtggccattccagaggactctttagtcatatgcagcaacatgacattttagataccctgtgtaggaccattgaatctacaatccatgtcgtcacaaggatatctggcaaaggaaaccaagctgcttcttgacattaggtgtagcatgtctacttttaagtccctcacccccaacccccatgctgtttgtataagttttgcttatttgtttttgtgcttcagtttgtccagtgctctctgcttgaatggcaagatagatttataggcttaattcttggtcaggcagaactccagatgaaaaaaacttgcatcttcagtatacttcctaaagggcaatcagataatggatatgttttatgtaattaagagttcactttagtggctttcatttaatatggctgtctgggaagaacagggttgcctagccctgtacaatgtaatttaaacttacagcatttttactgtgtatgatatggtgtcctctgtgccagttttgtaccttatagaggcagattgcctccgatcgctgtggttcttattatcaaaattaagtttacttgtatacggaacaaccacaagaaatttgattctgtaaagaatcctctttagctgtggcctggcagtatataaatggtgctttatttaacagaatacctgtggaggaaataaagcacacttgatgtaaaaataattgttttatttttattgacatgactgattgattgattgctattctgtgcacttaattaaactgattgtgatgacttttca

SEQ ID NO: 197348 - DNA, 2708 bp, Homo sapiens
  Payload ID: 18928
  Gene Name: ubiquitin specific peptidase 34
  ENST ID: ENST00000453734
  CDS Start-End: 1-2433
gaagaaccaatattaaaaccaggatgtaaagagtatttttggttgttatgcaaattagttgacaacatacatataaaggacgctagtcagacaacgctcctcgacttagatgccttggcaagacatttggctgactgtattcgaagtagggagatccttgatcatcaggatggtaatgtagaagatgatgggcttacaggactcctaaggcttgcaacaagtgttgttaaacacaaaccaccctttaaattttcaagggaaggacaggaatttttgagagatatcttcaatctcctgtttttgttgccaagtctaaaggaccgacaacagccaaagtgcaaatcacattcttcaagagctgccgcttacgatttgttagtagagatggtaaaggggtctgttgagaactacaggctaatacacaactgggttatggcacaacacatgcagtcccatgcaccttataaatgggattactggcctcatgaagatgtccgtgctgaatgtagatttgttggccttactaaccttggagctacttgttacttagcttctactattcagcaactttatatgatacctgaggcaagacaggctgtcttcactgccaagtattcagaggatatgaagcacaagaccactcttctggagcttcagaaaatgtttacatatttaatggagagtgaatgcaaagcatataatcctagacctttctgtaaaacatacaccatggataagcagcctctgaatactggggaacagaaagatatgacagagttttttactgatctaattaccaaaatcgaagaaatgtctcccgaactgaaaaataccgtcaaaagtttatttggaggtgtaattacaaacaatgttgtatccttggattgtgaacatgttagtcaaactgctgaagagttttatactgtgaggtgccaagtggctgatatgaagaacatttatgaatctcttgatgaagttactataaaagacactttggaaggtgataacatgtatacttgttctcattgtgggaagaaagtacgagctgaaaaaagggcatgttttaagaaattgcctcgcattttgagtttcaatactatgagatacacatttaatatggtcacgatgatgaaagagaaagtgaatacacacttttccttcccattacgtttggacatgacgccctatacagaagattttcttatgggaaagagtgagaggaaagaaggttttaaagaagtcagtgatcattcaaaagactcagagagctatgaatatgacttgataggagtgactgttcacacaggaacggcagatggtggacactattatagctttatcagagatatagtaaatccccatgcttataaaaacaataaatggtatctttttaatgatgctgaggtaaaaccttttgattctgctcaacttgcatctgaatgttttggtggagagatgacgaccaagacctatgattctgttacagataaatttatggacttctcttttgaaaagacacacagtgcatatatgctgttttacaaacgcatggaaccagaggaagaaaatggcagagaatacaaatttgatgtttcgtcagagttactagagtggatttggcatgataacatgcagtttcttcaagacaaaaacatttttgaacatacatattttggatttatgtggcaattgtgtagttgtattcccagtacattaccagatcctaaagctgtgtccttaatgacagcaaagttaagcacttcctttgtcctagagacatttattcattctaaagaaaagcccacgatgcttcagtggattgaactgttgacgaaacagtttaataatagtcaggcagcttgtgagtggtttttagatcgtatggctgatgacgactggtggccaatgcagatactaattaagtgccctaatcaaattgtgagacagatgtttcagcgtttgtgtatccatgtgattcagaggctgagacctgtgcatgctcatctctatttgcagccaggaatggaagatgggtcagatgatatggatacctcagtagaagatattggtggtcgttcatgtgtcactcgctttgtgagaaccctgttattaattatggaacatggtgtaaaacctcacagtaaacatcttacagagtattttgccttcctttacgaatttgcaaaaatgggtgaagaagagagccaatttttgctttcattgcaagctatatctacaatggtacatttttacatgggaacaaaaggacctgaaaatcctcaagttgaagtgttatcagaggaagaaggggaagaagaagaggaggaagaagatatcctctctctggcagaagaaaaatacaggccagctgcccttgaaaagatgatagctttagttgctcttttggttgaacagtctcgatcagaaaggtgaaatgtttcgaatttaaaatgtttaaagcatgtttggttttattatttttacataattgtttaccactagtttttccactagctttttattatatatgtttaattatgtaattgttattcactagcttttattatataaatccttttaaataatactactattcatcaactcttgtggcataagaatttcagttttttctaccaaacttttacttcatctatgagtcgtgttagaaatagtcattgaaaaaatatacagtaaaatatctagcaaaa

SEQ ID NO: 197349 - DNA, 4216 bp, Homo sapiens
  Payload ID: 18929
  Gene Name: ubiquitin specific peptidase 35
  Uniprot ID: Q9P2H5
  ENST ID: ENST00000529308
  CDS Start-End: 262-3318
gcttcatcccgcagccccggggccgcgccgcagagtcgggcttcctggatacatagaggcttgtgccaggcggggtgggaagactggattttgcagtggaagcagcatctcttccgtctgggacctggctgagggcgtccccaccctggggggagcagaggaccagccctgacctagccgggcccagcctcgtcctgcccggcctgagcgccccgcccagcagccggctctggcccaccggggtccgggagcgcgggcgccatggacaagatcttggaggcggtggtgacgtcgtcatacccggtcagcgtgaagcaggggctggttcggcgcgtgctggaggcggcgcggcagccgctggagcgtgagcagtgcctggcgctgctggcgctgggcgcgcgcctctacgtgggcggcgcggaggagctgccgcgccgcgtgggctgccagctgctgcacgtggccggccgccaccaccccgacgtcttcgccgagttcttcagcgcgcgtcgcgtgctgcgcctgctgcagggtggcgccggccccccgggcccccgcgcgctcgcctgcgtgcagctgggtctgcagctgctgcccgaggggcctgcggccgacgaggtgttcgcgctgctgcggcgcgaggtgctgcgcaccgtgtgcgagcgcccgggccccgcggcctgcgcgcaggtggcacggctgctggctcgccacccgcgctgtgtgcccgacggaccccaccgcctgctcttctgccagcagctggtgcgttgcctcggccgcttccgctgcccagccgaaggcgaggagggcgccgtggagttcctagagcaggcccagcaggtgagcgggctcctggcgcagctgtggcgcgcacagcccgccgccatcctgccctgcctcaaagagctgttcgcagtcatctcctgcgcagaggaggagccaccatctagcgccctggccagcgtggtccagcacctcccattggagctcatggatggtgttgtccggaacctcagcaatgatgacagtgtgacagactcgcagatgctgactgccattagcaggatgattgactgggtgtcctggcccctggggaagaatattgacaagtggatcattgcactgctgaagggcctggctgctgttaagaagttcagcatcttgatcgaggtttcgctcaccaaaattgagaaggttttctctaagctgctgtaccccatcgtccggggagctgccttgtctgtgctcaagtacatgctcctgaccttccagcactcccacgaagccttccacctgctcctccctcacatcccccccatggtggcctctctggtcaaggaggactcgaactcggggaccagctgcctggagcagctggcggagctggtccactgcatggtgttccggttcccgggcttcccggatctgtatgagcctgtcatggaggccatcaaggacctccatgttcccaatgaggaccgcatcaagcagctgctggggcaggatgcctggacttcgcagaagagcgagctggcgggtttctatccccggctcatggccaagtcagacacgggcaagattggtctcatcaacctgggcaacacatgctatgtcaacagcatccttcaggccttattcatggcgtctgacttcagacattgtgtgctccgcttgactgagaacaactcacagcccctgatgaccaagctgcagtggctctttggcttcctagaacacagccagcggcctgccatttccccagagaacttcctctccgcatcctggacgccctggttcagccctggcacccagcaggactgctcggagtatctgaagtacctgctggatcggctgcacgaagaggagaaaacgggcacaaggatctgccagaaactcaagcagtccagctcgccctctccgcccgaggagcccccggccccaagttcaacctctgtggaaaaaatgtttggaggcaagatagtgactcggatctgctgtctctgctgcctcaacgtctcctcccgggaggaggccttcacggacctctctctcgccttccctcctcctgagcgctgtcgccgccgccgcctgggctctgtgatgcgccccacagaagacatcacagcccgggagttgcccccaccaaccagtgcacaggggccaggcagggtgggtcctcggaggcaaaggaaacactgcatcacagaggacaccccccccaccagcctgtacatcgaaggcctggactccaaggaagctggtgggcagagcagtcaggaggaaaggatagagagggaggaagaagggaaggaggagagaacggagaaggaagaagtgggggaggaggaggaaagcaccagaggggaaggagagagggagaaagaggaggaggtggaagaggaagaagagaaggtggagaaggagacagaaaaggaggctgagcaggaaaaggaagaagacagcctgggagcggggacccacccggatgctgccatcccctccggggagcggacatgtggctctgagggctcccgctccgtcctggacctggttaactacttcctgtcccccgagaagctgacagcagaaaaccgctactactgcgagtcgtgtgcctccctgcaggatgccgagaaggtggtggagctgagccaagggccgtgctacctcatcctcacactgctgcgcttctctttcgacctgcgcaccatgcggcgccgcaagatcctggatgacgtctccatccccctgctgctccgcctgccactggctggtggccgtggccaggcctatgacctctgcagtgtggtggtgcactctggagtgtcttcggagagtggtcactactactgctatgcccgtgagggcgctgcccgccctgccgcttctctgggaactgccgataggccagagcccgagaaccagtggtacctgttcaatgacactcgggtgtccttctcttccttcgaatctgtcagcaacgtcacctccttcttccctaaggacacagcctatgtgctgttttaccggcagcggcccagggaggggcccgaggctgagttgggctcttctagagtccggacagagcccaccctgcacaaggacttgatggaagccatttccaaagacaacatcctttacctacaggagcaggagaaggaggcccggagcagggcggcctacatctctgcactccccacatctccgcactgggggaggggctttgatgaagacaaggatgaggatgaaggctctccagggggctgcaatcctgcaggtggcaatggtggtgacttccacagactggtcttctaatgtgaacctgctgccaacctgaccccttccctccaggagccaggtagggcctgagggaagctgtggaggcaggccctaccaagaggaaggatggtacagctcatggcaccttagtcctcagcctgatgaagggtacacagagattctctcagatatggaagtaagacctaagtccctttcattggggatcagtcccattaaaactttacacccaagtgtcctggttaacttgaagcagccgagatgggcacacacgggtctttgcctccccctccttccctagcaggctccccatgcgggaagatctgatgatgttcaggaaacaggctagacctcagctccaatgttttgacatcaagtactattttccttccgactgctgtacggtataaagcacagcaggatccaagccttgcacaaaggggtggggggggcagtgtctcctctggctgtcctgtttgtttgtttctcatatgggggtggggggtacctgcactgtctgtacctttctgagaagaacagagaccgagacctgcccccttaccaagcgccactgcatggttttgggggggggggcggggggctagcttctcacagcaggaggcctttgcccccacagcccctccacgcctgcctcagggcctgagaagccaccacttgtatcccccttgtggttagagtcctgattttactgcaaaggtgttcatgttccttgtgaagtgtgggctcttaggaagcctgtgggctcctctgagcagttggcctttgtagctgcaacagcagccacctgcaggttgggtgaagtgccctgacactgctgtagcccccttctaacttctaaccgaagacaagacagacacccatgttcataaataaataaaagtaagcctaagcaaga

SEQ ID NO: 197350 - DNA, 3770 bp, Homo sapiens
  Payload ID: 18929
  Gene Name: ubiquitin specific peptidase 35
  Uniprot ID: Q9P2H5
  ENST ID: ENST00000526425
  CDS Start-End: 627-2876
cagtctgctgagtctaggctgttttcctcagcactgactgcatggcagctgtgtgctcagcccgcacaggcaggctgtgttgtggggtccagaggggctgatacatgtaaagttgatggaatatcctgctcaatggtgaatacgacctaagtgttagctgctgttatctcctttaatccatacaagaaccctctgagggaggtattatccccattttacagaggaagaaactgaggcccagagcggggaagtggcttgctctgggtcacacagcaaggacttgctggagccaaagcttctggcccaggggcagtgcccttccaggcagaagcagctgaaagccttgttctggcattgcagcccagtgtggaggggcgagacttggggtgctgagagggcctggctcccttcttggtgggctgggagcctcagtgtctggcaggtggctgtgctgggcttgtgcatttcccagccatgtctggttcagcccacagaccccggggctgccctttgcaggtgtgagtcaatgtgggaacccaggacattacggatagcccctgggctgccctcaccccagcattttgggtgtcccttgtccctgtgtcactgtcactcccctcaccaggatgattgactgggtgtcctggcccctggggaagaatattgacaagtggatcattgcactgctgaagggcctggctgctgttaagaagttcagcatcttgatcgaggtttcgctcaccaaaattgagaaggttttctctaagctgctgtaccccatcgtccggggagctgccttgtctgtgctcaagtacatgctcctgaccttccagcactcccacgaagccttccacctgctcctccctcacatcccccccatggtggcctctctggtcaaggaggactcgaactcggggaccagctgcctggagcagctggcggagctggtccactgcatggtgttccggttcccgggcttcccggatctgtatgagcctgtcatggaggccatcaaggacctccatgttcccaatgaggaccgcatcaagcagctgctggggcaggatgcctggacttcgcagaagagcgagctggcgggtttctatccccggctcatggccaagtcagacacgggcaagattggtctcatcaacctgggcaacacatgctatgtcaacagcatccttcaggccttattcatggcgtctgacttcagacattgtgtgctccgcttgactgagaacaactcacagcccctgatgaccaagctgcagtggctctttggcttcctagaacacagccagcggcctgccatttccccagagaacttcctctccgcatcctggacgccctggttcagccctggcacccagcaggactgctcggagtatctgaagtacctgctggatcggctgcacgaagaggagaaaacgggcacaaggatctgccagaaactcaagcagtccagctcgccctctccgcccgaggagcccccggccccaagttcaacctctgtggaaaaaatgtttggaggcaagatagtgactcggatctgctgtctctgctgcctcaacgtctcctcccgggaggaggccttcacggacctctctctcgccttccctcctcctgagcgctgtcgccgccgccgcctgggctctgtgatgcgccccacagaagacatcacagcccgggagttgcccccaccaaccagtgcacaggggccaggcagggtgggtcctcggaggcaaaggaaacactgcatcacagaggacaccccccccaccagcctgtacatcgaaggcctggactccaaggaagctggtgggcagagcagtcaggaggaaaggatagagagggaggaagaagggaaggaggagagaacggagaaggaagaagtgggggaggaggaggaaagcaccagaggggaaggagagagggagaaagaggaggaggtggaagaggaagaagagaaggtggagaaggagacagaaaaggaggctgagcaggaaaaggaagaagacagcctgggagcggggacccacccggatgctgccatcccctccggggagcggacatgtggctctgagggctcccgctccgtcctggacctggttaactacttcctgtcccccgagaagctgacagcagaaaaccgctactactgcgagtcgtgtgcctccctgcaggatgccgagaaggtggtggagctgagccaagggccgtgctacctcatcctcacactgctgcgcttctctttcgacctgcgcaccatgcggcgccgcaagatcctggatgacgtctccatccccctgctgctccgcctgccactggctggtggccgtggccaggcctatgacctctgcagtgtggtggtgcactctggagtgtcttcggagagtggtcactactactgctatgcccgtgagggcgctgcccgccctgccgcttctctgggaactgccgataggccagagcccgagaaccagtggtacctgttcaatgacactcgggtgtccttctcttccttcgaatctgtcagcaacgtcacctccttcttccctaaggacacagcctatgtgctgttttaccggcagcggcccagggaggggcccgaggctgagttgggctcttctagagtccggacagagcccaccctgcacaaggacttgatggaagccatttccaaagacaacatcctttacctacaggagcaggagaaggaggcccggagcagggcggcctacatctctgcactccccacatctccgcactgggggaggggctttgatgaagacaaggatgaggatgaaggctctccagggggctgcaatcctgcaggtggcaatggtggtgacttccacagactggtcttctaatgtgaacctgctgccaacctgaccccttccctccaggagccaggtagggcctgagggaagctgtggaggcaggccctaccaagaggaaggatggtacagctcatggcaccttagtcctcagcctgatgaagggtacacagagattctctcagatatggaagtaagacctaagtccctttcattggggatcagtcccattaaaactttacacccaagtgtcctggttaacttgaagcagccgagatgggcacacacgggtctttgcctccccctccttccctagcaggctccccatgcgggaagatctgatgatgttcaggaaacaggctagacctcagctccaatgttttgacatcaagtactattttccttccgactgctgtacggtataaagcacagcaggatccaagccttgcacaaaggggtggggggggcagtgtctcctctggctgtcctgtttgtttgtttctcatatgggggtggggggtacctgcactgtctgtacctttctgagaagaacagagaccgagacctgcccccttaccaagcgccactgcatggttttgggggggggggcggggggctagcttctcacagcaggaggcctttgcccccacagcccctccacgcctgcctcagggcctgagaagccaccacttgtatcccccttgtggttagagtcctgattttactgcaaaggtgttcatgttccttgtgaagtgtgggctcttaggaagcctgtgggctcctctgagcagttggcctttgtagctgcaacagcagccacctgcaggttgggtgaagtgccctgacactgctgtagcccccttctaacttctaaccgaagacaagacagacacccatgttcataaataaataaaagtaagcctaagc

SEQ ID NO: 197351 - DNA, 2419 bp, Homo sapiens
  Payload ID: 18929
  Gene Name: ubiquitin specific peptidase 35
  ENST ID: ENST00000530267
  CDS Start-End: 446-2206
cggctggccttaaaggggacgcggtcagagtggcagctcgcggggtggcccccgctccggctccgccccatttcacgcacctcgcccctccccatgcttcatcccgcagccccggggccgcgccgcagagtcgggcttcctggatacatagaggcttgtgccaggcggggtgggaagactggattttgcagtggaagcagcatctcttccgtctgggacctggctgagggcgtccccaccctggggggagcagaggaccagccctgacctagccgggcccagcctcgtcctgcccggcctgagcgccccgcccagcagccggctctggcccaccggggtccgggaggacctccatgttcccaatgaggaccgcatcaagcagctgctggggcaggatgcctggacttcgcagaagagcgagctggcgggtttctatccccggctcatggccaagtcagacacgggcaagattggtctcatcaacctgggcaacacatgctatgtcaacagcatccttcaggccttattcatggcgtctgacttcagacattgtgtgctccgcttgactgagaacaactcacagcccctgatgaccaagctgcagtggctctttggcttcctagaacacagccagcggcctgccatttccccagagaacttcctctccgcatcctggacgccctggttcagccctggcacccagcaggactgctcggagtatctgaagtacctgctggatcggctgcacgaagaggagaaaacgggcacaaggatctgccagaaactcaagcagtccagctcgccctctccgcccgaggagcccccggccccaagttcaacctctgtggaaaaaatgtttggaggcaagatagtgactcggatctgctgtctctgctgcctcaacgtctcctcccgggaggaggccttcacggacctctctctcgccttccctcctcctgagcgctgtcgccgccgccgcctgggctctgtgatgcgccccacagaagacatcacagcccgggagttgcccccaccaaccagtgcacaggggccaggcagggtgggtcctcggaggcaaaggaaacactgcatcacagaggacaccccccccaccagcctgtacatcgaaggcctggactccaaggaagctggtgggcagagcagtcaggaggaaaggatagagagggaggaagaagggaaggaggagagaacggagaaggaagaagtgggggaggaggaggaaagcaccagaggggaaggagagagggagaaagaggaggaggtggaagaggaagaagagaaggtggagaaggagacagaaaaggaggctgagcaggaaaaggaagaagacagcctgggagcggggacccacccggatgctgccatcccctccggggagcggacatgtggctctgagggctcccgctccgtcctggacctggttaactacttcctgtcccccgagaagctgacagcagaaaaccgctactactgcgagtcgtgtgcctccctgcaggatgccgagaaggtggtggagctgagccaagggccgtgctacctcatcctcacactgctgcgcttctctttcgacctgcgcaccatgcggcgccgcaagatcctggatgacgtctccatccccctgctgctccgcctgccactggctggtggccgtggccaggcctatgacctctgcagtgtggtggtgcactctggagtgtcttcggagagtggtcactactactgctatgcccgtgagggcgctgcccgccctgccgcttctctgggaactgccgataggccagagcccgagaaccagtggtacctgttcaatgacactcgggtgtccttctcttccttcgaatctgtcagcaacgtcacctccttcttccctaaggacacagcctatgtgctgttttaccggcagcggcccagggaggggcccgaggctgagttgggctcttctagagtccggacagagcccaccctgcacaaggacttgatggaagccatttccaaagacaacatcctttacctacaggagcaggagaaggaggcccggagcagggcggcctacatctctgcactccccacatctccgcactgggggaggggctttgatgaagacaaggatgaggatgaaggctctccagggggctgcaatcctgcaggtggcaatggtggtgacttccacagactggtcttctaatgtgaacctgctgccaacctgaccccttccctccaggagccaggtagggcctgagggaagctgtggaggcaggccctaccaagaggaaggatggtacagctcatggcaccttagtcctcagcctgatgaagggtacacagagattctctcagatatggaagtaagacctaagtccctttcattggggatcagtcccattaaaactttacaccc

SEQ ID NO: 197352 - DNA, 1209 bp, Homo sapiens
  Payload ID: 18929
  Gene Name: ubiquitin specific peptidase 35
  ENST ID: ENST00000528910
  CDS Start-End: 315-1209
ccatgcttcatcccgcagccccggggccgcgccgcagagtcgggcttcctggatacatagaggcttgtgccaggcggggtgggaagactggattttgcagtggaagcagcatctcttccgtctgggacctggctgagggcgtccccaccctggggggagcagaggaccagccctgacctagccgggcccagcctcgtcctgcccggcctgagcgccccgcccagcagccggctctggcccaccggggtccgggagaggaggagccaccatctagcgccctggccagcgtggtccagcacctcccattggagctcatggatggtgttgtccggaacctcagcaatgatgacagtgtgacagactcgcagatgctgactgccattagcaggatgattgactgggtgtcctggcccctggggaagaatattgacaagtggatcattgcactgctgaagggcctggctgctgttaagaagttcagcatcttgatcgaggtttcgctcaccaaaattgagaaggttttctctaagctgctgtaccccatcgtccggggagctgccttgtctgtgctcaagtacatgctcctgaccttccagcactcccacgaagccttccacctgctcctccctcacatcccccccatggtggcctctctggtcaaggaggactcgaactcggggaccagctgcctggagcagctggcggagctggtccactgcatggtgttccggttcccgggcttcccggatctgtatgagcctgtcatggaggccatcaaggacctccatgttcccaatgaggaccgcatcaagcagctgctggggcaggatgcctggacttcgcagaagagcgagctggcgggtttctatccccggctcatggccaagtcagacacgggcaagattggtctcatcaacctgggcaacacatgctatgtcaacagcatccttcaggccttattcatggcgtctgacttcagacattgtgtgctccgcttgactgagaacaactcacagcccctgatgaccaagctgcagtggctctttggcttcctagaacacagccagcggcctgccatttccccagagaacttcctctccgcatcctggacgccctggttcagccctggcacccagcaggactgctcggagtatctgaagtacctgctggatcggctgcacgaagaggagaaaacgggcacaaggatct

SEQ ID NO: 197353 - DNA, 2986 bp, Homo sapiens
  Payload ID: 18929
  Gene Name: ubiquitin specific peptidase 35
  ENST ID: ENST00000530546
  CDS Start-End: 1-325
cgccgtggagttcctagagcaggcccagcaggtgagcgggctcctggcgcagctgtggcgcgcacagcccgccgccatcctgccctgcctcaaagagctgttcgcagtcatctcctgcgcagaggaggagccaccatctagcgccctggccagcgtggtccagcacctcccattggagctcatggatggtgttgtccggaacctcagcaatgatgacagtgtgacagactcgcagatgctgactgccattagcaggttttctctaagctgctgtaccccatcgtccggggagctgccttgtctgtgctcaagtacatgctcctgaccttccagcactcccacgaagccttccacctgctcctccctcacatcccccccatggtggcctctctggtcaaggaggactcgaactcggggaccagctgcctggagcagctggcggagctggtccactgcatggtgttccggttcccgggcttcccggatctgtatgagcctgtcatggaggccatcaaggacctccatgttcccaatgaggaccgcatcaagcagctgctggggcaggatgcctggacttcgcagaagagcgagctggcgggtttctatccccggctcatggccaagtcagacacgggcaagattggtctcatcaacctgggcaacacatgctatgtcaacagcatccttcaggccttattcatggcgtctgagtagcttcagacattgtgtgctccgcttgactgagaacaactcacagcccctgatgaccaagctgcagtggctctttggcttcctagaacacagccagcggcctgccatttccccagagaacttcctctccgcatcctggacgccctggttcagccctggcacccagcaggactgctcggagtatctgaagtacctgctggatcggctgcacgaagaggagaaaacgggcacaaggatctgccagaaactcaagcagtccagctcgccctctccgcccgaggagcccccggccccaagttcaacctctgtggaaaaaatgtttggaggcaagatagtgactcggatctgctgtctctgctgcctcaacgtctcctcccgggaggaggccttcacggacctctctctcgccttccctcctcctgagcgctgtcgccgccgccgcctgggctctgtgatgcgccccacagaagacatcacagcccgggagttgcccccaccaaccagtgcacaggggccaggcagggtgggtcctcggaggcaaaggaaacactgcatcacagaggacaccccccccaccagcctgtacatcgaaggcctggactccaaggaagctggtgggcagagcagtcaggaggaaaggatagagagggaggaagaagggaaggaggagagaacggagaaggaagaagtgggggaggaggaggaaagcaccagaggggaaggagagagggagaaagaggaggaggtggaagaggaagaagagaaggtggagaaggagacagaaaaggaggctgagcaggaaaaggaagaagacagcctgggagcggggacccacccggatgctgccatcccctccggggagcggacatgtggctctgagggctcccgctccgtcctggacctggttaactacttcctgtcccccgagaagctgacagcagaaaaccgctactactgcgagtcgtgtgcctccctgcaggatgccgagaaggtggtggagctgagccaagggccgtgctacctcatcctcacactgctgcgcttctctttcgacctgcgcaccatgcggcgccgcaagatcctggatgacgtctccatccccctgctgctccgcctgccactggctggtggccgtggccaggcctatgacctctgcagtgtggtggtgcactctggagtgtcttcggagagtggtcactactactgctatgcccgtgagggcgctgcccgccctgccgcttctctgggaactgccgataggccagagcccgagaaccagtggtacctgttcaatgacactcgggtgtccttctcttccttcgaatctgtcagcaacgtcacctccttcttccctaaggacacagcctatgtgctgttttaccggcagcggcccagggaggggcccgaggctgagttgggctcttctagagtccggacagagcccaccctgcacaaggacttgatggaagccatttccaaagacaacatcctttacctacaggagcaggagaaggaggcccggagcagggcggcctacatctctgcactccccacatctccgcactgggggaggggctttgatgaagacaaggatgaggatgaaggctctccagggggctgcaatcctgcaggtggcaatggtggtgacttccacagactggtcttctaatgtgaacctgctgccaacctgaccccttccctccaggagccaggtagggcctgagggaagctgtggaggcaggccctaccaagaggaaggatggtacagctcatggcaccttagtcctcagcctgatgaagggtacacagagattctctcagatatggaagtaagacctaagtccctttcattggggatcagtcccattaaaactttacacccaagtgtcctggttaacttgaagcagccgagatgggcacacacgggtctttgcctccccctccttccctagcaggctccccatgcgggaagatctgatgatgttcaggaaacaggctagacctcagctccaatgttttgacatcaagtactattttccttccgactgctgtacggtataaagcacagcaggatccaagccttgcacaaaggggtggggggggcagtgtctcctctggctgtcctgtttgtttgtttctcatatgggggtggggggtacctgcactgtctgtacctttctgagaagaacagagaccgagacctgcccccttaccaagcgccactgcatggttttgggggggggggcggggggctagcttctcacagcaggaggcc

SEQ ID NO: 197354 - DNA, 5234 bp, Homo sapiens
  Payload ID: 18930
  Gene Name: ubiquitin specific peptidase 36
  Uniprot ID: Q9P275
  ENST ID: ENST00000312010
  CDS Start-End: 326-3697
agcgcagcgcgaacgctgggtgcggcgcctttaagcgtcgcggtgacacgtgtgtgaggcgccggaggcccggatggtgcgcgtgctgggccgcgggccgaaggagtcgccagggctgcgtaggcttgtggcgcgcccgcggagaggccggggctctgacgcccgctctgcggcttcggtgtttgaacaggccacagtccaggagcgcttacattcaggagctccgcgtagcacctgcccaaccaaactcagccctccgttaagatcctggttccatgccgcagtaggacagcaggcccaagtctgcacatcccagtgatgcaccatgccaatagtggataagttgaaggaggccctgaaacccggccgcaaggactcggctgatgatggagaactggggaagcttcttgcctcctctgccaagaaggtccttttacagaaaatcgagttcgagccagccagcaagagcttctcctaccagctggaggccttaaagagcaaatatgtgttgctcaaccccaaaacagagggagctagtcgccacaagagtggagatgacccaccggccaggagacagggcagtgagcacacgtatgagagctgtggtgacggagtcccagccccgcagaaagtgcttttccccacggagcgactgtctctgaggtgggagcgggtcttccgcgtgggcgcaggactccacaaccttggcaacacctgctttctcaatgccaccatccagtgcttgacctacacaccacctctagccaactacctgctctccaaggagcatgctcgcagctgccaccagggaagcttctgcatgctgtgtgtcatgcagaaccacattgtccaggccttcgccaacagcggcaacgccatcaagcccgtctccttcatccgagacctgaaaaagatcgcccgacacttccgctttgggaaccaggaggacgcgcatgagttcctgcggtacaccatcgacgccatgcagaaagcctgcctgaatggctgtgccaagttggatcgtcaaacgcaggctactaccttggtccatcaaatttttggagggtatctcagatcacgcgtgaagtgctccgtgtgcaagagcgtctcggacacctacgacccctacttggacgtcgcgctggagatccggcaagctgcgaatattgtgcgtgctctggaactttttgtgaaagcagatgtcctgagtggagagaatgcctacatgtgtgctaaatgcaagaagaaggttccagccagcaagcgcttcaccatccacagaacatccaacgtcttaaccctttccctcaagcgctttgccaacttcagcggggggaagatcaccaaggatgtaggctatccggaattcctcaacatacgtccgtatatgtcccagaataatggtgatcctgtcatgtatggactctatgctgtcctggtgcactcgggctacagctgccatgccgggcactattactgctacgtgaaggcaagcaatggacagtggtaccagatgaatgattccttggtccattccagcaacgtcaaggtggttctgaaccagcaggcctacgtgctgttctatctgcgaattccaggctctaagaaaagtcccgagggcctcatctccaggacaggctcctcctcccttcccggccgcccgagtgtgattccagatcactccaagaagaacatcggcaatgggattatttcctccccactgactggaaagcgacaagactctgggacgatgaagaagccgcacaccactgaagagattggtgtgcccatatccaggaatggctccaccctgggcctgaagtcccagaacggctgcattcctccaaagctgccctcggggtccccttcccccaaactctcccagacacccacacacatgccaaccatcctagacgaccctggaaagaaggtgaagaagccagctcctccacagcacttttcccccagaactgctcaggggctgcctgggaccagcaactcgaatagcagcagatctgggagccaaaggcagggctcctgggacagcagggatgttgtcctctctacctcacctaagctcctggctacagccactgccaacgggcatgggctgaaggggaacgacgagagcgctggcctcgacaggaggggctccagcagctccagcccagagcactcggccagcagcgactccaccaaggccccccagacccccaggagtggagcggcccatctctgcgattctcaggaaacgaactgttccaccgctggccactccaaaacgccgccaagtggagcagattctaagacggtgaagctgaagtcccctgtcctgagcaacaccaccactgagcctgcaagcaccatgtctcctccaccagccaaaaaactggccctttctgccaagaaggccagcaccctgtggagggcgaccggcaatgacctccgtccacctcccccctcaccatcctccgacctcacccaccccatgaaaacctctcaccccgtcgttgcctccacttggcccgtccatagagccagggctgtgtcacctgctccccaatcatccagccgcctgcaaccccccttcagcccccaccccacattgctgtccagtacccccaagcccccagggacgtcagaaccacggagctgctcctccatctcgacggcgctgcctcaggtcaacgaggaccttgtgtctcttccacaccagttgccagaggccagtgagcccccccagagcccctctgagaagaggaaaaagacctttgtgggagagccgcagaggctgggctcagagacgcgcctcccacagcacatcagggaggccactgcggctccccacgggaagaggaagaggaagaagaagaagcgcccggaggacacagctgccagcgccctgcaggaggggcagacacagagacagcctgggagccccatgtacaggagggagggccaggcacagctgcccgctgtcagacggcaggaagatggcacacagccacaggtgaatggccagcaggtgggatgtgttacggacggccaccacgcgagcagcaggaagcggaggaggaaaggagcagaaggtcttggtgaagaaggcggcctgcaccaggacccacttcggcacagctgctctcccatgggtgatggtgatccagaggccatggaagagtctccaaggaaaaagaaaaagaaaaaaagaaagcaggagacacagcgggcagtagaagaggatgggcatctcaaatgcccaaggagtgccaagccccaagatgctgttgtccccgagtccagcagctgcgcaccatccgcgaatggctggtgtcctggggaccgcatggggctgagccaggcccctcctgtgtcttggaatggagagcgggagtctgatgtggtccaggaactgctcaaatactcatctgataaagcttacgggagaaaagttctgacctgggatggcaagatgtcggcggtcagtcaggatgctattgaagacagcagacaggcccggactgagaccgtggttgatgactgggacgaagagtttgaccgagggaaggaaaagaaaattaaaaaatttaagagagagaagaggagaaacttcaacgccttccagaaacttcagactcgacggaacttctggtctgtgactcacccagcaaaggctgccagcctcagctatcgccgctgactgtgcccctgtggaaggaggtcggttccgagggggtgggtgtaagggtgaggtgggggtgtgtgtgccgtgtatgtgtgtaggggtgtggtggggtgtggcgtgtgtgtatgatgtatgtgggctgtgtatctggcacatgtgtgttgggtggtgtgtgtggtgtgggcgcgtctgtggtgtgtgtcctagtcacttggagaagggtgtgtgtgggatgcgtgtgtataagggggtgtgtgtgggatgcgtgtgtataagggggtgtgtgtagtgtgtgttgggtgtggggtgtgtacacctggcatctgtggcatgtgttctggtcacttggagaagggcatgtgtggggtgtgtgtgggatgtgggttgtgtgtatatctggcatgtgtcccagtcacttgcagaagggtgacttcttgccagccgcatcgagatgccatgcattgggttcctaggttggactcatacccgagggtggcagtgggaagattcgggtctcgtttctctctgtcaggactaccgtggtttgttctgcagcctcctggagacaaggcgtcccttcccgggagctgtcggtctggatctgagggagctctctgtgtgggctctgctgcgctgggagcctgtcacggtaggagctctcccggtaccagtgtccacagaccgcccaacacagaggctttgaggcttctctagatcggaacctctttggtgacattcccgaccagccctgcaagagaaacgacagtgtgtgtgtgagcagaggtggccgcacacctgctggacatctttgccaggctgtgccttctcatgtttcatagacagtggtctgtgctggcagaggctgctgcccctggttggggctatcaggagagtgggggatggtggccacatgtcccccaggtggtctcccggtgcatagctggtggctctgggcaagccatcccttgcttctcggggctgacgccaccgttgtgtccgagcccgccctcccctgcttcctcagcgggaccccttcatctgttggccttacctgtcctcagaaaggaagaggtgaccccacccagccacctctcccttttatggaactcgagagggtggccctactgtgcaccccttccttgtgagtagctctcaactgtcctggagagcagaggctatttggggtcggaggagccctcgatacctgcgaatacatctgctttccaggctgctgtttattctgagacgactgtgctgtagcttcccttgcagctgcaataacccgcaggtcttcactgaggtggaggctttggggtagaattctccatttattttactacttaatacaaaacatttatttttgaccagtcctgtggcttccattagcaatatgtttcctttcccaaatatgcaaatagtggctttgtttgctcaattttgtgagtgctttggaatttaaatgattgtataactcaagaagattacttttctatgttgctcaagctgtgcctgccaacttgtaacttaataaatacaggaaatcctcagagaa

SEQ ID NO: 197355 - DNA, 1647 bp, Homo sapiens
  Payload ID: 18930
  Gene Name: ubiquitin specific peptidase 36
  ENST ID: ENST00000449938
  CDS Start-End: 1-1647
atgccaatagtggataagttgaaggaggccctgaaacccggccgcaaggactcggctgatgatggagaactggggaagcttcttgcctcctctgccaagaaggtccttttacagaaaatcgagttcgagccagccagcaagagcttctcctaccagctggaggccttaaagagcaaatatgtgttgctcaaccccaaaacagagggagctagtcgccacaagagtggagatgacccaccggccaggagacagggcagtgagcacacgtatgagagctgtggtgacggagtcccagccccgcagaaagtgcttttccccacggagcgactgtctctgaggtgggagcgggtcttccgcgtgggcgcaggactccacaaccttggcaacacctgctttctcaatgccaccatccagtgcttgacctacacaccacctctagccaactacctgctctccaaggagcatgctcgcagctgccaccagggaagcttctgcatgctgtgtgtcatgcagaaccacattgtccaggccttcgccaacagcggcaacgccatcaagcccgtctccttcatccgagacctgaaaaagatcgcccgacacttccgctttgggaaccaggaggacgcgcatgagttcctgcggtacaccatcgacgccatgcagaaagcctgcctgaatggctgtgccaagttggatcgtcaaacgcaggctactaccttggtccatcaaatttttggagggtatctcagatcacgcgtgaagtgctccgtgtgcaagagcgtctcggacacctacgacccctacttggacgtcgcgctggagatccggcaagctgcgaatattgtgcgtgctctggaactttttgtgaaagcagatgtcctgagtggagagaatgcctacatgtgtgctaaatgcaagaagaaggttccagccagcaagcgcttcaccatccacagaacatccaacgtcttaaccctttccctcaagcgctttgccaacttcagcggggggaagatcaccaaggatgtaggctatccggaattcctcaacatacgtccgtatatgtcccagaataatggtgatcctgtcatgtatggactctatgctgtcctggtgcactcgggctacagctgccatgccgggcactattactgctacgtgaaggcaagcaatggacagtggtaccagatgaatgattccttggtccattccagcaacgtcaaggtggttctgaaccagcaggcctacgtgctgttctatctgcgaattccaggctctaagaaaagtcccgagggcctcatctccaggacaggctcctcctcccttcccggccgcccgagtgtgattccagatcactccaagaagaacatcggcaatgggattatttcctccccactgactggaaagcgacaagactctgggacgatgaagaagccgcacaccactgaagagattggtgtgcccatatccaggaatggctccaccctgggcctgaagtcccagaacggctgcattcctccaaagctgccctcggggtccccttcccccaaactctcccagacacccacacacatgccaaccatcctagacgaccctggaaagaaggtgaagaagccagctcctccactgccaacgggcatgggctga

SEQ ID NO: 197356 - DNA, 6063 bp, Homo sapiens
  Payload ID: 18930
  Gene Name: ubiquitin specific peptidase 36
  Uniprot ID: Q9P275
  ENST ID: ENST00000542802
  CDS Start-End: 445-3816
gaggcctggggcgcgggaagggctggcgggcgcagccgggacgctcagggagaacgtgggcgcgggtccgcgcagggcttcggccgtccccgaggaggacccgggatgctccgcccgctcgcgagctcgcttctccagagcccgggtattcccgaggagggtccggggccgggctgtcctcgccggtctccgccgtcccccgggctccgggccggtgatgggggtcgccggggcccgctgtctgtgcaggattcaggtcaacttcggagaggctctgacgcccgctctgcggcttcggtgtttgaacaggccacagtccaggagcgcttacattcaggagctccgcgtagcacctgcccaaccaaactcagccctccgttaagatcctggttccatgccgcagtaggacagcaggcccaagtctgcacatcccagtgatgcaccatgccaatagtggataagttgaaggaggccctgaaacccggccgcaaggactcggctgatgatggagaactggggaagcttcttgcctcctctgccaagaaggtccttttacagaaaatcgagttcgagccagccagcaagagcttctcctaccagctggaggccttaaagagcaaatatgtgttgctcaaccccaaaacagagggagctagtcgccacaagagtggagatgacccaccggccaggagacagggcagtgagcacacgtatgagagctgtggtgacggagtcccagccccgcagaaagtgcttttccccacggagcgactgtctctgaggtgggagcgggtcttccgcgtgggcgcaggactccacaaccttggcaacacctgctttctcaatgccaccatccagtgcttgacctacacaccacctctagccaactacctgctctccaaggagcatgctcgcagctgccaccagggaagcttctgcatgctgtgtgtcatgcagaaccacattgtccaggccttcgccaacagcggcaacgccatcaagcccgtctccttcatccgagacctgaaaaagatcgcccgacacttccgctttgggaaccaggaggacgcgcatgagttcctgcggtacaccatcgacgccatgcagaaagcctgcctgaatggctgtgccaagttggatcgtcaaacgcaggctactaccttggtccatcaaatttttggagggtatctcagatcacgcgtgaagtgctccgtgtgcaagagcgtctcggacacctacgacccctacttggacgtcgcgctggagatccggcaagctgcgaatattgtgcgtgctctggaactttttgtgaaagcagatgtcctgagtggagagaatgcctacatgtgtgctaaatgcaagaagaaggttccagccagcaagcgcttcaccatccacagaacatccaacgtcttaaccctttccctcaagcgctttgccaacttcagcggggggaagatcaccaaggatgtaggctatccggaattcctcaacatacgtccgtatatgtcccagaataatggtgatcctgtcatgtatggactctatgctgtcctggtgcactcgggctacagctgccatgccgggcactattactgctacgtgaaggcaagcaatggacagtggtaccagatgaatgattccttggtccattccagcaacgtcaaggtggttctgaaccagcaggcctacgtgctgttctatctgcgaattccaggctctaagaaaagtcccgagggcctcatctccaggacaggctcctcctcccttcccggccgcccgagtgtgattccagatcactccaagaagaacatcggcaatgggattatttcctccccactgactggaaagcgacaagactctgggacgatgaagaagccgcacaccactgaagagattggtgtgcccatatccaggaatggctccaccctgggcctgaagtcccagaacggctgcattcctccaaagctgccctcggggtccccttcccccaaactctcccagacacccacacacatgccaaccatcctagacgaccctggaaagaaggtgaagaagccagctcctccacagcacttttcccccagaactgctcaggggctgcctgggaccagcaactcgaatagcagcagatctgggagccaaaggcagggctcctgggacagcagggatgttgtcctctctacctcacctaagctcctggctacagccactgccaacgggcatgggctgaaggggaacgacgagagcgctggcctcgacaggaggggctccagcagctccagcccagagcactcggccagcagcgactccaccaaggccccccagacccccaggagtggagcggcccatctctgcgattctcaggaaacgaactgttccaccgctggccactccaaaacgccgccaagtggagcagattctaagacggtgaagctgaagtcccctgtcctgagcaacaccaccactgagcctgcaagcaccatgtctcctccaccagccaaaaaactggccctttctgccaagaaggccagcaccctgtggagggcgaccggcaatgacctccgtccacctcccccctcaccatcctccgacctcacccaccccatgaaaacctctcaccccgtcgttgcctccacttggcccgtccatagagccagggctgtgtcacctgctccccaatcatccagccgcctgcaaccccccttcagcccccaccccacattgctgtccagtacccccaagcccccagggacgtcagaaccacggagctgctcctccatctcgacggcgctgcctcaggtcaacgaggaccttgtgtctcttccacaccagttgccagaggccagtgagcccccccagagcccctctgagaagaggaaaaagacctttgtgggagagccgcagaggctgggctcagagacgcgcctcccacagcacatcagggaggccactgcggctccccacgggaagaggaagaggaagaagaagaagcgcccggaggacacagctgccagcgccctgcaggaggggcagacacagagacagcctgggagccccatgtacaggagggagggccaggcacagctgcccgctgtcagacggcaggaagatggcacacagccacaggtgaatggccagcaggtgggatgtgttacggacggccaccacgcgagcagcaggaagcggaggaggaaaggagcagaaggtcttggtgaagaaggcggcctgcaccaggacccacttcggcacagctgctctcccatgggtgatggtgatccagaggccatggaagagtctccaaggaaaaagaaaaagaaaaaaagaaagcaggagacacagcgggcagtagaagaggatgggcatctcaaatgcccaaggagtgccaagccccaagatgctgttgtccccgagtccagcagctgcgcaccatccgcgaatggctggtgtcctggggaccgcatggggctgagccaggcccctcctgtgtcttggaatggagagcgggagtctgatgtggtccaggaactgctcaaatactcatctgataaagcttacgggagaaaagttctgacctgggatggcaagatgtcggcggtcagtcaggatgctattgaagacagcagacaggcccggactgagaccgtggttgatgactgggacgaagagtttgaccgagggaaggaaaagaaaattaaaaaatttaagagagagaagaggagaaacttcaacgccttccagaaacttcagactcgacggaacttctggtctgtgactcacccagcaaaggctgccagcctcagctatcgccgctgactgtgcccctgtggaaggagcctcctggagacaaggcgtcccttcccgggagctgtcggtctggatctgagggagctctctgtgtgggctctgctgcgctgggagcctgtcacggtaggagctctcccggtaccagtgtccacagaccgcccaacacagaggctttgaggcttctctagatcggaacctctttggtgacattcccgaccagccctgcaagagaaacgacagtgtgtgtgtgagcagaggtggccgcacacctgctggacatctttgccaggctgtgccttctcatgtttcatagacagtggtctgtgctggcagaggctgctgcccctggttggggctatcaggagagtgggggatggtggccacatgtcccccaggtggtctcccggtgcatagctggtggctctgggcaagccatcccttgcttctcggggctgacgccaccgttgtgtccgagcccgccctcccctgcttcctcagcgggaccccttcatctgttggccttacctgtcctcagaaaggaagaggtgaccccacccagccacctctcccttttatggaactcgagagggtggccctactgtgcaccccttccttgtgagtagctctcaactgtcctggagagcagaggctatttggggtcggaggagccctcgatacctgcgaatacatctgctttccaggctgctgtttattctgagacgactgtgctgtagcttcccttgcagctgcaataacccgcaggtcttcactgaggtggaggctttggggtagaattctccatttattttactacttaatacaaaacatttatttttgaccagtcctgtggcttccattagcaatatgtttcctttcccaaatatgcaaatagtggctttgtttgctcaattttgtgagtgctttggaatttaaatgattgtataactcaagaagattacttttctatgttgctcaagctgtgcctgccaacttgtaacttaataaatacaggaaatcctcagagaaggtgatattttcaggaaaaagacaaatgccctcatagtagtgggaagtgtgaaggtgaccgtgaacatccttcctcatcgggtctgtccccgtcatttcctcccggagtcgtcgcaggtggagatggacaacgtggtgttggacttagacctccttcagtgtggctctgctgggccagaggcatcctgctgtcccgggtggctgcctcgctgtctgcaccccctctccctggggcagctttgcttcctgcccctgtgctcggggcctgggtggttactggcgtgtagatggaattgcttttttaatatgggaagatacatttatttttttccatgtgggtgggtgtctctttttggattttcttctgtttttacgtttctcttcttagaagggtgggagagaatcaagctcctgtggccacctgtgtcccagcagcagtgagtggagctgctcagggtgccctctcctgcggaccagtctctgaatgttcaaagatgagggcctggcttccgtgctctggctttgtaacttatctggaagggaaagcacatgccttcacgggcagggtatgttccttttcttctcggggtgttgacttgcattcctgtgtgaactgttccctctgccatgtttaccgtgtgatgttctgtagttgaaaatgttagttgtctgctggcacagaatttatctcgttcctttctctcccttctctcctccaaatcagtctcttcccttctccactagataactgtaaaaccttttcctggggtacatacattcgttaactcttgggcagtggtgagcacgagatgactttctgcagcgtttatcactgttgggtggagtcacgtcccttccctccaccgaagtcatcaaccagatagggaagggaaagatgaggcccagaaaacgagttcaaactctaggtcttgtacacgtatgtaagtaaatgtcaataacccaagcctttgtcatagcagtcacttggttgacttaggatctgggtctgttgaattttgtgcttgggaatggagctggagggagtggggcctgtgtacagcagctacctctcccaggtcctctcacttgcctgccccgcgtcctggttgcatggccgcacctgtgtgtgtgcagaggtctgtgtcccatcctctgcacctcctttccgggggcctggggagccccacgtgttgccaagatcttggtgcaataaaatactccggttttgtg

SEQ ID NO: 197357 - DNA, 602 bp, Homo sapiens
  Payload ID: 18930
  Gene Name: ubiquitin specific peptidase 36
  ENST ID: ENST00000588130
  CDS Start-End: 1-304
tgatgtggtccaggaactgctcaaatactcatctgataaagcttacgggagaaaagttctgacctgggatggcaagatgtcggcggtcagtcaggatgctattgaagacagcagacaggcccggactgagaccgtggttgatgactgggacgaagagtttgaccgagggaaggaaaagaaaattaaaaaatttaagagagagaagaggagaaacttcaacgccttccagaaacttcagactcgacggaacttctggtctgtgactcacccagcaaaggctgccagcctcagctatcgccgctgactgtgcccctgtggaaggagatgatcaagcggtgctgattcacgagagtggaagcctccagagcttggggctttctggctgctcttcattgacctgtgtgttcccagcacacgaacagtgcccctaacggagatttgttcagcgactgaatatacacctgtaaacgagtagcatgtatacattgattttgattacaaatggttctgtattatataccaccgttctgactgcttttttcacttatagcttggaaattgtcttctgttggtaatacagaaatctgtttcagtcttttgaa

SEQ ID NO: 197358 - DNA, 606 bp, Homo sapiens
  Payload ID: 18930
  Gene Name: ubiquitin specific peptidase 36
  ENST ID: ENST00000587379
  CDS Start-End: 1-73
acttcagactcgacggaacttctggtctgtgactcacccagcaaaggctgccagcctcagctatcgccgctgactgtgcccctgtggaaggaggactaccgtggtttgttctgcagcctcctggagacaaggcgtcccttcccgggagctgtcggtctggatctgagggagctctctgtgtgggctctgctgcgctgggagcctgtcacgaagggtgggagagaatcaagctcctgtggccacctgtgtcccagcagcagtgagtggagctgctcagggtgccctctcctgcggaccagtctctgaatgttcaaagatgagggcctggcttccgtgctctggctttgtaacttatctggaagggaaagcacatgccttcacgggcagggatttgacactgttgacctccgcaccctggagagctcctctaagatgtgagcctgttgcatttgctgcatactctagatcaagcccagaatcaactgatccagtcaatacatcccactgaacagccgaccgatccaccctctgtcaggatctctactgtagacactgaaagaggtgccccctcagtataggatcctggcctcaaataatcttctcgcc

SEQ ID NO: 197359 - DNA, 546 bp, Homo sapiens
  Payload ID: 18930
  Gene Name: ubiquitin specific peptidase 36
  ENST ID: ENST00000588365
  CDS Start-End: 389-546
agcgcgggagggctgttgcaggggtgggcaaagtccctcgagtccccgttctggggcgggggcgcgcgccactgtcacacttcaggcgtccgccacgccgccaggtgtgctcggccgacccggaagtagcggcacctctagtgcgctgcggagacgtcaccctgccgcggcacaggggcgggagcgcctgtggctctgcgcacttgcgtcatcacgctctgacgcccgctctgcggcttcggtgtttgaacaggccacagtccaggagcgcttacattcaggagctccgcgtagcacctgcccaaccaaactcagccctccgttaagatcctggttccatgccgcagtaggacagcaggcccaagtctgcacatcccagtgatgcaccatgccaatagtggataagttgaaggaggccctgaaacccggccgcaaggactcggctgatgatggagaactggggaagcttcttgcctcctctgccaagaaggtccttttacagaaaatcgagttcgagccagccagcaagagcttctcctaccagct

SEQ ID NO: 197360 - DNA, 607 bp, Homo sapiens
  Payload ID: 18930
  Gene Name: ubiquitin specific peptidase 36
  ENST ID: ENST00000587010
  CDS Start-End: 1-215
gtcaggatgctattgaagacagcagacaggcccggactgagaccgtggttgatgactgggacgaagagtttgaccgagggaaggaaaagaaaattaaaaaatttaagagagagaagaggagaaacttcaacgccttccagaaacttcagactcgacggaacttctggtctgtgactcacccagcaaaggctgccagcctcagctatcgccgctgactgtgcccctgtggaaggagcctcctggagacaaggcgtcccttcccgggagctgtcggtctggatctgagggagctctctgtgtgggctctgctgcgctgggagcctgtcacgatgatcaagcggtgctgattcacgagagtggaagcctccagagcttggggctttctggctgctcttcattgacctgtgtgttcccagcacacgaacagtgcccctaacggagatttgttcagcgactgaatatacacctgtaaacgagtagcatgtatacattgattttgattacaaatggttctgtattatataccaccgttctgactgcttttttcacttatagcttggaaattgtcttctgttggtaatacagaaatctgtttcagtcttttgaa

SEQ ID NO: 197361 - DNA, 2479 bp, Homo sapiens
  Payload ID: 18930
  Gene Name: ubiquitin specific peptidase 36
  ENST ID: ENST00000592231
  CDS Start-End: 1-209
atgctattgaagacagcagacaggcccggactgagaccgtggttgatgactgggacgaagagtttgaccgagggaaggaaaagaaaattaaaaaatttaagagagagaagaggagaaacttcaacgccttccagaaacttcagactcgacggaacttctggtctgtgactcacccagcaaaggctgccagcctcagctatcgccgctgactgtgcccctgtggaaggaggactaccgtggtttgttctgcagcctcctggagacaaggcgtcccttcccgggagctgtcggtctggatctgagggagctctctgtgtgggctctgctgcgctgggagcctgtcacggtaggagctctcccggtaccagtgtccacagaccgcccaacacagaggctttgaggcttctctagatcggaacctctttggtgacattcccgaccagccctgcaagagaaacgacagtgtgtgtgtgagcagaggtggccgcacacctgctggacatctttgccaggctgtgccttctcatgtttcatagacagtggtctgtgctggcagaggctgctgcccctggttggggctatcaggagagtgggggatggtggccacatgtcccccaggtggtctcccggtgcatagctggtggctctgggcaagccatcccttgcttctcggggctgacgccaccgttgtgtccgagcccgccctcccctgcttcctcagcgggaccccttcatctgttggccttacctgtcctcagaaaggaagaggtgaccccacccagccacctctcccttttatggaactcgagagggtggccctactgtgcaccccttccttgtgagtagctctcaactgtcctggagagcagaggctatttggggtcggaggagccctcgatacctgcgaatacatctgctttccaggctgctgtttattctgagacgactgtgctgtagcttcccttgcagctgcaataacccgcaggtcttcactgaggtggaggctttggggtagaattctccatttattttactacttaatacaaaacatttatttttgaccagtcctgtggcttccattagcaatatgtttcctttcccaaatatgcaaatagtggctttgtttgctcaattttgtgagtgctttggaatttaaatgattgtataactcaagaagattacttttctatgttgctcaagctgtgcctgccaacttgtaacttaataaatacaggaaatcctcagagaaggtgatattttcaggaaaaagacaaatgccctcatagtagtgggaagtgtgaaggtgaccgtgaacatccttcctcatcgggtctgtccccgtcatttcctcccggagtcgtcgcaggtggagatggacaacgtggtgttggacttagacctccttcagtgtggctctgctgggccagaggcatcctgctgtcccgggtggctgcctcgctgtctgcaccccctctccctggggcagctttgcttcctgcccctgtgctcggggcctgggtggttactggcgtgtagatggaattgcttttttaatatgggaagatacatttatttttttccatgtgggtgggtgtctctttttggattttcttctgtttttacgtttctcttcttagaagggtgggagagaatcaagctcctgtggccacctgtgtcccagcagcagtgagtggagctgctcagggtgccctctcctgcggaccagtctctgaatgttcaaagatgagggcctggcttccgtgctctggctttgtaacttatctggaagggaaagcacatgccttcacgggcagggtatgttccttttcttctcggggtgttgacttgcattcctgtgtgaactgttccctctgccatgtttaccgtgtgatgttctgtagttgaaaatgttagttgtctgctggcacagaatttatctcgttcctttctctcccttctctcctccaaatcagtctcttcccttctccactagataactgtaaaaccttttcctggggtacatacattcgttaactcttgggcagtggtgagcacgagatgactttctgcagcgtttatcactgttgggtggagtcacgtcccttccctccaccgaagtcatcaaccagatagggaagggaaagatgaggcccagaaaacgagttcaaactctaggtcttgtacacgtatgtaagtaaatgtcaataacccaagcctttgtcatagcagtcacttggttgacttaggatctgggtctgttgaattttgtgcttgggaatggagctggagggagtggggcctgtgtacagcagctacctctcccaggtcctctcacttgcctgccccgcgtcctggttgcatggccgcacctgtgtgtgtgcagaggtctgtgtcccatcctctgcacctcctttccgggggcctggggagccccacgtgttgccaagatcttggtgcaataaaatactccggttttgtg

SEQ ID NO: 197362 - DNA, 970 bp, Homo sapiens
  Payload ID: 18930
  Gene Name: ubiquitin specific peptidase 36
  ENST ID: ENST00000589424
  CDS Start-End: 220-924
tcgccagggctgcgtaggcttgtggcgcgcccgcggagaggccggggctctgacgcccgctctgcggcttcggtgtttgaacaggccacagtccaggagcgcttacattcaggagctccgcgtagcacctgcccaaccaaactcagccctccgttaagatcctggttccatgccgcagtaggacagcaggcccaagtctgcacatcccagtgatgcaccatgccaatagtggataagttgaaggaggccctgaaacccggccgcaaggactcggctgatgatggagaactggggaagcttcttgcctcctctgccaagaaggtccttttacagaaaatcgagttcgagccagccagcaagagcttctcctaccagctggaggccttaaagagcaaatatgtgttgctcaaccccaaaacagagggagctagtcgccacaagagtggagatgacccaccggccaggagacagggcagtgagcacacgtatgagagctgtggtgacggagtcccagccccgcagaaagtgcttttccccacggagcgactgtctctgaggtgggagcgggtcttccgcgtgggcgcaggactccacaaccttggcaacacctgctttctcaatgccaccatccagtgcttgacctacacaccacctctagccaactacctgctctccaaggagcatgctcgcagctgccaccagggaagcttctgcatgctgtgtgtcatgcagaaccacattgtccaggccttcgccaacagcggcaacgccatcaagcccgtctccttcatccgagacctgaaaaagatcgcccgacacttccgctttgggaaccaggaggacgcgcatgagttcctgcggtacaccatcgacgccatgcagaaagcctgcctgaatggctgtgccaaaataaaaattgaatgatcctgtattggtcccccaagtatttcagagctcccggagtctggga

SEQ ID NO: 197363 - DNA, 594 bp, Homo sapiens
  Payload ID: 18930
  Gene Name: ubiquitin specific peptidase 36
  ENST ID: ENST00000592275
  CDS Start-End: 355-594
ctaattccgaagagccatttcctcggcagccccaggctttggccgatcgctcccagatccctccctccccaaactgcaggtgctccgcgtgtgggagtcacggatggccccagagcccgggacgttaaggccgagcgcccgcgcctccgcttctccacagccacctgacggccaggggcaggctctgacgcccgctctgcggcttcggtgtttgaacaggccacagtccaggagcgcttacattcaggagctccgcgtagcacctgcccaaccaaactcagccctccgttaagatcctggttccatgccgcagtaggacagcaggcccaagtctgcacatcccagtgatgcaccatgccaatagtggataagttgaaggaggccctgaaacccggccgcaaggactcggctgatgatggagaactggggaagcttcttgcctcctctgccaagaaggtccttttacagaaaatcgagttcgagccagccagcaagagcttctcctaccagctggaggccttaaagagcaaatatgtgttgctcaaccccaaaacagagggagctagtcgccacaagagtggagatgacccaccg

SEQ ID NO: 197364 - DNA, 960 bp, Homo sapiens
  Payload ID: 18930
  Gene Name: ubiquitin specific peptidase 36
  ENST ID: ENST00000586066
  CDS Start-End: 184-960
cattgtccaggccttcgccaacagcggcaacgccatcaagcccgtctccttcatccgagacctgaaaaagatcgcccgacacttccgctttgggaaccaggaggacgcgcatgagttcctgcggtacaccatcgacgccatgcagaaagcctgcctgaatggctgtgccaaaataaaaattgaatgatcctgtattggtcccccaagtatttcagagctcccggagtctgggaagtgccatggttggatcgtcaaacgcaggctactaccttggtccatcaaatttttggagggtatctcagatcacgcgtgaagtgctccgtgtgcaagagcgtctcggacacctacgacccctacttggacgtcgcgctggagatccggcaagctgcgaatattgtgcgtgctctggaactttttgtgaaagcagatgtcctgagtggagagaatgcctacatgtgtgctaaatgcaagaagaaggttccagccagcaagcgcttcaccatccacagaacatccaacgtcttaaccctttccctcaagcgctttgccaacttcagcggggggaagatcaccaaggatgtaggctatccggaattcctcaacatacgtccgtatatgtcccagaataatggtgatcctgtcatgtatggactctatgctgtcctggtgcactcgggctacagctgccatgccgggcactattactgctacgtgaaggcaagcaatggacagtggtaccagatgaatgattccttggtccattccagcaacgtcaaggtggttctgaaccagcaggcctacgtgctgttctatctgcgaattccaggctctaagaaaagtcccgagggcctcatctccaggacaggctcctcctcccttcccggccgcccgagtgtgattccagatcactccaagaagaacatcggcaatgggattatttcctccccactgactggaaag

SEQ ID NO: 197365 - DNA, 5885 bp, Homo sapiens
  Payload ID: 18930
  Gene Name: ubiquitin specific peptidase 36
  Uniprot ID: Q9P275
  ENST ID: ENST00000589225
  CDS Start-End: 219-3590
cgccagggctgcgtaggcttgtggcgcgcccgcggagaggccggggctctgacgcccgctctgcggcttcggtgtttgaacaggccacagtccaggagcgcttacattcaggagctccgcgtagcacctgcccaaccaaactcagccctccgttaagatcctggttccatgccgcagtaggacagcaggcccaagtctgcacatcccagtgatgcaccatgccaatagtggataagttgaaggaggccctgaaacccggccgcaaggactcggctgatgatggagaactggggaagcttcttgcctcctctgccaagaaggtccttttacagaaaatcgagttcgagccagccagcaagagcttctcctaccagctggaggccttaaagagcaaatatgtgttgctcaaccccaaaacagagggagctagtcgccacaagagtggagatgacccaccggccaggagacagggcagtgagcacacgtatgagagctgtggtgacggagtcccagccccgcagaaagtgcttttccccacggagcgactgtctctgaggtgggagcgggtcttccgcgtgggcgcaggactccacaaccttggcaacacctgctttctcaatgccaccatccagtgcttgacctacacaccacctctagccaactacctgctctccaaggagcatgctcgcagctgccaccagggaagcttctgcatgctgtgtgtcatgcagaaccacattgtccaggccttcgccaacagcggcaacgccatcaagcccgtctccttcatccgagacctgaaaaagatcgcccgacacttccgctttgggaaccaggaggacgcgcatgagttcctgcggtacaccatcgacgccatgcagaaagcctgcctgaatggctgtgccaagttggatcgtcaaacgcaggctactaccttggtccatcaaatttttggagggtatctcagatcacgcgtgaagtgctccgtgtgcaagagcgtctcggacacctacgacccctacttggacgtcgcgctggagatccggcaagctgcgaatattgtgcgtgctctggaactttttgtgaaagcagatgtcctgagtggagagaatgcctacatgtgtgctaaatgcaagaagaaggttccagccagcaagcgcttcaccatccacagaacatccaacgtcttaaccctttccctcaagcgctttgccaacttcagcggggggaagatcaccaaggatgtaggctatccggaattcctcaacatacgtccgtatatgtcccagaataatggtgatcctgtcatgtatggactctatgctgtcctggtgcactcgggctacagctgccatgccgggcactattactgctacgtgaaggcaagcaatggacagtggtaccagatgaatgattccttggtccattccagcaacgtcaaggtggttctgaaccagcaggcctacgtgctgttctatctgcgaattccaggctctaagaaaagtcccgagggcctcatctccaggacaggctcctcctcccttcccggccgcccgagtgtgattccagatcactccaagaagaacatcggcaatgggattatttcctccccactgactggaaagcgacaagactctgggacgatgaagaagccgcacaccactgaagagattggtgtgcccatatccaggaatggctccaccctgggcctgaagtcccagaacggctgcattcctccaaagctgccctcggggtccccttcccccaaactctcccagacacccacacacatgccaaccatcctagacgaccctggaaagaaggtgaagaagccagctcctccacagcacttttcccccagaactgctcaggggctgcctgggaccagcaactcgaatagcagcagatctgggagccaaaggcagggctcctgggacagcagggatgttgtcctctctacctcacctaagctcctggctacagccactgccaacgggcatgggctgaaggggaacgacgagagcgctggcctcgacaggaggggctccagcagctccagcccagagcactcggccagcagcgactccaccaaggccccccagacccccaggagtggagcggcccatctctgcgattctcaggaaacgaactgttccaccgctggccactccaaaacgccgccaagtggagcagattctaagacggtgaagctgaagtcccctgtcctgagcaacaccaccactgagcctgcaagcaccatgtctcctccaccagccaaaaaactggccctttctgccaagaaggccagcaccctgtggagggcgaccggcaatgacctccgtccacctcccccctcaccatcctccgacctcacccaccccatgaaaacctctcaccccgtcgttgcctccacttggcccgtccatagagccagggctgtgtcacctgctccccaatcatccagccgcctgcaaccccccttcagcccccaccccacattgctgtccagtacccccaagcccccagggacgtcagaaccacggagctgctcctccatctcgacggcgctgcctcaggtcaacgaggaccttgtgtctcttccacaccagttgccagaggccagtgagcccccccagagcccctctgagaagaggaaaaagacctttgtgggagagccgcagaggctgggctcagagacgcgcctcccacagcacatcagggaggccactgcggctccccacgggaagaggaagaggaagaagaagaagcgcccggaggacacagctgccagcgccctgcaggaggggcagacacagagacagcctgggagccccatgtacaggagggagggccaggcacagctgcccgctgtcagacggcaggaagatggcacacagccacaggtgaatggccagcaggtgggatgtgttacggacggccaccacgcgagcagcaggaagcggaggaggaaaggagcagaaggtcttggtgaagaaggcggcctgcaccaggacccacttcggcacagctgctctcccatgggtgatggtgatccagaggccatggaagagtctccaaggaaaaagaaaaagaaaaaaagaaagcaggagacacagcgggcagtagaagaggatgggcatctcaaatgcccaaggagtgccaagccccaagatgctgttgtccccgagtccagcagctgcgcaccatccgcgaatggctggtgtcctggggaccgcatggggctgagccaggcccctcctgtgtcttggaatggagagcgggagtctgatgtggtccaggaactgctcaaatactcatctgataaagcttacgggagaaaagttctgacctgggatggcaagatgtcggcggtcagtcaggatgctattgaagacagcagacaggcccggactgagaccgtggttgatgactgggacgaagagtttgaccgagggaaggaaaagaaaattaaaaaatttaagagagagaagaggagaaacttcaacgccttccagaaacttcagactcgacggaacttctggtctgtgactcacccagcaaaggctgccagcctcagctatcgccgctgactgtgcccctgtggaaggaggtcggttccgagggggtgggtgtaagggtgaggtgggggtgtgtgtgccgtgtatgtgtgtaggggtgtggtggggtgtggcgtgtgtgtatgatgtatgtgggctgtgtatctggcacatgtgtgttgggtggtgtgtgtggtgtgggcgcgtctgtggtgtgtgtcctagtcacttggagaagggtgtgtgtgggatgcgtgtgtataagggggtgtgtgtgggatgcgtgtgtataagggggtgtgtgtagtgtgtgttgggtgtggggtgtgtacacctggcatctgtggcatgtgttctggtcacttggagaagggcatgtgtggggtgtgtgtgggatgtgggttgtgtgtatatctggcatgtgtcccagtcacttgcagaagggtgacttcttgccagccgcatcgagatgccatgcattgggttcctaggttggactcatacccgagggtggcagtgggaagattcgggtctcgtttctctctgtcaggactaccgtggtttgttctgcagcctcctggagacaaggcgtcccttcccgggagctgtcggtctggatctgagggagctctctgtgtgggctctgctgcgctgggagcctgtcacggtaggagctctcccggtaccagtgtccacagaccgcccaacacagaggctttgaggcttctctagatcggaacctctttggtgacattcccgaccagccctgcaagagaaacgacagtgtgtgtgtgagcagaggtggccgcacacctgctggacatctttgccaggctgtgccttctcatgtttcatagacagtggtctgtgctggcagaggctgctgcccctggttggggctatcaggagagtgggggatggtggccacatgtcccccaggtggtctcccggtgcatagctggtggctctgggcaagccatcccttgcttctcggggctgacgccaccgttgtgtccgagcccgccctcccctgcttcctcagcgggaccccttcatctgttggccttacctgtcctcagaaaggaagaggtgaccccacccagccacctctcccttttatggaactcgagagggtggccctactgtgcaccccttccttgtgagtagctctcaactgtcctggagagcagaggctatttggggtcggaggagccctcgatacctgcgaatacatctgctttccaggctgctgtttattctgagacgactgtgctgtagcttcccttgcagctgcaataacccgcaggtcttcactgaggtggaggctttggggtagaattctccatttattttactacttaatacaaaacatttatttttgaccagtcctgtggcttccattagcaatatgtttcctttcccaaatatgcaaatagtggctttgtttgctcaattttgtgagtgctttggaatttaaatgattgtataactcaagaagattacttttctatgttgctcaagctgtgcctgccaacttgtaacttaataaatacaggaaatcctcagagaaggtgatattttcaggaaaaagacaaatgccctcatagtagtgggaagtgtgaaggtgaccgtgaacatccttcctcatcgggtctgtccccgtcatttcctcccggagtcgtcgcaggtggagatggacaacgtggtgttggacttagacctccttcagtgtggctctgctgggccagaggcatcctgctgtcccgggtggctgcctcgctgtctgcaccccctctccctggggcagctttgcttcctgcccctgtgctcggggcctgggtggttactggcgtgtagatggaattgcttttttaatatgggaagatacatttatttttttccatgtgggtgggtgtctctttttggattttcttctgtttttacgtttctcttcttagaagggtgggagagaatcaagctcctgtggccacctgtgtcccagcagcagtgagtggagctgctcagggtgccctctcctgcggaccagtctctgaatgttcaaagatgagggcctggcttccgtgctctggctttgtaacttatctggaagggaaagcacatgccttcacgggcaggatgatcaagcggtgctgattcacgagagtggaagcctccagagcttggggctttctggctgctcttcattgacctgtgtgttcccagcacacgaacagtgcccctaacggagatttgttcagcgactgaatatacacctgtaaacgagtagcatgtatacattgattttgattacaaatggttctgtattat

SEQ ID NO: 197366 - DNA, 898 bp, Homo sapiens
  Payload ID: 18930
  Gene Name: ubiquitin specific peptidase 36
  ENST ID: ENST00000586531
  CDS Start-End: 362-898
cggtgcgcaggcctggggacgagaccggggcggggggttccgcgaggcctggggcgcgggaagggctggcgggcgcagccgggacgctcagggagaacgtgggcgcgggtccgcgcagggcttcggccgtccccgaggaggacccgggatgctccgcccgctcgcgagctcgcttctccagagcccgggctctgacgcccgctctgcggcttcggtgtttgaacaggccacagtccaggagcgcttacattcaggagctccgcgtagcacctgcccaaccaaactcagccctccgttaagatcctggttccatgccgcagtaggacagcaggcccaagtctgcacatcccagtgatgcaccatgccaatagtggataagttgaaggaggccctgaaacccggccgcaaggactcggctgatgatggagaactggggaagcttcttgcctcctctgccaagaaggtccttttacagaaaatcgagttcgagccagccagcaagagcttctcctaccagctggaggccttaaagagcaaatatgtgttgctcaaccccaaaacagagggagctagtcgccacaagagtggagatgacccaccggccaggagacagggcagtgagcacacgtatgagagctgtggtgacggagtcccagccccgcagaaagtgcttttccccacggagcgactgtctctgaggtgggagcgggtcttccgcgtgggcgcaggactccacaaccttggcaacacctgctttctcaatgccaccatccagtgcttgacctacacaccacctctagccaactacctgctctccaaggagcatgctcgcagctgccaccagggaagcttctgcatgctgtgtgtcatgcagaaccacattgtccaggccttcgcc

SEQ ID NO: 197367 - DNA, 1771 bp, Homo sapiens
  Payload ID: 18930
  Gene Name: ubiquitin specific peptidase 36
  ENST ID: ENST00000590546
  CDS Start-End: 311-1168
ctgggtgcggcgcctttaagcgtcgcggtgacacgtgtgtgaggcgccggaggcccggatggtgcgcgtgctgggccgcgggccgaaggagtcgccagggctgcgtaggcttgtggcgcgcccgcggagaggccggggctctgacgcccgctctgcggcttcggtgtttgaacaggccacagtccaggagcgcttacattcaggagctccgcgtagcacctgcccaaccaaactcagccctccgttaagatcctggttccatgccgcagtaggacagcaggcccaagtctgcacatcccagtgatgcaccatgccaatagtggataagttgaaggaggccctgaaacccggccgcaaggactcggctgatgatggagaactggggaagcttcttgcctcctctgccaagaaggtccttttacagaaaatcgagttcgagccagccagcaagagcttctcctaccagctggaggccttaaagagcaaatatgtgttgctcaaccccaaaacagagggagctagtcgccacaagagtggagatgacccaccggccaggagacagggcagtgagcacacgtatgagagctgtggtgacggagtcccagccccgcagaaagtgcttttccccacggagcgactgtctctgaggtgggagcgggtcttccgcgtgggcgcaggactccacaaccttggcaacacctgctttctcaatgccaccatccagtgcttgacctacacaccacctctagccaactacctgctctccaaggagcatgctcgcagctgccaccagggaagcttctgcatgctgtgtgtcatgcagaaccacattgtccaggccttcgccaacagcggcaacgccatcaagcccgtctccttcatccgagacctgaaaaagatcgcccgacacttccgctttgggaaccaggaggacgcgcatgagttcctgcggtacaccatcgacgccatgcagaaagcctgcctgaatggctgtgccaagtgcgtgcttccccacccaccctcccagggctttggacaccttttctacatggtggcagcagaacattcctatggcaacagccagcccggcacctttctacccaggctgcccttgggtagacgtggcagaatttgcctctgggtactcaaactgttggagcccaaataggggattgcccttgcttcctgggaaagggctgtctccggagacgtcctgctggtccggggcggcttggtaggatcgggtggctgtggtggcggcagctgtgtctgagcagctcagtcagggggaaatatgttagcagaccttcttaggggcattcagttcttaccatggactttttcagtctcttaaaaatcatgtcgtttttgaaaagaggttggggtggtaggaatgaggtctctgcagtataatttatatgtacatgtatatgtacaaacagggagctttaacatgaggaggtttataactttaggatctgactgtgcctggctgctgtttcttattcacacgccacgtaagcccttatatgtgatggttgccatcacaaattgtctttgtgtcattcctgagttcataggttcagaccaaagaaaacaggcaggaaatgcttaggacttccttgtattgcctcagcttaggatcgtagaaatactttaaatagtttagggaatatacctagaatgttctttagagaagttgagttgtggcaataagtgattgaaatggcaaaactactggcctcagtggatgatattcttacgtaaataa

SEQ ID NO: 197368 - DNA, 696 bp, Homo sapiens
  Payload ID: 18930
  Gene Name: ubiquitin specific peptidase 36
  ENST ID: ENST00000586896
  CDS Start-End: 218-696
aggaagagtcgcctccactgatggtctccctgtccctcccacaggctctgacgcccgctctgcggcttcggtgtttgaacaggccacagtccaggagcgcttacattcaggagctccgcgtagcacctgcccaaccaaactcagccctccgttaagatcctggttccatgccgcagtaggacagcaggcccaagtctgcacatcccagtgatgcaccatgccaatagtggataagttgaaggaggccctgaaacccggccgcaaggactcggctgatgatggagaactggggaagcttcttgcctcctctgccaagaaggtccttttacagaaaatcgagttcgagccagccagcaagagcttctcctaccagctggaggccttaaagagcaaatatgtgttgctcaaccccaaaacagagggagctagtcgccacaagagtggagatgacccaccggccaggagacagggcagtgagcacacgtatgagagctgtggtgacggagtcccagccccgcagaaagtgcttttccccacggagcgactgtctctgaggtgggagcgggtcttccgcgtgggcgcaggactccacaaccttggcaacacctgctttctcaatgccaccatccagtgcttgacctacacaccacctctagccaactacctgctctccaaggagcatgctcgcagctgcca

SEQ ID NO: 197369 - DNA, 679 bp, Homo sapiens
  Payload ID: 18930
  Gene Name: ubiquitin specific peptidase 36
  ENST ID: ENST00000587783
  CDS Start-End: 480-679
tggcgggcgcagccgggacgctcagggagaacgtgggcgcgggtccgcgcagggcttcggccgtccccgaggaggacccgggatgctccgcccgctcgcgagctcgcttctccagagcccgggtattcccgaggagggtccggggccgggctgtcctcgccggtctccgccgtcccccgggctccgggccggtgatgggggtcgccggggcccgctgtctgtgcaggattcaggtcaacttcggagaggttgaagtcggaatcagggcgagggcgtcgcgtgcggccgcagagctcagcggggcgggctctgacgcccgctctgcggcttcggtgtttgaacaggccacagtccaggagcgcttacattcaggagctccgcgtagcacctgcccaaccaaactcagccctccgttaagatcctggttccatgccgcagtaggacagcaggcccaagtctgcacatcccagtgatgcaccatgccaatagtggataagttgaaggaggccctgaaacccggccgcaaggactcggctgatgatggagaactggggaagcttcttgcctcctctgccaagaaggtccttttacagaaaatcgagttcgagccagccagcaagagcttctcctaccagctggaggccttaaagagcaaatatgtgttgctcaaccccaaaac

SEQ ID NO: 197370 - DNA, 427 bp, Homo sapiens
  Payload ID: 18930
  Gene Name: ubiquitin specific peptidase 36
  ENST ID: ENST00000591052
  CDS Start-End: 1-36
ccagcaaaggctgccagcctcagctatcgccgctgactgtgcccctgtggaaggagaagggtgggagagaatcaagctcctgtggccacctgtgtcccagcagcagtgagtggagctgctcagggtgccctctcctgcggaccagtctctgaatgttcaaagatgagggcctggcttccgtgctctggctttgtaacttatctggaagggaaagcacatgccttcacgggcaggatgatcaagcggtgctgattcacgagagtggaagcctccagagcttggggctttctggctgctcttcattgacctgtgtgttcccagcacacgaacagtgcccctaacggagatttgttcagcgactgaatatacacctgtaaacgagtagcatgtatacattgattttgattacaaatggttctgtattata

SEQ ID NO: 197371 - DNA, 3187 bp, Homo sapiens
  Payload ID: 18930
  Gene Name: ubiquitin specific peptidase 36
  ENST ID: ENST00000588086
  CDS Start-End: 303-3187
ggcgcctttaagcgtcgcggtgacacgtgtgtgaggcgccggaggcccggatggtgcgcgtgctgggccgcgggccgaaggagtcgccagggctgcgtaggcttgtggcgcgcccgcggagaggccggggctctgacgcccgctctgcggcttcggtgtttgaacaggccacagtccaggagcgcttacattcaggagctccgcgtagcacctgcccaaccaaactcagccctccgttaagatcctggttccatgccgcagtaggacagcaggcccaagtctgcacatcccagtgatgcaccatgccaatagtggataagttgaaggaggccctgaaacccggccgcaaggactcggctgatgatggagaactggggaagcttcttgcctcctctgccaagaaggtccttttacagaaaatcgagttcgagccagccagcaagagcttctcctaccagctggaggccttaaagagcaaatatgtgttgctcaaccccaaaacagagggagctagtcgccacaagagtggagatgacccaccggccaggagacagggcagtgagcacacgtatgagagctgtggtgacggagtcccagccccgcagaaagtgcttttccccacggagcgactgtctctgaggtgggagcgggtcttccgcgtgggcgcaggactccacaaccttggcaacacctgctttctcaatgccaccatccagtgcttgacctacacaccacctctagccaactacctgctctccaaggagcatgctcgcagctgccaccagggaagcttctgcatgctgtgtgtcatgcagaaccacattgtccaggccttcgccaacagcggcaacgccatcaagcccgtctccttcatccgagacctgaaaaagatcgcccgacacttccgctttgggaaccaggaggacgcgcatgagttcctgcggtacaccatcgacgccatgcagaaagcctgcctgaatggctgtgccaagttggatcgtcaaacgcaggctactaccttggtccatcaaatttttggagggtatctcagatcacgcgtgaagtgctccgtgtgcaagagcgtctcggacacctacgacccctacttggacgtcgcgctggagatccggcaagctgcgaatattgtgcgtgctctggaactttttgtgaaagcagatgtcctgagtggagagaatgcctacatgtgtgctaaatgcaagaagaaggttccagccagcaagcgcttcaccatccacagaacatccaacgtcttaaccctttccctcaagcgctttgccaacttcagcggggggaagatcaccaaggatgtaggctatccggaattcctcaacatacgtccgtatatgtcccagaataatggtgatcctgtcatgtatggactctatgctgtcctggtgcactcgggctacagctgccatgccgggcactattactgctacgtgaaggcaagcaatggacagtggtaccagatgaatgattccttggtccattccagcaacgtcaaggtggttctgaaccagcaggcctacgtgctgttctatctgcgaattccaggctctaagaaaagtcccgagggcctcatctccaggacaggctcctcctcccttcccggccgcccgagtgtgattccagatcactccaagaagaacatcggcaatgggattatttcctccccactgactggaaagcgacaagactctgggacgatgaagaagccgcacaccactgaagagattggtgtgcccatatccaggaatggctccaccctgggcctgaagtcccagaacggctgcattcctccaaagctgccctcggggtccccttcccccaaactctcccagacacccacacacatgccaaccatcctagacgaccctggaaagaaggtgaagaagccagctcctccacagcacttttcccccagaactgctcaggggctgcctgggaccagcaactcgaatagcagcagatctgggagccaaaggcagggctcctgggacagcagggatgttgtcctctctacctcacctaagctcctggctacagccactgccaacgggcatgggctgaaggggaacgacgagagcgctggcctcgacaggaggggctccagcagctccagcccagagcactcggccagcagcgactccaccaaggccccccagacccccaggagtggagcggcccatctctgcgattctcaggaaacgaactgttccaccgctggccactccaaaacgccgccaagtggagcagattctaagacggtgaagctgaagtcccctgtcctgagcaacaccaccactgagcctgcaagcaccatgtctcctccaccagccaaaaaactggccctttctgccaagaaggccagcaccctgtggagggcgaccggcaatgacctccgtccacctcccccctcaccatcctccgacctcacccaccccatgaaaacctctcaccccgtcgttgcctccacttggcccgtccatagagccagggctgtgtcacctgctccccaatcatccagccgcctgcaaccccccttcagcccccaccccacattgctgtccagtacccccaagcccccagggacgtcagaaccacggagctgctcctccatctcgacggcgctgcctcaggtcaacgaggaccttgtgtctcttccacaccagttgccagaggccagtgagcccccccagagcccctctgagaagaggaaaaagacctttgtgggagagccgcagaggctgggctcagagacgcgcctcccacagcacatcagggaggccactgcggctccccacgggaagaggaagaggaagaagaagaagcgcccggaggacacagctgccagcgccctgcaggaggggcagacacagagacagcctgggagccccatgtacaggagggagggccaggcacagctgcccgctgtcagacggcaggaagatggcacacagccacaggtgaatggccagcaggtgggatgtgttacggacggccaccacgcgagcagcaggaagcggaggaggaaaggagcagaaggtcttggtgaagaaggcggcctgcaccaggacccacttcggcacagctgctctcccatgggtgatggtgatccagaggccatggaagagtctccaaggaaaaagaaaaagaaaaaaagaaa

SEQ ID NO: 197372 - DNA, 564 bp, Homo sapiens
  Payload ID: 18930
  Gene Name: ubiquitin specific peptidase 36
  ENST ID: ENST00000591942
  CDS Start-End: 225-410
aggagtcgccagggctgcgtaggcttgtggcgcgcccgcggagaggccggggctctgacgcccgctctgcggcttcggtgtttgaacaggccacagtccaggagcgcttacattcaggagctccgcgtagcacctgcccaaccaaactcagccctccgttaagatcctggttccatgccgcagtaggacagcaggcccaagtctgcacatcccagtgatgcaccatgccaatagtggataagttgaaggaggccctgaaacccggccgcaaggactcggctgatgatggagaactggggaagcttcttgcctcctctgccaagaaggcagtgagcacacgtatgagagctgtggtgacggagtcccagccccgcagaaagtgcttttccccacggagcgactgtctctgaggtgggagcgggtcttccgcgtgggcgcaggactccacaaccttggcaacacctgctttctcaatgccaccatccagtgcttgacctacacaccacctctagccaactacctgctctccaaggagcatgctcgcagctgccaccagggaagctt

SEQ ID NO: 197373 - DNA, 8032 bp, Homo sapiens
  Payload ID: 18931
  Gene Name: ubiquitin specific peptidase 37
  Uniprot ID: Q86T82
  ENST ID: ENST00000258399
  CDS Start-End: 414-3353
gtgcgtgcgtgtttgcgtgtggtcacagttcccgccatcagccgctctccctgactaggggtagctagcggcctccctcctttgggttcggtatccctacttccattaccctcggctcctcccactcctcgcgggctccgtgctttccgcgggtctgtccgggggctccggaccctcggcgcagctgagttgatggcttccggagaactggcatagctgcagaatatgagtagtgtcccaagaagagtgctttgcctttggcacaaggatcagaataaaggtgaattgctattacatagggtttttcggtaaaagtcactgaaaattatttgccatacagtaaccagagacctccaactaggggcccccaaactgtatcctgcctgtagccagaagcaatttttaaagaaaatatgtctcctctgaagatacatggtcctatcagaattcgaagtatgcagactgggattacaaagtggaaagaaggatcctttgaaattgtagaaaaagagaataaagtcagcctagtagttcactacaatactggaggaattccaaggatatttcagctaagtcataacattaaaaatgtggtgcttcgacccagtggagcgaaacaaagccgcctaatgttaactctgcaagataacagcttcttgtctattgacaaagtaccaagtaaggatgcagaggaaatgaggttgtttctagatgcagtccatcaaaacagacttcctgcagccatgaaaccgtctcaggggtctggtagttttggagccattctgggcagcaggacctcacagaaggaaaccagcaggcagctttcttactcagacaatcaggcttctgcaaaaagaggaagtttggaaactaaagatgatattccatttcgaaaagttcttggtaatccgggtagaggatcgattaagactgtagcaggaagtggaatagctcggacgattccttctttgacatctacttcaacacctcttagatcagggttgctagaaaatcgtactgaaaagaggaaaagaatgatatcaactggctcagaattgaatgaagattaccctaaggaaaatgattcatcatcgaacaacaaggccatgacagatccctccagaaagtatttaaccagcagtagagaaaagcagctgagtttgaaacagtcagaagagaataggacatcagggcttttacctttacagtcatcatccttttatggtagcagagctggatccaaggaacactcttctggtggcactaacttagacaggactaatgtttcaagccagactccctctgccaaaagaagtttgggatttcttcctcagccagttcctctttctgttaaaaaactgaggtgtaaccaggattacactggctggaataaaccaagagtgcccctttcctctcaccaacagcagcaactgcagggcttctccaatttgggaaatacctgctatatgaatgctattctacaatctctattttcactccagtcatttgcaaatgacttgcttaaacaaggtatcccatggaagaaaattccactcaatgcacttatcagacgctttgcacacttgcttgttaaaaaagatatctgtaattcagagaccaaaaaggatttactcaagaaggttaaaaatgccatttcagctacagcagagagattctctggttatatgcagaatgatgctcatgaatttttaagtcagtgtttggaccagctgaaagaagatatggaaaaattaaataaaacttggaagactgaacctgtttctggagaagaaaattcaccagatatttcagctaccagagcatacacttgccctgttattactaatttggagtttgaggttcagcactccatcatttgtaaagcatgtggagagattatccccaaaagagaacagtttaatgacctctctattgaccttcctcgtaggaaaaaaccactccctcctcgttcaattcaagattctcttgatcttttctttagggccgaagaactggagtattcttgtgagaagtgtggtgggaagtgtgctcttgtcaggcacaaatttaacaggcttcctagggtcctcattctccatttgaaacgatatagcttcaatgtggctctctcgcttaacaataagattgggcagcaagtcatcattccaagatacctgaccctgtcatctcattgcactgaaaatacaaaaccaccttttacccttggttggagtgcacatatggcaatttctagaccattgaaagcctctcaaatggtgaattcctgcatcaccagcccttctacaccttcaaagaaattcaccttcaaatccaagagctccttggctttatgccttgattcagacagtgaggatgagctaaaacgttctgtggccctcagccagagactttgtgaaatgttaggcaacgaacagcagcaggaagacctggaaaaagattcaaaattatgcccaatagagcctgacaagtctgaattggaaaactcaggatttgacagaatgagcgaagaagagcttctagcagctgtcttggagataagtaagagagatgcttcaccatctctgagtcatgaagatgatgataagccaactagcagcccagataccggatttgcagaagatgatattcaagaaatgccagaaaatccagacactatggaaactgagaagcccaaaacaatcacagagctggatcctgccagttttactgagataactaaagactgtgatgagaataaagaaaacaaaactccagaaggatctcagggagaagttgattggctccagcagtatgatatggagcgtgaaagggaagagcaagagcttcagcaggcactggctcagagccttcaagagcaagaggcttgggaacagaaagaagatgatgacctcaaaagagctaccgagttaagtcttcaagagtttaacaactcctttgtggatgcattgggttctgatgaggactctggaaatgaggatgtttttgatatggagtacacagaagctgaagctgaggaactgaaaagaaatgctgagacaggaaatctgcctcattcgtaccggctcatcagtgttgtcagtcacattggtagcacttcttcttcaggtcattacattagtgatgtatatgacattaagaagcaagcgtggtttacttacaatgacctggaggtatcaaaaatccaagaggctgccgtgcagagtgatcgagatcggagtggctacatcttcttttatatgcacaaggagatctttgatgagctgctggaaacagaaaagaactctcagtcacttagcacggaagtggggaagactacccgtcaggccttgtgaggaacaaactcctgggttggcagcatgcactgcatatttgttactgctgcccacctcacctttcctctgctgaaggagaatttggaattctacttgatgcgggagcaacaaacagctcagggccaaaccaaaagacaaaaattggagtaacgtagaatgctccatgctattttatggaaactttggtctcacatccgtagctgattatcctctttttctcctatgagtggcacttcttttgtcttaggaatacatgttgtaaatatatatctgtgtatgtgtgtatacacacacacagacacacacacacacacacgggatgaatggagccttaaagagttaggatgagccaccagaatatgcctgctcaaaattaatagcacagcagtttggagaagaaatgaaggtgtcaaagagtccattcacctgagaaatgtgtgaagacatacttatcagttggcttttagcttttatgttccttgagtagtttcactcaagtctgtaaccttttgtgtttccttattagtaaaattcactggaaagccagctcttcatgttacactaatgacagtttgttctctttgcaagagaggggcattactgtcacctgacttgaggagctgttttgttgttgttgttgtctgcaaatttcatgaatttgtgatgtctttgctgtttacatgcagtcccaagaaatggattgttggtgctttggaatatgttacagtcccacatttgatatttcttatatactttgttttctctaaggagatttcttcacacagtatgttcatcatatatcatcatcattattatggtggtaaagatagaatcttttttcttttttgtcattctgccatggagcagcattaccctaatggattgcaaccaaaactttaaacaagtagaaagataatatttctccaattgggactccccagcaggaatacttagggataaggaagaatgctagcatctctgtctctcaaacatagggaggataagaagagtgttcttctggtaaagctaaaattctggaccactgaagctaaaagccctattgcaagtatgaaattaagtacttgagctgtaggacaaaccttgggcatttaaccatttactgtctggctttgcccttaaaatagggttgcaattaaaatgtgattggcttaggtaatcccaaaaactaacaaataacaaaggtgcataatttatttatctactttttaggtgctctgagttgaggcaaagtagagcggcaacattaagtgctatgctagtcacttagctgacgtaaccagcttggttaagcagcttatgaaaccatataaagaattcttttgaggatggaattctgtccacaaaataattttgtgagcccagatatcattaggatcacacagagttaaatatagaaaaatgaaaccatcattatattctttcgtgttttttcttttattataaacaaggggattattctttagttctcagaggtagggacaaaaccacatcaggttttcagaaggaaaaaacatttaaaaacccaccatcacatgagagaatcacttgaacccaggaggcagaggttgcagtgagctgagatcgcatcattgcactgcagtctgagtgacagagtgagactccatctcattaaaaaaaacgaaaacaaaaacaaaaaaaacacaaaccatcatcacagaagatgcaacatcttttctgaaagattgccttaagagagctccagtcctactcttggaacttggatgtattctaatgtagtaaactattctaagttttcattctttgaattataaatggcctcagcagttttgctcaactactgataaatgctttgcctcctaccatctacctatataccttattgtaatgaatgttccaaaatggtagagtggtagaaaacgccagagtagtttagagcagaggaaaatatttgttttaaaactagctttaaagttttgtttcatttctaccaggagcctctttggtttggtttgattttgcttggaaataattggttttcttataaatgagtgaagcggtgataaaattctttggctagttattaattcttttacgtgtctttgcatttgagaggcactgttaaaaattattgggaaagatttaaagtgcaggctgcaattaaaacatggagaaaagtagaaataatgccataagtctagattgcctcatgaagcagcctcatttgaattgctttcatagctttcatgtgtgtatggtttagaagtacacttacctcagaaacctgatttgatcttcatgtcttgggcaggagttgttgaaaataggttattggaatatataagttatctcactgctcatgtacttgcatgtttgggactcaaattttacttgatgtctgtccattcttgtggccctatcagccttctccttcctttactcctttaatctacttctttgactaccagtggagatttcagctggactatgttgatggggtttgttgttgtttttgagctggctgtatatattttaaaattataaatagataatatattattttttgcacattgtgatcagtttgcccagaattggggatggggcagttagcatgttggggccaggaagggacaagttagataaggactgagtgcttccgttgcaggcagtttgcacaatacctaattaaccttcctattgaaaataccaaatgtgtggttacattactttaaatgacattgaattggaacttgatggcaattagttctagatacaaccttttgatctttgttggaattttaagggaaaaatgaactaaacttcatatttgttgattttaatcacctaatagtactgaaggttggaaagttgcatgtggctggatgctgttaatttctttaatagccatgactataatttaagcctatgagaagatagactgtttcgtagggatatattcacatgtgtgtgcacactcatgagttttgtctcagcaggatagaataagcaaatccatgaactggtcttctattaatactttgattctaaaaattatttgtttacttgctatggtctgttcattctgggcctaaccttaaaggctcaataacaaatacaacaaatgtaaatatgtttacattttaagacatatgcagtggttcttacagatcagttaattaactccagaaagcaaatgttagactacacatttatttttctccttgatcaagtataaaattctgaaacagaggctttaaaatttaaaacctcagcaaaataatccatgaatttactgattcttctgtatcgtgtgtagttaccattatgtaactatacacacatacagctacggatataatgaaaattatctgcaaacacctaaattaaagagaaaaaaaagtagtttgtaaactcatttgtgatctactgaaaagaggttatattaaagcaaattaaaatattttccttctctgtcctctgaaatgactgcagtagatactcttagttatcccatttagggtggttggagggcctttttaatttaattgaccccccgaggtggtcttttgttttaaacagggggcaacagctggatctccaagtacatatggattttgtatatataggagatttttagaaaaatcaacaacctaacaccagattcaagtcacataaaagtgttccaataaaatggatggatgtctttttcctccccattttgctttatactgagtaatgcactcttgcaagtgtatacaaaaactaaatagacttctgccctccaacatctttttattgcattacttcaaaatcctaattttgtctctactgatatgtcttattaacatctgaaaaaatatatattttttattggaaaattctaatttgttaggccttgaaagttttgtgacaattattttgctgtgtttaaccacaatcattcaccttatggcatgctttgattactagacttcaggcagtctcattcattgtatcatacttacacacaattagtaagttgtctccatgtgtgctatatgtctgaggtgtatggagtttttatttaaaaagtgtgccagtctgaatataagcatttgattttgtaacattggacttttcttaaaagtacagaggttcaaagtataggtatgtccattggcataagaatagagtgggtgagggtctggaccaggttccaggttggtccagtcagatgccagaacaaagaagaacagtcaactaaactggtctacttcaaaaatagtgggcctgtgtgaagagtgagaccacatgtgggtgtgcacacctcttgtccccaggtttccctccctttgagcttttctttccctccctaacttctctggcctattgtcattgttgtttctttaaacttaaggagagaaaaacaaaaatgagattcctacactttgcctaattgagccactaccaggttttctggcagctgtggccacattatttgtgagatgattttttttctttatgttcagagtgacttttgattctgattctttatgttttgtatggagcggcacttttatctgtgttttagcagaactgttcctctgtatcctttacggtttttctttgtttttgtttcctttttaaattatgcatagagtttttttgtgtgtatgaaattaaagcctttattaaccttc

SEQ ID NO: 197374 - DNA, 1771 bp, Homo sapiens
  Payload ID: 18931
  Gene Name: ubiquitin specific peptidase 37
  ENST ID: ENST00000338465
  CDS Start-End: 379-1287
catcagccgctctccctgactaggggtagctagcggcctccctcctttgggttcggtatccctacttccattaccctcggctcctcccactcctcgcgggctccgtgctttccgcgggtctgtccgggggctccggaccctcggcgcagctgagttgatggcttccggagaactggcatagctgcagaatatgagtagtgtcccaagaagagtgctttgcctttggcacaaggatcagaataaaggtgaattgctattacatagggtttttcggtaaaagtcactgaaaattatttgccatacagtaaccagagacctccaactaggggcccccaaactgtatcctgcctgtagccagaagcaatttttaaagaaaatatgtctcctctgaagatacatggtcctatcagaattcgaagtatgcagactgggattacaaagtggaaagaaggatcctttgaaattgtagaaaaagagaataaagtcagcctagtagttcactacaatactggaggaattccaaggatatttcagctaagtcataacattaaaaatgtggtgcttcgacccagtggagcgaaacaaagccgcctaatgttaactctgcaagataacagcttcttgtctattgacaaagtaccaagtaaggatgcagaggaaatgaggttgtttctagatgcagtccatcaaaacagacttcctgcagccatgaaaccgtctcaggggtctggtagttttggagccattctgggcagcaggacctcacagaaggaaaccagcaggcagctttcttactcagacaatcaggcttctgcaaaaagaggaagtttggaaactaaagatgatattccatttcgaaaagttcttggtaatccgggtagaggatcgattaagactgtagcaggaagtggaatagctcggacgattccttctttgacatctacttcaacacctcttagatcagggttgctagaaaatcgtactgaaaagaggaaaagaatgatatcaactggctcagaattgaatgaagattaccctaaggaaaatgattcatcatcgaacaacaaggccatgacagatccctccagaaagtatttaaccagcagtagagaaaagcagctgagtttgaaacagtcagaagagaataggacatcagggcttttacctttacagtcatcatccttttatggtagcagagctggatccaaggaacactcttctggtggcactaacttagacagatttattgggtataaatacataagatacctgctaagcacttgttgagaacatgtgatcatgcagtgcagcacagaagggttgatggttttaaatgtaaaaagtgagggtaatggcaaatgcccatcaatgatagacaggataaagaaaatgtggcatatatataccatggaatactatgcagccataaaaatggatgagttcatgtcctttgcagagacatggatgaagctgaaaaccatcattctcagcaaactgacacaggaacataaaaccaaacaccacatattcttactcataagtggatgttgaacaatgagaacacatggacacagggaggggaacatcactcaccggggtctgtcgtggggtggggggctaggggagggatagcattaagagaaatacctaatgtagatgatgggttgatgggtgcagcaaaccatgatggcatgtgtatacctatgtaacaaacctgcacattgtacacatgtatcccagaacttaaaatataattaaaaaaaaaaagtga

SEQ ID NO: 197375 - DNA, 5019 bp, Homo sapiens
  Payload ID: 18931
  Gene Name: ubiquitin specific peptidase 37
  Uniprot ID: Q86T82
  ENST ID: ENST00000454775
  CDS Start-End: 418-3357
atcagccgctctccctgactaggggtagctagcggcctccctcctttgggttcggtatccctacttccattaccctcggctcctcccactcctcgcgggctccgtgctttccgcgggtctgtccgggggctccggaccctcggcgcagctgagttgatggcttccggagaactggcatagctgcagaatatgagtagtgtcccaagaagagtgctttgcctttggcacaaggatcagaataaaggtgaattgctattacatagggtttttcggtaaaagtcactgaaaattatttgccatacagtaaccagagacctccaactaggggcccccaaactgtatcctgcctgtagaacctgccaggtaaaggtatatttttgctttttaatttagccagaagcaatttttaaagaaaatatgtctcctctgaagatacatggtcctatcagaattcgaagtatgcagactgggattacaaagtggaaagaaggatcctttgaaattgtagaaaaagagaataaagtcagcctagtagttcactacaatactggaggaattccaaggatatttcagctaagtcataacattaaaaatgtggtgcttcgacccagtggagcgaaacaaagccgcctaatgttaactctgcaagataacagcttcttgtctattgacaaagtaccaagtaaggatgcagaggaaatgaggttgtttctagatgcagtccatcaaaacagacttcctgcagccatgaaaccgtctcaggggtctggtagttttggagccattctgggcagcaggacctcacagaaggaaaccagcaggcagctttcttactcagacaatcaggcttctgcaaaaagaggaagtttggaaactaaagatgatattccatttcgaaaagttcttggtaatccgggtagaggatcgattaagactgtagcaggaagtggaatagctcggacgattccttctttgacatctacttcaacacctcttagatcagggttgctagaaaatcgtactgaaaagaggaaaagaatgatatcaactggctcagaattgaatgaagattaccctaaggaaaatgattcatcatcgaacaacaaggccatgacagatccctccagaaagtatttaaccagcagtagagaaaagcagctgagtttgaaacagtcagaagagaataggacatcagggcttttacctttacagtcatcatccttttatggtagcagagctggatccaaggaacactcttctggtggcactaacttagacaggactaatgtttcaagccagactccctctgccaaaagaagtttgggatttcttcctcagccagttcctctttctgttaaaaaactgaggtgtaaccaggattacactggctggaataaaccaagagtgcccctttcctctcaccaacagcagcaactgcagggcttctccaatttgggaaatacctgctatatgaatgctattctacaatctctattttcactccagtcatttgcaaatgacttgcttaaacaaggtatcccatggaagaaaattccactcaatgcacttatcagacgctttgcacacttgcttgttaaaaaagatatctgtaattcagagaccaaaaaggatttactcaagaaggttaaaaatgccatttcagctacagcagagagattctctggttatatgcagaatgatgctcatgaatttttaagtcagtgtttggaccagctgaaagaagatatggaaaaattaaataaaacttggaagactgaacctgtttctggagaagaaaattcaccagatatttcagctaccagagcatacacttgccctgttattactaatttggagtttgaggttcagcactccatcatttgtaaagcatgtggagagattatccccaaaagagaacagtttaatgacctctctattgaccttcctcgtaggaaaaaaccactccctcctcgttcaattcaagattctcttgatcttttctttagggccgaagaactggagtattcttgtgagaagtgtggtgggaagtgtgctcttgtcaggcacaaatttaacaggcttcctagggtcctcattctccatttgaaacgatatagcttcaatgtggctctctcgcttaacaataagattgggcagcaagtcatcattccaagatacctgaccctgtcatctcattgcactgaaaatacaaaaccaccttttacccttggttggagtgcacatatggcaatttctagaccattgaaagcctctcaaatggtgaattcctgcatcaccagcccttctacaccttcaaagaaattcaccttcaaatccaagagctccttggctttatgccttgattcagacagtgaggatgagctaaaacgttctgtggccctcagccagagactttgtgaaatgttaggcaacgaacagcagcaggaagacctggaaaaagattcaaaattatgcccaatagagcctgacaagtctgaattggaaaactcaggatttgacagaatgagcgaagaagagcttctagcagctgtcttggagataagtaagagagatgcttcaccatctctgagtcatgaagatgatgataagccaactagcagcccagataccggatttgcagaagatgatattcaagaaatgccagaaaatccagacactatggaaactgagaagcccaaaacaatcacagagctggatcctgccagttttactgagataactaaagactgtgatgagaataaagaaaacaaaactccagaaggatctcagggagaagttgattggctccagcagtatgatatggagcgtgaaagggaagagcaagagcttcagcaggcactggctcagagccttcaagagcaagaggcttgggaacagaaagaagatgatgacctcaaaagagctaccgagttaagtcttcaagagtttaacaactcctttgtggatgcattgggttctgatgaggactctggaaatgaggatgtttttgatatggagtacacagaagctgaagctgaggaactgaaaagaaatgctgagacaggaaatctgcctcattcgtaccggctcatcagtgttgtcagtcacattggtagcacttcttcttcaggtcattacattagtgatgtatatgacattaagaagcaagcgtggtttacttacaatgacctggaggtatcaaaaatccaagaggctgccgtgcagagtgatcgagatcggagtggctacatcttcttttatatgcacaaggagatctttgatgagctgctggaaacagaaaagaactctcagtcacttagcacggaagtggggaagactacccgtcaggccttgtgaggaacaaactcctgggttggcagcatgcactgcatatttgttactgctgcccacctcacctttcctctgctgaaggagaatttggaattctacttgatgcgggagcaacaaacagctcagggccaaaccaaaagacaaaaattggagtaacgtagaatgctccatgctattttatggaaactttggtctcacatccgtagctgattatcctctttttctcctatgagtggcacttcttttgtcttaggaatacatgttgtaaatatatatctgtgtatgtgtgtatacacacacacagacacacacacacacacacgggatgaatggagccttaaagagttaggatgagccaccagaatatgcctgctcaaaattaatagcacagcagtttggagaagaaatgaaggtgtcaaagagtccattcacctgagaaatgtgtgaagacatacttatcagttggcttttagcttttatgttccttgagtagtttcactcaagtctgtaaccttttgtgtttccttattagtaaaattcactggaaagccagctcttcatgttacactaatgacagtttgttctctttgcaagagaggggcattactgtcacctgacttgaggagctgttttgttgttgttgttgtctgcaaatttcatgaatttgtgatgtctttgctgtttacatgcagtcccaagaaatggattgttggtgctttggaatatgttacagtcccacatttgatatttcttatatactttgttttctctaaggagatttcttcacacagtatgttcatcatatatcatcatcattattatggtggtaaagatagaatcttttttcttttttgtcattctgccatggagcagcattaccctaatggattgcaaccaaaactttaaacaagtagaaagataatatttctccaattgggactccccagcaggaatacttagggataaggaagaatgctagcatctctgtctctcaaacatagggaggataagaagagtgttcttctggtaaagctaaaattctggaccactgaagctaaaagccctattgcaagtatgaaattaagtacttgagctgtaggacaaaccttgggcatttaaccatttactgtctggctttgcccttaaaatagggttgcaattaaaatgtgattggcttaggtaatcccaaaaactaacaaataacaaaggtgcataatttatttatctactttttaggtgctctgagttgaggcaaagtagagcggcaacattaagtgctatgctagtcacttagctgacgtaaccagcttggttaagcagcttatgaaaccatataaagaattcttttgaggatggaattctgtccacaaaataattttgtgagcccagatatcattaggatcacacagagttaaatatagaaaaatgaaaccatcattatattctttcgtgttttttcttttattataaacaaggggattattctttagttctcagaggtagggacaaaaccacatcaggttttcagaaggaaaaaacatttaaaaacccaccatcacatgagagaatcacttgaacccaggaggcagaggttgcagtgagctgagatcgcatcattgcactgcagtctgagtgacagagtgagactccatctcattaaaaaaaacg

SEQ ID NO: 197376 - DNA, 3353 bp, Homo sapiens
  Payload ID: 18931
  Gene Name: ubiquitin specific peptidase 37
  Uniprot ID: Q86T82
  ENST ID: ENST00000418019
  CDS Start-End: 299-3238
gcctccctcctttgggttcggtatccctacttccattaccctcggctcctcccactcctcgcgggctccgtgctttccgcgggtctgtccgggggctccggaccctcggcgcagctgagttgatggcttccggagaactggcatagctgcagaatatgagtagtgtcccaagaagagtgctttgcctttggcacaaggatcagaataaagttatttgccatacagtaaccagagacctccaactaggggcccccaaactgtatcctgcctgtagccagaagcaatttttaaagaaaatatgtctcctctgaagatacatggtcctatcagaattcgaagtatgcagactgggattacaaagtggaaagaaggatcctttgaaattgtagaaaaagagaataaagtcagcctagtagttcactacaatactggaggaattccaaggatatttcagctaagtcataacattaaaaatgtggtgcttcgacccagtggagcgaaacaaagccgcctaatgttaactctgcaagataacagcttcttgtctattgacaaagtaccaagtaaggatgcagaggaaatgaggttgtttctagatgcagtccatcaaaacagacttcctgcagccatgaaaccgtctcaggggtctggtagttttggagccattctgggcagcaggacctcacagaaggaaaccagcaggcagctttcttactcagacaatcaggcttctgcaaaaagaggaagtttggaaactaaagatgatattccatttcgaaaagttcttggtaatccgggtagaggatcgattaagactgtagcaggaagtggaatagctcggacgattccttctttgacatctacttcaacacctcttagatcagggttgctagaaaatcgtactgaaaagaggaaaagaatgatatcaactggctcagaattgaatgaagattaccctaaggaaaatgattcatcatcgaacaacaaggccatgacagatccctccagaaagtatttaaccagcagtagagaaaagcagctgagtttgaaacagtcagaagagaataggacatcagggcttttacctttacagtcatcatccttttatggtagcagagctggatccaaggaacactcttctggtggcactaacttagacaggactaatgtttcaagccagactccctctgccaaaagaagtttgggatttcttcctcagccagttcctctttctgttaaaaaactgaggtgtaaccaggattacactggctggaataaaccaagagtgcccctttcctctcaccaacagcagcaactgcagggcttctccaatttgggaaatacctgctatatgaatgctattctacaatctctattttcactccagtcatttgcaaatgacttgcttaaacaaggtatcccatggaagaaaattccactcaatgcacttatcagacgctttgcacacttgcttgttaaaaaagatatctgtaattcagagaccaaaaaggatttactcaagaaggttaaaaatgccatttcagctacagcagagagattctctggttatatgcagaatgatgctcatgaatttttaagtcagtgtttggaccagctgaaagaagatatggaaaaattaaataaaacttggaagactgaacctgtttctggagaagaaaattcaccagatatttcagctaccagagcatacacttgccctgttattactaatttggagtttgaggttcagcactccatcatttgtaaagcatgtggagagattatccccaaaagagaacagtttaatgacctctctattgaccttcctcgtaggaaaaaaccactccctcctcgttcaattcaagattctcttgatcttttctttagggccgaagaactggagtattcttgtgagaagtgtggtgggaagtgtgctcttgtcaggcacaaatttaacaggcttcctagggtcctcattctccatttgaaacgatatagcttcaatgtggctctctcgcttaacaataagattgggcagcaagtcatcattccaagatacctgaccctgtcatctcattgcactgaaaatacaaaaccaccttttacccttggttggagtgcacatatggcaatttctagaccattgaaagcctctcaaatggtgaattcctgcatcaccagcccttctacaccttcaaagaaattcaccttcaaatccaagagctccttggctttatgccttgattcagacagtgaggatgagctaaaacgttctgtggccctcagccagagactttgtgaaatgttaggcaacgaacagcagcaggaagacctggaaaaagattcaaaattatgcccaatagagcctgacaagtctgaattggaaaactcaggatttgacagaatgagcgaagaagagcttctagcagctgtcttggagataagtaagagagatgcttcaccatctctgagtcatgaagatgatgataagccaactagcagcccagataccggatttgcagaagatgatattcaagaaatgccagaaaatccagacactatggaaactgagaagcccaaaacaatcacagagctggatcctgccagttttactgagataactaaagactgtgatgagaataaagaaaacaaaactccagaaggatctcagggagaagttgattggctccagcagtatgatatggagcgtgaaagggaagagcaagagcttcagcaggcactggctcagagccttcaagagcaagaggcttgggaacagaaagaagatgatgacctcaaaagagctaccgagttaagtcttcaagagtttaacaactcctttgtggatgcattgggttctgatgaggactctggaaatgaggatgtttttgatatggagtacacagaagctgaagctgaggaactgaaaagaaatgctgagacaggaaatctgcctcattcgtaccggctcatcagtgttgtcagtcacattggtagcacttcttcttcaggtcattacattagtgatgtatatgacattaagaagcaagcgtggtttacttacaatgacctggaggtatcaaaaatccaagaggctgccgtgcagagtgatcgagatcggagtggctacatcttcttttatatgcacaaggagatctttgatgagctgctggaaacagaaaagaactctcagtcacttagcacggaagtggggaagactacccgtcaggccttgtgaggaacaaactcctgggttggcagcatgcactgcatatttgttactgctgcccacctcacctttcctctgctgaaggagaatttggaattctacttgatgcgggagcaacaaacag

SEQ ID NO: 197377 - DNA, 4516 bp, Homo sapiens
  Payload ID: 18931
  Gene Name: ubiquitin specific peptidase 37
  Uniprot ID: Q86T82
  ENST ID: ENST00000415516
  CDS Start-End: 430-3087
ggtcacagttcccgccatcagccgctctccctgactaggggtagctagcggcctccctcctttgggttcggtatccctacttccattaccctcggctcctcccactcctcgcgggctccgtgctttccgcgggtctgtccgggggctccggaccctcggcgcagctgagttgatggcttccggagaactggcatagctgcagaatatgagtagtgtcccaagaagagtgctttgcctttggcacaaggatcagaataaaggtgaattgctattacatagggtttttcggtaaaagtcactgaaaattatttgccatacagtaaccagagacctccaactaggggcccccaaactgtatcctgcctgtagctaagtcataacattaaaaatgtggtgcttcgacccagtggagcgaaacaaagccgcctaatgttaactctgcaagataacagcttcttgtctattgacaaagtaccaagtaaggatgcagaggaaatgaggttgtttctagatgcagtccatcaaaacagacttcctgcagccatgaaaccgtctcaggggtctggtagttttggagccattctgggcagcaggacctcacagaaggaaaccagcaggcagctttcttactcagacaatcaggcttctgcaaaaagaggaagtttggaaactaaagatgatattccatttcgaaaagttcttggtaatccgggtagaggatcgattaagactgtagcaggaagtggaatagctcggacgattccttctttgacatctacttcaacacctcttagatcagggttgctagaaaatcgtactgaaaagaggaaaagaatgatatcaactggctcagaattgaatgaagattaccctaaggaaaatgattcatcatcgaacaacaaggccatgacagatccctccagaaagtatttaaccagcagtagagaaaagcagctgagtttgaaacagtcagaagagaataggacatcagggcttttacctttacagtcatcatccttttatggtagcagagctggatccaaggaacactcttctggtggcactaacttagacaggactaatgtttcaagccagactccctctgccaaaagaagtttgggatttcttcctcagccagttcctctttctgttaaaaaactgaggtgtaaccaggattacactggctggaataaaccaagagtgcccctttcctctcaccaacagcagcaactgcagggcttctccaatttgggaaatacctgctatatgaatgctattctacaatctctattttcactccagtcatttgcaaatgacttgcttaaacaaggtatcccatggaagaaaattccactcaatgcacttatcagacgctttgcacacttgcttgttaaaaaagatatctgtaattcagagaccaaaaaggatttactcaagaaggttaaaaatgccatttcagctacagcagagagattctctggttatatgcagaatgatgctcatgaatttttaagtcagtgtttggaccagctgaaagaagatatggaaaaattaaataaaacttggaagactgaacctgtttctggagaagaaaattcaccagatatttcagctaccagagcatacacttgccctgttattactaatttggagtttgaggttcagcactccatcatttgtaaagcatgtggagagattatccccaaaagagaacagtttaatgacctctctattgaccttcctcgtaggaaaaaaccactccctcctcgttcaattcaagattctcttgatcttttctttagggccgaagaactggagtattcttgtgagaagtgtggtgggaagtgtgctcttgtcaggcacaaatttaacaggcttcctagggtcctcattctccatttgaaacgatatagcttcaatgtggctctctcgcttaacaataagattgggcagcaagtcatcattccaagatacctgaccctgtcatctcattgcactgaaaatacaaaaccaccttttacccttggttggagtgcacatatggcaatgaaattcaccttcaaatccaagagctccttggctttatgccttgattcagacagtgaggatgagctaaaacgttctgtggccctcagccagagactttgtgaaatgttaggcaacgaacagcagcaggaagacctggaaaaagattcaaaattatgcccaatagagcctgacaagtctgaattggaaaactcaggatttgacagaatgagcgaagaagagcttctagcagctgtcttggagataagtaagagagatgcttcaccatctctgagtcatgaagatgatgataagccaactagcagcccagataccggatttgcagaagatgatattcaagaaatgccagaaaatccagacactatggaaactgagaagcccaaaacaatcacagagctggatcctgccagttttactgagataactaaagactgtgatgagaataaagaaaacaaaactccagaaggatctcagggagaagttgattggctccagcagtatgatatggagcgtgaaagggaagagcaagagcttcagcaggcactggctcagagccttcaagagcaagaggcttgggaacagaaagaagatgatgacctcaaaagagctaccgagttaagtcttcaagagtttaacaactcctttgtggatgcattgggttctgatgaggactctggaaatgaggatgtttttgatatggagtacacagaagctgaagctgaggaactgaaaagaaatgctgagacaggaaatctgcctcattcgtaccggctcatcagtgttgtcagtcacattggtagcacttcttcttcaggtcattacattagtgatgtatatgacattaagaagcaagcgtggtttacttacaatgacctggaggtatcaaaaatccaagaggctgccgtgcagagtgatcgagatcggagtggctacatcttcttttatatgcacaaggagatctttgatgagctgctggaaacagaaaagaactctcagtcacttagcacggaagtggggaagactacccgtcaggccttgtgaggaacaaactcctgggttggcagcatgcactgcatatttgttactgctgcccacctcacctttcctctgctgaaggagaatttggaattctacttgatgcgggagcaacaaacagctcagggccaaaccaaaagacaaaaattggagtaacgtagaatgctccatgctattttatggaaactttggtctcacatccgtagctgattatcctctttttctcctatgagtggcacttcttttgtcttaggaatacatgttgtaaatatatatctgtgtatgtgtgtatacacacacacagacacacacacacacacacgggatgaatggagccttaaagagttaggatgagccaccagaatatgcctgctcaaaattaatagcacagcagtttggagaagaaatgaaggtgtcaaagagtccattcacctgagaaatgtgtgaagacatacttatcagttggcttttagcttttatgttccttgagtagtttcactcaagtctgtaaccttttgtgtttccttattagtaaaattcactggaaagccagctcttcatgttacactaatgacagtttgttctctttgcaagagaggggcattactgtcacctgacttgaggagctgttttgttgttgttgttgtctgcaaatttcatgaatttgtgatgtctttgctgtttacatgcagtcccaagaaatggattgttggtgctttggaatatgttacagtcccacatttgatatttcttatatactttgttttctctaaggagatttcttcacacagtatgttcatcatatatcatcatcattattatggtggtaaagatagaatcttttttcttttttgtcattctgccatggagcagcattaccctaatggattgcaaccaaaactttaaacaagtagaaagataatatttctccaattgggactccccagcaggaatacttagggataaggaagaatgctagcatctctgtctctcaaacatagggaggataagaagagtgttcttctggtaaagctaaaattctggaccactgaagctaaaagccctattgcaagtatgaaattaagtacttgagctgtaggacaaaccttgggcatttaaccatttactgtctggctttgcccttaaaatagggttgcaattaaaatgtgattggcttaggtaatcccaaaaactaacaaataacaaaggtgcataatttatttatctactttttaggtgctctgagttgaggcaaagtagagcggcaacattaagtgctatgctagtcacttagctgacgtaaccagcttggttaagcagcttatgaaaccatataaagaattcttttgaggatggaattctgtccacaaaataattttgtgagcccagatatcattaggatcacacagagttaaatatagaaaaatgaaaccat

SEQ ID NO: 197378 - DNA, 7009 bp, Homo sapiens
  Payload ID: 18932
  Gene Name: ubiquitin specific peptidase 38
  Uniprot ID: Q8NB14
  ENST ID: ENST00000307017
  CDS Start-End: 507-3635
cttcggtctcttctccccggctgatcccagcactctccgtgacagcgcctcctgactcagcccaggaccggcttcttctcacgacctgctggagactggacgcccacacctgacccggaactcggaggcgtgcttcctccacccgccggctagcagccccgggccctgagctcccgccgacgccgctggggggcccgacaggcccctcggcgctgatgctgagtgggatcgagggcccggggcggcggcggagtacgggcctctggcgccttaggccagccgcaggtgtcggttcttaggctctccaggctcgctagctcccgccccggcttggatgggtctccctgcgccataaatgtggctgctgaggcggcggtggccgtggcccgtcgcgctgctgctgcggcgctccaagttcatctccgccccggggctctcctgccccacctcggggctgccgccacccgctccttatcccctggccctggccttgcagcgtggcgacaatggacaagatcctggagggccttgtgagttcctcgcatcccctgcccctcaagcgggtgattgtgcggaaggtggtggaatcggcggagcactggctagacgaggcgcagtgcgaggccatgtttgacctgacgacccggctcatcctggagggccaggaccctttccagcggcaggtggggcaccaggtgctggaggcctacgcacgataccaccggccagagttcgagtccttcttcaacaagaccttcgtgttgggcctccttcatcagggctaccactctctggacaggaaggatgtagccatcctggactacattcacaacggcctgaagctgattatgagctgtccgtcggtgctggatctctttagcctcctgcaggtagaggtgttacggatggtgtgtgagaggccggagccgcagctctgtgcccgactgagcgaccttctgaccgactttgtgcaatgcatccccaaggggaaattgtccatcacgttctgtcaacagctggttcgaacgataggccatttccagtgcgtgtccacccaggaaagagagctgcgggaatatgtctcccaggtgacaaaagtgagtaacttgctgcagaacatctggaaggccgagcctgccacactactgccttccctgcaagaagtttttgcaagcatctcttccacagatgcatcatttgaaccttctgtagcattggcaagccttgtgcagcatattcctcttcagatgattacagttctcatcaggagccttactacggatccaaatgtaaaagatgcaagtatgacccaagccctttgcagaatgattgactggctatcctggccattggctcagcatgtggatacatgggtaattgcactcctgaaaggactggcagctgtccagaagtttactattttgatagatgttactttgctgaaaatagaactggtttttaatcgactttggtttcctcttgtgagacctggtgctcttgcagttctttctcacatgctgcttagctttcagcattctccagaggcgttccatttgattgttcctcatgtggttaatttggttcattctttcaaaaatgatggtctgccttcaagtacagccttcttagtacaattaacagaattgatacactgtatgatgtatcattattctggatttccagatctctatgaacctattctggaggcaataaaggattttcctaagcccagtgaagagaagattaagttaattctcaatcaaagtgcctggacttctcaatccaattctttggcgtcttgcttgtctagactttctggaaaatctgaaactgggaaaactggtcttattaacctaggaaatacatgttatatgaacagtgttatacaagccttgtttatggccacagatttcaggagacaagtattatctttaaatctaaatgggtgcaattcattaatgaaaaaattacagcatctttttgcctttctggcccatacacagagggaagcatacgcacctcggatattctttgaggcttccagacctccatggtttactcccagatcacagcaagactgttctgaatacctcagatttctccttgacaggctccatgaagaagaaaagatcttgaaagttcaggcctcacacaagccttctgaaattctggaatgcagtgaaacttctttacaggaagtagctagtaaagcagcagtactaacagagacccctcgtacaagtgacggtgagaagactttaatagaaaaaatgtttggaggaaaactacgaactcacatacgttgtttgaactgcaggagtacctcacaaaaagtggaagcctttacagatctttcgcttgccttttgtccttcctcttctttggaaaacatgtctgtccaagatccagcatcatcacccagtatacaagatggtggtctaatgcaagcctctgtacccggtccttcagaagaaccagtagtttataatccaacaacagctgccttcatctgtgactcacttgtgaatgaaaaaaccataggcagtcctcctaatgagttttactgttctgaaaacacttctgtccctaacgaatctaacaagattcttgttaataaagatgtacctcagaaaccaggaggtgaaaccacaccttcagtaactgacttactaaattattttttggctccagagattcttactggtgataaccaatattattgtgaaaactgtgcctctctgcaaaatgctgagaaaactatgcaaatcacggaggaacctgaataccttattcttactctcctgagattttcatatgatcagaagtatcatgtgagaaggaaaattttagacaatgtatcactgccactggttttggagttgccagttaaaagaattacttctttctcttcattgtcagaaagttggtctgtagatgttgacttcactgatcttagtgagaaccttgctaaaaaattaaagccttcagggactgatgaagcttcctgcacaaaattggtgccctatctattaagttccgttgtggttcactctggtatatcctctgaaagtgggcattactattcttatgccaggaatatcacaagtacagactcttcatatcagatgtaccaccagtctgaggctctggcattagcatcctcccagagtcatttactagggagagatagtcccagtgcagtttttgaacaggatttggaaaataaggaaatgtcaaaagaatggtttttatttaatgacagtagagtgacatttacttcatttcagtcagtccagaaaattacgagcaggtttccaaaggacacagcttatgtgcttttgtataaaaaacagcatagtactaatggtttaagtggtaataacccaaccagtggactctggataaatggagacccacctctacagaaagaacttatggatgctataacaaaagacaataaactatatttacaggaacaagagttgaatgctcgagcccgggccctccaagctgcatctgcttcatgttcatttcggcccaatggatttgatgacaacgacccaccaggaagctgtggaccaactggtggagggggtggaggaggatttaatacagttggcagactcgtattttgatcctgagagagtccaaaatgcactggtcacgaaacgtctaatactatgactgttaaaatgtcagactataacaaatatctatcttttatttttcattagacccttatacttcaagagaacacactcagtgcttgtttttattttcttgacacatttattaacaaaatgcatcatggaaaaaaaaatctacctcttaaaattccatttgcttttatggttagacatgcttgaccaaaaatgttcagaagaaaatatgtacctggtccctaattaagctgcgttaaatttggtagaagcatttaaatggtctatcttcagttttactgaacaaaaaatgtaatttatttagcattctttataaaagaattgatgctagaggtaaaaaaaaatacttgtttttaaaaaatcctttacgtcttgtgtaattaccccattattaaattcaagtccttgaaaatcaactagagattataaagtctctaaagaaggcaataacaaaatttatcaagatatagtacttttcagtttttgtttagtgtcttcagcatcactgtgtctgtatttcaagtacaaatgtttttaaaaaggattctttatacatatgtgctgaattgattttaagaaagttgcatgatcctgtaggagcaacatttttacctaaaaaatgctaactttatagtatttctaattgttcaaggattttaaaattctatttcagggagtatatcttctgtggttttgaaggaggtgagttctgtatgtgccttgcagtactgtaattcaaaaataggaatctttggctgcaaaattttaatgaaatgttaggaagtaattttcgtgctaacattaaaattataactttttgaaaggtaatagattttccagaagtaaaatctgatggttctaaatcaatcaatgtgatagttcatttttaactcttagaagaattcagaggaaattaacccagctaagtaaaaaatctgtcttgattttgttacttattcctcagaatattaaacattgatcacatatttttagagttttacatttgggttttttgtttgtttgtttcagtcatatgtttggcactgttgtttctattttcgtagttttagataaaatgttaaaatgccaaaccctaccttcctacactttttcttttgccaggaaactggaaacatgtcagttctcctggttcttgattatacagtactcaagagttatcccagttatcccccttcctaaaggttttaacttatccacagttgtgcattgttctgaagattggtctcatatttattttgaaaacactttaaggaaacaatgttcttcgatgatttggggtttatctttttcccaagcttttatgacagtggttaaaaaacagaaatcctcatgtttattccattacctcccattcctaacctgtttccaatcaccaggaagattaggaaggcagattagattaaaaactgaaaattctttgcagatttaatgaaggttctcctccttataaatgaatgaaccagttatcatgcttttctgtggttttcctatcccaatagtgaatttctgagctatcctgtgtgttcagttatccacttacttgatagcaacttacgaccagattatatcagtcttggcatttattgaaattggtaaagtgatttaatacttgatagattgatattgggctaagatgcttctaggaactttcataaaagcaattatacttgtgcagctttatctatgaatatcaggtctctcaaggattttatgtatcaagataatatgtattgacttttttaaatgataaaatgaattctagttagagtctttccttggtatctgcagtggattggttccagaacaccatcccccaatattaaaatccacagatactcaagtcccttatttatataaaatagcacagtatttgcatataacctgtgcacatcctcccatatactttaatctccagatgattagatatgattgcatagcacttacgttgtgctatgtagttgttatattgttttttcatttgtactattttttatgatatttattggttttttaaattttctatccaaagttgtttgaatctaaggatacagagcctgaggatatggaaagctgactaaatatagtaacactgaagagtattcaaatgataactcataccagtaccaaaaacttgaagacttccttttaacattaaaaatacagtaactttttacgtgatttgttgaattcaacatatttggaaccagaataatcagaaacttcattcaaaacctatgcatctgaacttttttagtaaggtaatactcaggactgttctgattctaacagatccctgttaattacagatttatttgtcatattaggtcttttctttctcccatattcctaacccgtgtactagctccaactgttgtgaggtttgactctgaagactgagtagagtactattgttgtttttctttccttagtcagagtaatcagtttaaatgaagttgctcattgctgctaagaagcattaggcttcactgctagcaaaaatgaaaaactacaaatctgagtctttctttcaaagatgtttattgacataattaaagtaaaaaattgtttagagatatgcaaagaaggaaatatatatgatgtcacacaagctccagtaagctatccactaagcaggtgcctgtgcaactctgatttatggcattaacatatcaaattgaaggaaggattctagctcattttccattcaagcatcttcccactgcctctcttccagctaaataatcagagaagcagggcagtatatccctggagatccctgacttttatctccataccttaaattgttggtagatcctttggatgtagagataaaaattcattatgatgctagaggcattggggggtccatgcgaaaggttcaaacagcctattacattaatgcacatgtggaaagaacaaaaattttcaagctaagtcttaagttcaaatctataatttttttctcttcagttctgttctttgtatgataatccttaaaaaagtagttgtcttcttttcacatacacctctttaaagctatcatcttataataagtggaattggatgcttattgtgtgcccagcacagtttaggaaaaaaataattggcactgtttgtccagttactggagatcttcattttgatgctttgtactttgttccaggtctttaattctcagtccatcttttcctatgattgtgtacttcacatgatacattccatataaagagctcttttaaaatgactatttcaaaaatactgtacatttatatatagtattttttctcataaaaatgtgatagtttata

SEQ ID NO: 197379 - DNA, 6376 bp, Homo sapiens
  Payload ID: 18932
  Gene Name: ubiquitin specific peptidase 38
  ENST ID: ENST00000511739
  CDS Start-End: 1-1044
aagaccttcgtgttgggcctccttcatcagggctaccactctctggacaggaaggatgtagccatcctggactacattcacaacggcctgaagctgattatgagctgtccgtcggtgctggatctctttagcctcctgcaggtagaggtgttacggatggtgtgtgagaggccggagccgcagctctgtgcccgactgagcgaccttctgaccgactttgtgcaatgcatccccaaggggaaattgtccatcacgttctgtcaacagctggttcgaacgataggccatttccagtgcgtgtccacccaggaaagagagctgcgggaatatgtctcccaggtgacaaaagtgagtaacttgctgcagaacatctggaaggccgagcctgccacactactgccttccctgcaagaagtttttgcaagcatctcttccacagatgcatcatttgaaccttctgtagcattggcaagccttgtgcagcatattcctcttcagatgattacagttctcatcaggagccttactacggatccaaatgtaaaagatgcaagtatgacccaagccctttgcagaatgattgactggctatcctggccattggctcagcatgtggatacatgggtaattgcactcctgaaaggactggcagctgtccagaagtttactattttgatagatgttactttgctgaaaatagaactggtttttaatcgactttggtttcctcttgtgagacctggtgctcttgcagttctttctcacatgctgcttagctttcagcattctccagaggcgttccatttgattgttcctcatgtggttaatttggttcattctttcaaaaatgatggtctgccttcaagtacagccttcttagtacaattaacagaattgatacactgtatgatgtatcattattctggatttccagatctctatgaacctattctggaggcaataaagtcttgctctgttgcccaggctgaagtgcaatggcatgatcacggctcactgcagcctctacatcttgagctcaagtgaccctcctgcctcagcctcccaagtagctgggactccaggattttcctaagcccagtgaagagaagattaagttaattctcaatcaaagtgcctggacttctcaatccaattctttggcgtcttgcttgtctagactttctggaaaatctgaaactgggaaaactggtcttattaacctaggaaatacatgttatatgaacagtgttatacaagccttgtttatggccacagatttcaggagacaagtattatctttaaatctaaatgggtgcaattcattaatgaaaaaattacagcatctttttgcctttctggcccatacacagagggaagcatacgcacctcggatattctttgaggcttccagacctccatggtttactcccagatcacagcaagactgttctgaatacctcagatttctccttgacaggctccatgaagaagaaaagatcttgaaagttcaggcctcacacaagccttctgaaattctggaatgcagtgaaacttctttacaggaagtagctagtaaagcagcagtactaacagagacccctcgtacaagtgacggtgagaagactttaatagaaaaaatgtttggaggaaaactacgaactcacatacgttgtttgaactgcaggagtacctcacaaaaagtggaagcctttacagatctttcgcttgccttttgtccttcctcttctttggaaaacatgtctgtccaagatccagcatcatcacccagtatacaagatggtggtctaatgcaagcctctgtacccggtccttcagaagaaccagtagtttataatccaacaacagctgccttcatctgtgactcacttgtgaatgaaaaaaccataggcagtcctcctaatgagttttactgttctgaaaacacttctgtccctaacgaatctaacaagattcttgttaataaagatgtacctcagaaaccaggaggtgaaaccacaccttcagtaactgacttactaaattattttttggctccagagattcttactggtgataaccaatattattgtgaaaactgtgcctctctgcaaaatgctgagaaaactatgcaaatcacggaggaacctgaataccttattcttactctcctgagattttcatatgatcagaagtatcatgtgagaaggaaaattttagacaatgtatcactgccactggttttggagttgccagttaaaagaattacttctttctcttcattgtcagaaagttggtctgtagatgttgacttcactgatcttagtgagaaccttgctaaaaaattaaagccttcagggactgatgaagcttcctgcacaaaattggtgccctatctattaagttccgttgtggttcactctggtatatcctctgaaagtgggcattactattcttatgccaggaatatcacaagtacagactcttcatatcagatgtaccaccagtctgaggctctggcattagcatcctcccagagtcatttactagggagagatagtcccagtgcagtttttgaacaggatttggaaaataaggaaatgtcaaaagaatggtttttatttaatgacagtagagtgacatttacttcatttcagtcagtccagaaaattacgagcaggtttccaaaggacacagcttatgtgcttttgtataaaaaacagcatagtactaatggtttaagtggtaataacccaaccagtggactctggataaatggagacccacctctacagaaagaacttatggatgctataacaaaagacaataaactatatttacaggaacaagagttgaatgctcgagcccgggccctccaagctgcatctgcttcatgttcatttcggcccaatggatttgatgacaacgacccaccaggaagctgtggaccaactggtggagggggtggaggaggatttaatacagttggcagactcgtattttgatcctgagagagtccaaaatgcactggtcacgaaacgtctaatactatgactgttaaaatgtcagactataacaaatatctatcttttatttttcattagacccttatacttcaagagaacacactcagtgcttgtttttattttcttgacacatttattaacaaaatgcatcatggaaaaaaaaatctacctcttaaaattccatttgcttttatggttagacatgcttgaccaaaaatgttcagaagaaaatatgtacctggtccctaattaagctgcgttaaatttggtagaagcatttaaatggtctatcttcagttttactgaacaaaaaatgtaatttatttagcattctttataaaagaattgatgctagaggtaaaaaaaaatacttgtttttaaaaaatcctttacgtcttgtgtaattaccccattattaaattcaagtccttgaaaatcaactagagattataaagtctctaaagaaggcaataacaaaatttatcaagatatagtacttttcagtttttgtttagtgtcttcagcatcactgtgtctgtatttcaagtacaaatgtttttaaaaaggattctttatacatatgtgctgaattgattttaagaaagttgcatgatcctgtaggagcaacatttttacctaaaaaatgctaactttatagtatttctaattgttcaaggattttaaaattctatttcagggagtatatcttctgtggttttgaaggaggtgagttctgtatgtgccttgcagtactgtaattcaaaaataggaatctttggctgcaaaattttaatgaaatgttaggaagtaattttcgtgctaacattaaaattataactttttgaaaggtaatagattttccagaagtaaaatctgatggttctaaatcaatcaatgtgatagttcatttttaactcttagaagaattcagaggaaattaacccagctaagtaaaaaatctgtcttgattttgttacttattcctcagaatattaaacattgatcacatatttttagagttttacatttgggttttttgtttgtttgtttcagtcatatgtttggcactgttgtttctattttcgtagttttagataaaatgttaaaatgccaaaccctaccttcctacactttttcttttgccaggaaactggaaacatgtcagttctcctggttcttgattatacagtactcaagagttatcccagttatcccccttcctaaaggttttaacttatccacagttgtgcattgttctgaagattggtctcatatttattttgaaaacactttaaggaaacaatgttcttcgatgatttggggtttatctttttcccaagcttttatgacagtggttaaaaaacagaaatcctcatgtttattccattacctcccattcctaacctgtttccaatcaccaggaagattaggaaggcagattagattaaaaactgaaaattctttgcagatttaatgaaggttctcctccttataaatgaatgaaccagttatcatgcttttctgtggttttcctatcccaatagtgaatttctgagctatcctgtgtgttcagttatccacttacttgatagcaacttacgaccagattatatcagtcttggcatttattgaaattggtaaagtgatttaatacttgatagattgatattgggctaagatgcttctaggaactttcataaaagcaattatacttgtgcagctttatctatgaatatcaggtctctcaaggattttatgtatcaagataatatgtattgacttttttaaatgataaaatgaattctagttagagtctttccttggtatctgcagtggattggttccagaacaccatcccccaatattaaaatccacagatactcaagtcccttatttatataaaatagcacagtatttgcatataacctgtgcacatcctcccatatactttaatctccagatgattagatatgattgcatagcacttacgttgtgctatgtagttgttatattgttttttcatttgtactattttttatgatatttattggttttttaaattttctatccaaagttgtttgaatctaaggatacagagcctgaggatatggaaagctgactaaatatagtaacactgaagagtattcaaatgataactcataccagtaccaaaaacttgaagacttccttttaacattaaaaatacagtaactttttacgtgatttgttgaattcaacatatttggaaccagaataatcagaaacttcattcaaaacctatgcatctgaacttttttagtaaggtaatactcaggactgttctgattctaacagatccctgttaattacagatttatttgtcatattaggtcttttctttctcccatattcctaacccgtgtactagctccaactgttgtgaggtttgactctgaagactgagtagagtactattgttgtttttctttccttagtcagagtaatcagtttaaatgaagttgctcattgctgctaagaagcattaggcttcactgctagcaaaaatgaaaaactacaaatctgagtctttctttcaaagatgtttattgacataattaaagtaaaaaattgtttagagatatgcaaagaaggaaatatatatgatgtcacacaagctccagtaagctatccactaagcaggtgcctgtgcaactctgatttatggcattaacatatcaaattgaaggaaggattctagctcattttccattcaagcatcttcccactgcctctcttccagctaaataatcagagaagcagggcagtatatccctggagatccctgacttttatctccataccttaaattgttggtagatcctttggatgtagagataaaaattcattatgatgctagaggcattggggggtccatgcgaaaggttcaaacagcctattacattaatgcacatgtggaaagaacaaaaattttcaagctaagtcttaagttcaaatctataatttttttctcttcagttctgttctttgtatgataatccttaaaaaagtagttgtcttcttttcacatacacctctttaaagctatcatcttataataagtggaattggatgcttattgtgtgcccagcacagtttaggaaaaaaataattggcactgtttgtccagttactggagatcttcattttgatgctttgtactttgttccaggtctttaattctcagtccatcttttcctatgattgtgtacttcacatgatacattccatataaagagctcttttaaaatgactatttcaaaaatactgtacatttatatatagtattttttctcataaaaatgtgatagtttata

SEQ ID NO: 197380 - DNA, 4135 bp, Homo sapiens
  Payload ID: 18932
  Gene Name: ubiquitin specific peptidase 38
  Uniprot ID: Q8NB14
  ENST ID: ENST00000510377
  CDS Start-End: 535-3549
acttcaaaatccgggtcaaagggtgtcgcttcggtctcttctccccggctgatcccagcactctccgtgacagcgcctcctgactcagcccaggaccggcttcttctcacgacctgctggagactggacgcccacacctgacccggaactcggaggcgtgcttcctccacccgccggctagcagccccgggccctgagctcccgccgacgccgctggggggcccgacaggcccctcggcgctgatgctgagtgggatcgagggcccggggcggcggcggagtacgggcctctggcgccttaggccagccgcaggtgtcggttcttaggctctccaggctcgctagctcccgccccggcttggatgggtctccctgcgccataaatgtggctgctgaggcggcggtggccgtggcccgtcgcgctgctgctgcggcgctccaagttcatctccgccccggggctctcctgccccacctcggggctgccgccacccgctccttatcccctggccctggccttgcagcgtggcgacaatggacaagatcctggagggccttgtgagttcctcgcatcccctgcccctcaagcgggtgattgtgcggaaggtggtggaatcggcggagcactggctagacgaggcgcagtgcgaggccatgtttgacctgacgacccggctcatcctggagggccaggaccctttccagcggcaggtggggcaccaggtgctggaggcctacgcacgataccaccggccagagttcgagtccttcttcaacaagaccttcgtgttgggcctccttcatcagggctaccactctctggacaggaaggatgtagccatcctggactacattcacaacggcctgaagctgattatgagctgtccgtcggtgctggatctctttagcctcctgcaggtagaggtgttacggatggtgtgtgagaggccggagccgcagctctgtgcccgactgagcgaccttctgaccgactttgtgcaatgcatccccaaggggaaattgtccatcacgttctgtcaacagctggttcgaacgataggccatttccagtgcgtgtccacccaggaaagagagctgcgggaatatgtctcccaggtgacaaaagtgagtaacttgctgcagaacatctggaaggccgagcctgccacactactgccttccctgcaagaagtttttgcaagcatctcttccacagatgcatcatttgaaccttctgtagcattggcaagccttgtgcagcatattcctcttcagatgattacagttctcatcaggagccttactacggatccaaatgtaaaagatgcaagtatgacccaagccctttgcagaatgattgactggctatcctggccattggctcagcatgtggatacatgggtaattgcactcctgaaaggactggcagctgtccagaagtttactattttgatagatgttactttgctgaaaatagaactggtttttaatcgactttggtttcctcttgtgagacctggtgctcttgcagttctttctcacatgctgcttagctttcagcattctccagaggcgttccatttgattgttcctcatgtggttaatttggttcattctttcaaaaatgatggtctgccttcaagtacagccttcttagtacaattaacagaattgatacactgtatgatgtatcattattctggatttccagatctctatgaacctattctggaggcaataaaggattttcctaagcccagtgaagagaagattaagttaattctcaatcaaagtgcctggacttctcaatccaattctttggcgtcttgcttgtctagactttctggaaaatctgaaactgggaaaactggtcttattaacctaggaaatacatgttatatgaacagtgttatacaagccttgtttatggccacagatttcaggagacaagtattatctttaaatctaaatgggtgcaattcattaatgaaaaaattacagcatctttttgcctttctggcccatacacagagggaagcatacgcacctcggatattctttgaggcttccagacctccatggtttactcccagatcacagcaagactgttctgaatacctcagatttctccttgacaggctccatgaagaagaaaagatcttgaaagttcaggcctcacacaagccttctgaaattctggaatgcagtgaaacttctttacaggaagtagctagtaaagcagcagtactaacagagacccctcgtacaagtgacggtgagaagactttaatagaaaaaatgtttggaggaaaactacgaactcacatacgttgtttgaactgcaggagtacctcacaaaaagtggaagcctttacagatctttcgcttgccttttgtccttcctcttctttggaaaacatgtctgtccaagatccagcatcatcacccagtatacaagatggtggtctaatgcaagcctctgtacccggtccttcagaagaaccagtagtttataatccaacaacagctgccttcatctgtgactcacttgtgaatgaaaaaaccataggcagtcctcctaatgagttttactgttctgaaaacacttctgtccctaacgaatctaacaagattcttgttaataaagatgtacctcagaaaccaggaggtgaaaccacaccttcagtaactgacttactaaattattttttggctccagagattcttactggtgataaccaatattattgtgaaaactgtgcctctctgcaaaatgctgagaaaactatgcaaatcacggaggaacctgaataccttattcttactctcctgagattttcatatgatcagaagtatcatgtgagaaggaaaattttagacaatgtatcactgccactggttttggagttgccagttaaaagaattacttctttctcttcattgtcagaaagttggtctgtagatgttgacttcactgatcttagtgagaaccttgctaaaaaattaaagccttcagggactgatgaagcttcctgcacaaaattggtgccctatctattaagttccgttgtggttcactctggtatatcctctgaaagtgggcattactattcttatgccaggaatatcacaagtacagactcttcatatcagatgtaccaccagtctgaggctctggcattagcatcctcccagagtcatttactagggagagatagtcccagtgcagtttttgaacaggatttggaaaataaggaaatgtcaaaagaatggtttttatttaatgacagtagagtgacatttacttcatttcagtcagtccagaaaattacgagcaggtttccaaaggacacagcttatgtgcttttgtataaaaaacagcatagtactaatggtttaagtggtaataacccaaccagtggactctggataaatggagacccacctctacagaaagaacttatggatgctataacaaaagacaataaactatatttacaggtaagttggaaatacaagctttatttgttgaaaatattaaacaattgacacagttaaatgagtaccctcattttgaaatctaacatgagtttttattaaattctgaaatataggtctggatttacatgaagtattctcaacctgtataactaaattgcctttctaatattgtgacaatttaaatgaaaagtggcaattagatgtaatgcagaagactttatttgttccttacaaaagatggctcattctgaaatcatgccatacaaaatacagaaagtttacaaaagtggacatatcctccctcttcctctcagcctcacccaccagaggaaataactgctaaatgtggtatttatgccctcaagacttttgtgtaaatgttttaagggctgtttattgatatttaggtggataagattaaaaaacactaaaatgtagactatgtaaagaaaggatattcatattctttgaggatgtggttagtaaaaccaaggagataatagaacaattgtaaatcgaagccaaggaatggttttatatgagataaatttattcataaatatacttttttcaaggagttagtgattttattacttaaataaaggctaataaaaagttaaaattcttgctgaaa

SEQ ID NO: 197381 - DNA, 2177 bp, Homo sapiens
  Payload ID: 18933
  Gene Name: ubiquitin specific peptidase 39
  Uniprot ID: Q53GS9
  ENST ID: ENST00000323701
  CDS Start-End: 11-1708
ggtagtggagatgtccggccggtctaagcgggagtctcgcggttccactcgcgggaagcgagagtctgagtcgcggggcagctccggtcgcgtcaagcgggagcgagatcgggagcgggagcctgaggcggcgagctcccggggcagccctgtgcgcgtgaagcgggagttcgagccggcgagcgcgcgcgaggccccggcttctgttgtcccgtttgtgcgggtgaagcgggagcgcgaggtcgatgaggactcggagcctgagcgggaggtgcgagcaaagaatggccgagtggattctgaggaccggaggagccgccactgcccgtacctggacaccattaacaggagtgtgctggactttgactttgagaaactgtgttctatctccctctcacacatcaatgcttatgcctgtctggtgtgtggcaagtactttcaaggccggggtttgaagtctcacgcctacattcacagtgtccagtttagccaccatgttttcctcaacctccacaccctcaagttttactgccttccagacaactatgagatcatcgattcctcattggaggatatcacgtatgtgttgaagcccactttcacaaagcagcaaattgcaaacttggacaagcaagccaaattgtcccgggcatatgatggtaccacttacctgccgggtattgtgggactgaataacataaaggccaatgattatgccaacgctgtccttcaggctctatctaatgttcctcctctccggaactactttctggaagaagacaattataagaacatcaaacgtcctccaggggatatcatgttcttgttggtccagcgttttggagagctgatgagaaagctctggaaccctcgaaatttcaaggcacatgtgtctccccatgagatgcttcaggcagttgtactttgcagtaagaagacttttcagatcaccaaacaaggagatggcgttgactttctgtcttggtttctgaatgctctgcactcagctctggggggcacaaagaagaaaaagaagactattgtgactgatgttttccaggggtccatgaggatcttcactaaaaagcttccccatcctgatctgccagcagaagaaaaagagcagttgctccataatgacgagtaccaggagacaatggtggagtccacttttatgtacctgacgctggaccttcctactgcccccctctacaaggacgagaaggagcagctcatcattccccaagtgccactcttcaacatcctggctaagttcaatggcatcactgagaaggaatataagacttacaaggagaactttctgaagcgcttccagcttaccaagttgcctccatatctaatcttttgtatcaagagattcactaagaacaacttctttgttgagaagaatccaactattgtcaatttccctattacaaatgtggatctgagagaatacttgtctgaagaagtacaagcagtacacaagaataccacctatgacctcattgccaacatcgtgcatgacggcaagccctccgagggctcctaccggatccacgtgcttcatcatgggacaggcaaatggtatgaattacaagacctccaggtgactgacatccttccccagatgatcacactgtcagaggcttacattcagatttggaagaggcgagataatgatgaaaccaaccagcagggggcttgaaggaggcgtctagggctttgctcccaagggctgtggctgatgatggtaaataagaacacagaagctgtagctgaacacaggctggctggtgggcttcctaggccagcccagcttgtatgggttctggctacaccagagcaccaagagcccacttgcctgggatggccccacactgtcactcagctgttctttgatcatttttttctagattgatgctcctttctcccatgcattgagctcccatctagcttcagcagggcagaacccttctccagatgtgtgtaacttatgtcttgagtatctgggagtagttgaagaacagataattccttccaaacatcaagccttgggattcttggagcaagcagaaagccagtaacttcgctctgttagaggtggaggattttcctatggttccccccatttcctgatttgtatttttagatggattaaatagtctcctgttttt

SEQ ID NO: 197382 - DNA, 1946 bp, Homo sapiens
  Payload ID: 18933
  Gene Name: ubiquitin specific peptidase 39
  ENST ID: ENST00000409025
  CDS Start-End: 54-1664
gcgcgctcgagcgtgcttggcgcctgcgctggacgactcggccggtagtggagatgtccggccggtctaagcgggagtctcgcggttccactcgcgggaagcgagagtctgagtcgcggggcagctccggtcgcgtcaagcgggagcgagatcgggagcgggagcctgaggcggcgagctcccggggcagccctgtgcgcgtgaagcgggagttcgagccggcgagcgcgcgcgaggccccggcttctgttgtcccgtttgtgcgggtgaagcgggagcgcgaggtcgatgaggactcggagcctgagcgggaggtgcgagcaaagaatggccgagtggattctgaggaccggaggagccgccactgcccgtacctggacaccattaacaggagtgtgctggactttgactttgagaaactgtgttctatctccctctcacacatcaatgcttatgcctgtctggtgtgtggcaagtactttcaaggccggggtttgaagtctcacgcctacattcacagtgtccagtttagccaccatgttttcctcaacctccacaccctcaagttttactgccttccagacaactatgagatcatcgattcctcattggaggatatcacgtatgtgttgaagcccactttcacaaagcagcaaattgcaaacttggacaagcaagccaaattgtcccgggcatatgatggtaccacttacctgccgggtattgtgggactgaataacataaaggccaatgattatgccaacgctgtccttcaggctctatctaatgttcctcctctccggaactactttctggaagaagacaattataagaacatcaaacgtcctccaggggatatcatgttcttgttggtccagcgttttggagagctgatgagaaagctctggaaccctcgaaatttcaaggcacatgtgtctccccatgagatgcttcaggcagttgtactttgcagtaagaagacttttcagatcaccaaacaaggagatggcgttgactttctgtcttggtttctgaatgctctgcactcagctctggggggcacaaagaagaaaaagaagactattgtgactgatgttttccaggggtccatgaggatcttcactaaaaagcttccccatcctgatctgccagcagaagaaaaagagcagttgctccataatgacgagtaccaggagacaatggtggagtccacttttatgtacctgacgctggaccttcctactgcccccctctacaaggacgagaaggagcagctcatcattccccaagtgccactcttcaacatcctggctaagttcaatggcatcactgagaaggaatataagacttacaaggagaactttctgaagcgcttccagcttaccaagttgcctccatatctaatcttttgtatcaagagattcactaagaacaacttctttgttgagaagaatccaactattgtcaatttccctattacaaatgtggatctgagagaatacttgtctgaagaagtacaagcagtacacaagaataccacctatgacctcattgccaacatcgtgcatgacggcaagccctccgagggctcctaccggatccacgtgcttcatcatatttggaagaggcgagataatgatgaaaccaaccagcagggggcttgaaggaggcgtctagggctttgctcccaagggctgtggctgatgatgattgatgctcctttctcccatgcattgagctcccatctagcttcagcagggcagaacccttctccagatgtgtgtaacttatgtcttgagtatctgggagtagttgaagaacagataattccttccaaacatcaagccttgggattcttggagcaagcagaaagccagtaacttcgctctgttagaggtggaggattttcctatggttccccccatttcctgatttgtatttttaga

SEQ ID NO: 197383 - DNA, 2033 bp, Homo sapiens
  Payload ID: 18933
  Gene Name: ubiquitin specific peptidase 39
  Uniprot ID: Q53GS9
  ENST ID: ENST00000409766
  CDS Start-End: 3-1469
agatgtccggccggtctaagcgggagtctcgcggttccactcgcgggaagcgagagtctgagtcgcggggcagctccggtcgcgtcaagcgggagcgagatcgggagcgggagcctgaggcggcgagctcccggggcagccctgtgcgcgtgaagcgggagttcgagccggcgagcgcgcgcgaggccccggcttctgttgtcccgtttgtgcgggtgaagcgggagcgcgaggtcgatgaggactcggagcctgagcgggaggtgcgagcaaagaatggccgagtggattctgaggaccggaggagccgccactgcccgtacctggacaccattaacaggagtgtgctggactttgactttgagaaactgtgttctatctccctctcacacatcaatgcttatgcctgtctggtgtgtggcaagtactttcaaggccggggtttgaagtctcacgcctacattcacagtgtccagtttagccaccatgttttcctcaacctccacaccctcaagttttactgccttccagacaactatgagatcatcgattcctcattggaggatatcacgtatgtgttgaagcccactttcacaaagcagcaaattgcaaacttggacaagcaagccaaattgtcccgggcatatgatggtaccacttacctgccgggtattgtgggactgaataacataaaggccaatgattatgccaacgctgtccttcaggctctatctaatgttcctcctctccggaactactttctggaagaagacaattataagaacatcaaacgtcctccaggggatatcatgttcttgttggtccagcgttttggagagctgatgagaaagctctggaaccctcgaaatttcaaggcacatgtgtctccccatgagatgcttcaggcagttgtactttgcagtaagaagacttttcagatcaccaaacaaggagatggcgttgactttctgtcttggtttctgaatgctctgcactcagctctggggggcacaaagaagaaaaagaagactattgtgactgatgttttccaggggtccatgaggatcttcactaaaaagcttccccatcctgatctgccagcagaagaaaaagagcagttgctccataatgacgagtaccaggagacaatggtggagtccacttttatgtacctgacgctggaccttcctactgcccccctctacaaggacgagaaggagcagctcatcattccccaagtgccactcttcaacatcctggctaagttcaatggcatcactgagaaggaatataagacttacaaggagaactttctgaagcgcttccagcttaccaagttgcctccatatctaatcttttgtatcaagagattcactaagaacaacttctttgttgagaagaatccaactattgtcaatttccctattacgggacaggcaaatggtatgaattacaagacctccaggtgactgacatccttccccagatgatcacactgtcagaggcttacattcagatttggaagaggcgagataatgatgaaaccaaccagcagggggcttgaaggaggcgtctagggctttgctcccaagggctgtggctgatgatggtaaataagaacacagaagctgtagctgaacacaggctggctggtgggcttcctaggccagcccagcttgtatgggttctggctacaccagagcaccaagagcccacttgcctgggatggccccacactgtcactcagctgttctttgatcatttttttctagattgatgctcctttctcccatgcattgagctcccatctagcttcagcagggcagaacccttctccagatgtgtgtaacttatgtcttgagtatctgggagtagttgaagaacagataattccttccaaacatcaagccttgggattcttggagcaagcagaaagccagtaacttcgctctgttagaggtggaggattttcctatggttccccccatttcctgatttgtatttttagatggattaaatagtctcctgttttt

SEQ ID NO: 197384 - DNA, 2034 bp, Homo sapiens
  Payload ID: 18933
  Gene Name: ubiquitin specific peptidase 39
  Uniprot ID: Q53GS9
  ENST ID: ENST00000409470
  CDS Start-End: 28-1725
cgctggacgactcggccggtagtggagatgtccggccggtctaagcgggagtctcgcggttccactcgcgggaagcgagagtctgagtcgcggggcagctccggtcgcgtcaagcgggagcgagatcgggagcgggagcctgaggcggcgagctcccggggcagccctgtgcgcgtgaagcgggagttcgagccggcgagcgcgcgcgaggccccggcttctgttgtcccgtttgtgcgggtgaagcgggagcgcgaggtcgatgaggactcggagcctgagcgggaggtgcgagcaaagaatggccgagtggattctgaggaccggaggagccgccactgcccgtacctggacaccattaacaggagtgtgctggactttgactttgagaaactgtgttctatctccctctcacacatcaatgcttatgcctgtctggtgtgtggcaagtactttcaaggccggggtttgaagtctcacgcctacattcacagtgtccagtttagccaccatgttttcctcaacctccacaccctcaagttttactgccttccagacaactatgagatcatcgattcctcattggaggatatcacgtatgtgttgaagcccactttcacaaagcagcaaattgcaaacttggacaagcaagccaaattgtcccgggcatatgatggtaccacttacctgccgggtattgtgggactgaataacataaaggccaatgattatgccaacgctgtccttcaggctctatctaatgttcctcctctccggaactactttctggaagaagacaattataagaacatcaaacgtcctccaggggatatcatgttcttgttggtccagcgttttggagagctgatgagaaagctctggaaccctcgaaatttcaaggcacatgtgtctccccatgagatgcttcaggcagttgtactttgcagtaagaagacttttcagatcaccaaacaaggagatggcgttgactttctgtcttggtttctgaatgctctgcactcagctctggggggcacaaagaagaaaaagaagactattgtgactgatgttttccaggggtccatgaggatcttcactaaaaagcttccccatcctgatctgccagcagaagaaaaagagcagttgctccataatgacgagtaccaggagacaatggtggagtccacttttatgtacctgacgctggaccttcctactgcccccctctacaaggacgagaaggagcagctcatcattccccaagtgccactcttcaacatcctggctaagttcaatggcatcactgagaaggaatataagacttacaaggagaactttctgaagcgcttccagcttaccaagttgcctccatatctaatcttttgtatcaagagattcactaagaacaacttctttgttgagaagaatccaactattgtcaatttccctattacaaatgtggatctgagagaatacttgtctgaagaagtacaagcagtacacaagaataccacctatgacctcattgccaacatcgtgcatgacggcaagccctccgagggctcctaccggatccacgtgcttcatcatgggacaggcaaatggtatgaattacaagacctccaggtgactgacatccttccccagatgatcacactgtcagaggcttacattcagatttggaagaggcgagataatgatgaaaccaaccagcagggggcttgaaggaggcgtctagggctttgctcccaagggctgtggctgatgatgattgatgctcctttctcccatgcattgagctcccatctagcttcagcagggcagaacccttctccagatgtgtgtaacttatgtcttgagtatctgggagtagttgaagaacagataattccttccaaacatcaagccttgggattcttggagcaagcagaaagccagtaacttcgctctgttagaggtggaggattttcctatggttccccccatttcctgatttgtatttttagatggattaaatagtctcctgtttttaaa

SEQ ID NO: 197385 - DNA, 561 bp, Homo sapiens
  Payload ID: 18933
  Gene Name: ubiquitin specific peptidase 39
  ENST ID: ENST00000442708
  CDS Start-End: 222-561
gaggccccggcctggccaagcgatgcagcgcacggagttttcgggtctggtcgggtcgggtggagtagggtatgcttgacttccaccccccggacggagggcttttgtttttgtttttttttgtttgttttttcgtaacatatcaataggaaacaaggacttcggcttacagctgataccagaaccttcagaaaaatgcaaatcatctataacacaactcgatgcttacggcggtgccttcccatcttttttctgcaaagaatggccgagtggattctgaggaccggaggagccgccactgcccgtacctggacaccattaacagcttttcacccttccctacaggccggggtttgaagtctcacgcctacattcacagtgtccagtttagccaccatgttttcctcaacctccacaccctcaagttttactgccttccagacaactatgagatcatcgattcctcattggaggatatcacgtatgtgttgaagcccactttcacaaagcagcaaattgcaaacttggacaagcaagccaaattgtcccgggcatatgatg

SEQ ID NO: 197386 - DNA, 2086 bp, Homo sapiens
  Payload ID: 18933
  Gene Name: ubiquitin specific peptidase 39
  Uniprot ID: Q53GS9
  ENST ID: ENST00000450066
  CDS Start-End: 224-1612
gggaggccccggcctggccaagcgatgcagcgcacggagttttcgggtctggtcgggtcgggtggagtagggtatgcttgacttccaccccccggacggagggcttttgtttttgtttttttttgtttgttttttcgtaacatatcaataggaaacaaggacttcggcttacagctgataccagaaccttcagaaaaatgcaaatcatctataacacaactcgatgcttacggcggtgccttcccatcttttttctgcaaagaatggccgagtggattctgaggaccggaggagccgccactgcccgtacctggacaccattaacagcttttcacccttccctacaggccggggtttgaagtctcacgcctacattcacagtgtccagtttagccaccatgttttcctcaacctccacaccctcaagttttactgccttccagacaactatgagatcatcgattcctcattggaggatatcacgtatgtgttgaagcccactttcacaaagcagcaaattgcaaacttggacaagcaagccaaattgtcccgggcatatgatggtaccacttacctgccgggtattgtgggactgaataacataaaggccaatgattatgccaacgctgtccttcaggctctatctaatgttcctcctctccggaactactttctggaagaagacaattataagaacatcaaacgtcctccaggggatatcatgttcttgttggtccagcgttttggagagctgatgagaaagctctggaaccctcgaaatttcaaggcacatgtgtctccccatgagatgcttcaggcagttgtactttgcagtaagaagacttttcagatcaccaaacaaggagatggcgttgactttctgtcttggtttctgaatgctctgcactcagctctggggggcacaaagaagaaaaagaagactattgtgactgatgttttccaggggtccatgaggatcttcactaaaaagcttccccatcctgatctgccagcagaagaaaaagagcagttgctccataatgacgagtaccaggagacaatggtggagtccacttttatgtacctgacgctggaccttcctactgcccccctctacaaggacgagaaggagcagctcatcattccccaagtgccactcttcaacatcctggctaagttcaatggcatcactgagaaggaatataagacttacaaggagaactttctgaagcgcttccagcttaccaagttgcctccatatctaatcttttgtatcaagagattcactaagaacaacttctttgttgagaagaatccaactattgtcaatttccctattacaaatgtggatctgagagaatacttgtctgaagaagtacaagcagtacacaagaataccacctatgacctcattgccaacatcgtgcatgacggcaagccctccgagggctcctaccggatccacgtgcttcatcatgggacaggcaaatggtatgaattacaagacctccaggtgactgacatccttccccagatgatcacactgtcagaggcttacattcagatttggaagaggcgagataatgatgaaaccaaccagcagggggcttgaaggaggcgtctagggctttgctcccaagggctgtggctgatgatggtaaataagaacacagaagctgtagctgaacacaggctggctggtgggcttcctaggccagcccagcttgtatgggttctggctacaccagagcaccaagagcccacttgcctgggatggccccacactgtcactcagctgttctttgatcatttttttctagattgatgctcctttctcccatgcattgagctcccatctagcttcagcagggcagaacccttctccagatgtgtgtaacttatgtcttgagtatctgggagtagttgaagaacagataattccttccaaacatcaagccttgggattcttggagcaagcagaaagccagtaacttcgctctgttagaggtggaggattttcctatggttccccccatttcctgatttgtatttttagatggattaaatagtctcctgtttttaaacc

SEQ ID NO: 197387 - DNA, 610 bp, Homo sapiens
  Payload ID: 18933
  Gene Name: ubiquitin specific peptidase 39
  ENST ID: ENST00000448971
  CDS Start-End: 224-610
gggaggccccggcctggccaagcgatgcagcgcacggagttttcgggtctggtcgggtcgggtggagtagggtatgcttgacttccaccccccggacggagggcttttgtttttgtttttttttgtttgttttttcgtaacatatcaataggaaacaaggacttcggcttacagctgataccagaaccttcagaaaaatgcaaatcatctataacacaactcgatgcttacggcggtgccttcccatcttttttctgcaaagaatggccgagtggattctgaggaccggaggagccgccactgcccgtacctggacaccattaacaggagtgtgctggactttgactttgagaaactgtgttctatctccctctcacacatcaatgcttatgcctgtctggtgtgtggcaagtactttcaaggccggggtttgaagtctcacgcctacattcacagtgtccagtttagccaccatgttttcctcaacctccacaccctcaagttttactgccttccagacaactatgagatcatcgattcctcattggaggatatcacgtatgtgttgaagcccactttcacaaagcagcaaattgcaaacttggacaag

SEQ ID NO: 197388 - DNA, 751 bp, Homo sapiens
  Payload ID: 18933
  Gene Name: ubiquitin specific peptidase 39
  ENST ID: ENST00000458268
  CDS Start-End: 10-474
gtagtggagatgtccggccggtctaagcgggagtctcgcggttccactcgcgggaagcgagagtctgagtcgcggggcagctccggtcgcgtcaagcgggagcgagatcgggagcgggagcctgaggcggcgagctcccggggcagccctgtgcgcgtgaagcgggagttcgagccggcgagcgcgcgcgaggccccggcttctgttgtcccgtttgtgcgggtgaagcgggagcgcgaggtcgatgaggactcggagcctgagcgggaggtgcgagcaaagaatggccgagtggattctgaggaccggaggagccgccactgcccgtacctggacaccattaacaggagtgtgctggactttgactttgagaaactgtgttctatctccctctcacacatcaatgcttatgcctgtctggtgtgtggcaagtactttcaagcttttcacccttccctacaggccggggtttgaagtctcacgcctacattcacagtgtccagtttagccaccatgttttcctcaacctccacaccctcaagttttactgccttccagacaactatgagatcatcgattcctcattggaggatatcacgtatgtgttgaagcccactttcacaaagcagcaaattgcaaacttggacaagcaagccaaattgtcccgggcatatgatggtaccacttacctgccgggtattgtgggactgaataacataaaggccaatgattatgccaacgctgtccttca

SEQ ID NO: 197389 - DNA, 338 bp, Homo sapiens
  Payload ID: 18933
  Gene Name: ubiquitin specific peptidase 39
  ENST ID: ENST00000467885
  CDS Start-End: 1-186
tatgtgttgaagcccactttcacaaagcagcaaattgcaaacttggacaagcaagccaaattgtcccgggcatatgatggtaccacttacctgccgggtattgtgggactgaataacataaaggccaatgattatgccaacgctgtccttcaggagatggcgttgactttctgtcttggtttctgaatgctctgcactcagctctggggggcacaaagaagaaaaagaagactattgtgactgatgttttccaggggtccatgaggatcttcactaaaaagcttccccatcctgatctgccagcagaagaaaaagagcagttgctccataatgacgag

SEQ ID NO: 197390 - DNA, 2161 bp, Homo sapiens
  Payload ID: 18933
  Gene Name: ubiquitin specific peptidase 39
  ENST ID: ENST00000613444
  CDS Start-End: 224-1687
gggaggccccggcctggccaagcgatgcagcgcacggagttttcgggtctggtcgggtcgggtggagtagggtatgcttgacttccaccccccggacggagggcttttgtttttgtttttttttgtttgttttttcgtaacatatcaataggaaacaaggacttcggcttacagctgataccagaaccttcagaaaaatgcaaatcatctataacacaactcgatgcttacggcggtgccttcccatcttttttctgcaaagaatggccgagtggattctgaggaccggaggagccgccactgcccgtacctggacaccattaacaggagtgtgctggactttgactttgagaaactgtgttctatctccctctcacacatcaatgcttatgcctgtctggtgtgtggcaagtactttcaaggccggggtttgaagtctcacgcctacattcacagtgtccagtttagccaccatgttttcctcaacctccacaccctcaagttttactgccttccagacaactatgagatcatcgattcctcattggaggatatcacgtatgtgttgaagcccactttcacaaagcagcaaattgcaaacttggacaagcaagccaaattgtcccgggcatatgatggtaccacttacctgccgggtattgtgggactgaataacataaaggccaatgattatgccaacgctgtccttcaggctctatctaatgttcctcctctccggaactactttctggaagaagacaattataagaacatcaaacgtcctccaggggatatcatgttcttgttggtccagcgttttggagagctgatgagaaagctctggaaccctcgaaatttcaaggcacatgtgtctccccatgagatgcttcaggcagttgtactttgcagtaagaagacttttcagatcaccaaacaaggagatggcgttgactttctgtcttggtttctgaatgctctgcactcagctctggggggcacaaagaagaaaaagaagactattgtgactgatgttttccaggggtccatgaggatcttcactaaaaagcttccccatcctgatctgccagcagaagaaaaagagcagttgctccataatgacgagtaccaggagacaatggtggagtccacttttatgtacctgacgctggaccttcctactgcccccctctacaaggacgagaaggagcagctcatcattccccaagtgccactcttcaacatcctggctaagttcaatggcatcactgagaaggaatataagacttacaaggagaactttctgaagcgcttccagcttaccaagttgcctccatatctaatcttttgtatcaagagattcactaagaacaacttctttgttgagaagaatccaactattgtcaatttccctattacaaatgtggatctgagagaatacttgtctgaagaagtacaagcagtacacaagaataccacctatgacctcattgccaacatcgtgcatgacggcaagccctccgagggctcctaccggatccacgtgcttcatcatgggacaggcaaatggtatgaattacaagacctccaggtgactgacatccttccccagatgatcacactgtcagaggcttacattcagatttggaagaggcgagataatgatgaaaccaaccagcagggggcttgaaggaggcgtctagggctttgctcccaagggctgtggctgatgatggtaaataagaacacagaagctgtagctgaacacaggctggctggtgggcttcctaggccagcccagcttgtatgggttctggctacaccagagcaccaagagcccacttgcctgggatggccccacactgtcactcagctgttctttgatcatttttttctagattgatgctcctttctcccatgcattgagctcccatctagcttcagcagggcagaacccttctccagatgtgtgtaacttatgtcttgagtatctgggagtagttgaagaacagataattccttccaaacatcaagccttgggattcttggagcaagcagaaagccagtaacttcgctctgttagaggtggaggattttcctatggttccccccatttcctgatttgtatttttagatggattaaatagtctcctgtttttaaacc

SEQ ID NO: 197391 - DNA, 3126 bp, Homo sapiens
  Payload ID: 18934
  Gene Name: ubiquitin specific peptidase 4 (proto-oncogene)
  Uniprot ID: Q13107
  ENST ID: ENST00000265560
  CDS Start-End: 48-2939
cgcgcggggcggatgtccgggccggctgggccggggccgcggaggagatggcggaaggtggaggctgccgtgagcgaccggatgcggagactcagaagtccgagcttggacccttaatgaggaccacactccaacgcggggcgcagtggtatcttattgacagccggtggttcaagcagtggaagaagtatgtgggctttgacagctgggacatgtacaatgtgggtgaacataacctatttcctggcccaatagacaactctgggctattttcagatcctgagagtcagaccttgaaagaacacttaattgatgaattggactatgtattggtccctaccgaggcgtggaataaactactaaactggtacggctgtgtagaaggccagcaacccatcgtcagaaaagttgtggagcatggcctgtttgtcaagcactgcaaagtcgaggtgtatttgctggaactgaagctctgtgagaacagtgaccccaccaatgtgctgagttgccatttcagcaaggcagacaccattgcaaccatcgagaaagagatgcggaagctattcaacatccctgcggagcgtgaaacacggctctggaacaaatacatgagcaacacctacgagcagttgagcaagctagacaacactgtccaggatgctgggctataccagggtcaggtgctagtaattgagcctcaaaatgaagatggcacatggcccaggcagaccttgcagtcaaaatcaagcactgcgcctagcagaaattttactacctctccaaaatcatcagcaagtccctattcctcagtgtctgcctctctcattgcaaatggtgatagcactagcacctgtgggatgcacagttccggtgtcagcaggggtggatctggcttttctgcttcgtataattgtcaggagccaccatcctctcatatacaacctgggctctgtggacttggaaacctgggaaacacctgcttcatgaactccgctttgcagtgtttgagcaacactgcaccactgactgactactttctcaaagatgagtatgaagccgaaatcaacagagacaaccctctggggatgaaaggggaaattgcagaagcctatgctgaactcattaagcagatgtggtctggaagggacgcccatgtggcacctcgcatgttcaaaactcaagtaggacgttttgctcctcaattttctggctaccagcaacaagattctcaggagctgctggcctttcttctagatggattgcatgaagatctgaaccgggtaaagaaaaagccctacttggagctgaaggatgccaatgggcggccagatgcggtggtggcaaaggaagcctgggagaatcacaggttgaggaatgattctgtgattgtggatactttccatggcctcttcaaatctactttggtttgcccagaatgtgctaaggtttctgtgacctttgacccattttgctatctaacgctgccactgcccttgaagaaagatcgagttatggaggttttcctggttcctgctgaccctcactgcagacctactcagtaccgtgtgactgtgccgctgatgggggctgtgtccgacctgtgcgaggctctctccaggctgtctggcattgctgcagaaaatatggtggtcgcagatgtgtataatcaccgattccacaaaattttccaaatggatgaaggtttaaaccacatcatgcctcgggatgacattttcgtgtacgaggtctgcagcacttccgtggatggctcggaatgtgtcacgcttccagtctacttcagggagaggaagtccaggccatcaagcacttcctccgcatcagcgctatatgggcagccactattgctttctgtccccaagcacaagttaacccttgagtctttgtaccaggctgtttgtgatcgtatcagccgctatgtgaaacagcctttacctgatgagtttggcagctcacccttggagccaggggcctgcaatggctccaggaacagctgtgaaggagaagatgaggaagaaatggagcatcaggaagaaggcaaagagcagctttcagaaacagaaggcagtggggaagatgagccaggaaatgaccccagtgagaccacccaaaagaagatcaaaggccagccctgcccaaaaaggctttttaccttcagtcttgtgaactcctatggaacagctgacataaattcacttgcagctgatggaaaactacttaaactcaactctcgatctacactggccatggattgggacagtgaaactcggagactttactatgatgagcaagaatctgaggcctacgagaagcatgtgagcatgttgcagcctcagaagaagaagaagaccacagtggccctgagagactgcatcgagctcttcaccaccatggagacccttggggagcatgacccctggtactgtcccaactgtaagaagcatcaacaggccacaaaaaagtttgacctatggtccttgcccaagatcctggtggtccacctcaaacgtttctcctacaacagatactggagggataagctcgacacagtcgtagaattcccaatcagagggctgaacatgtccgagtttgtctgtaacctgtcagcaaggccttatgtgtacgacctcattgccgtgtccaatcattatggagccatgggggttggccactacactgcatatgcgaagaacaaactgaatggtaaatggtattactttgatgatagcaacgtgtccctggcctctgaggatcagatagtgactaaagcagcttatgtgctattttaccaacgtcgagatgatgaattttataagacaccttcacttagcagttctggttcctctgatggagggacacgaccaagcagctctcagcagggctttggggatgatgaggcttgcagcatggacaccaactaatgctgactccacgatcctgccaccctgtagcgccagtgtaatcccccaggagaacatctttgacactctgcagactgctagtgttctgtctaaaaaccagacaaggaaatacccttcttttatgagcagaaggaaacaaaaaaaaaaaaagaagaccgtttacctagaagaagctatgtcaagaggc

SEQ ID NO: 197392 - DNA, 3222 bp, Homo sapiens
  Payload ID: 18934
  Gene Name: ubiquitin specific peptidase 4 (proto-oncogene)
  Uniprot ID: Q13107
  ENST ID: ENST00000351842
  CDS Start-End: 10-2760
gcggaggagatggcggaaggtggaggctgccgtgagcgaccggatgcggagactcagaagtccgagcttggacccttaatgaggaccacactccaacgcggggcgcagtggtatcttattgacagccggtggttcaagcagtggaagaagtatgtgggctttgacagctgggacatgtacaatgtgggtgaacataacctatttcctggcccaatagacaactctgggctattttcagatcctgagagtcagaccttgaaagaacacttaattgatgaattggactatgtattggtccctaccgaggcgtggaataaactactaaactggtacggctgtgtagaaggccagcaacccatcgtcagaaaagttgtggagcatggcctgtttgtcaagcactgcaaagtcgaggtgtatttgctggaactgaagctctgtgagaacagtgaccccaccaatgtgctgagttgccatttcagcaaggcagacaccattgcaaccatcgagaaagagatgcggaagctattcaacatccctgcggagcgtgaaacacggctctggaacaaatacatgagcaacacctacgagcagttgagcaagctagacaacactgtccaggatgctgggctataccagggtcaggtgctagtaattgagcctcaaaatgaagatggcacatggcccaggcagaccttgcagtcaaatggatctggcttttctgcttcgtataattgtcaggagccaccatcctctcatatacaacctgggctctgtggacttggaaacctgggaaacacctgcttcatgaactccgctttgcagtgtttgagcaacactgcaccactgactgactactttctcaaagatgagtatgaagccgaaatcaacagagacaaccctctggggatgaaaggggaaattgcagaagcctatgctgaactcattaagcagatgtggtctggaagggacgcccatgtggcacctcgcatgttcaaaactcaagtaggacgttttgctcctcaattttctggctaccagcaacaagattctcaggagctgctggcctttcttctagatggattgcatgaagatctgaaccgggtaaagaaaaagccctacttggagctgaaggatgccaatgggcggccagatgcggtggtggcaaaggaagcctgggagaatcacaggttgaggaatgattctgtgattgtggatactttccatggcctcttcaaatctactttggtttgcccagaatgtgctaaggtttctgtgacctttgacccattttgctatctaacgctgccactgcccttgaagaaagatcgagttatggaggttttcctggttcctgctgaccctcactgcagacctactcagtaccgtgtgactgtgccgctgatgggggctgtgtccgacctgtgcgaggctctctccaggctgtctggcattgctgcagaaaatatggtggtcgcagatgtgtataatcaccgattccacaaaattttccaaatggatgaaggtttaaaccacatcatgcctcgggatgacattttcgtgtacgaggtctgcagcacttccgtggatggctcggaatgtgtcacgcttccagtctacttcagggagaggaagtccaggccatcaagcacttcctccgcatcagcgctatatgggcagccactattgctttctgtccccaagcacaagttaacccttgagtctttgtaccaggctgtttgtgatcgtatcagccgctatgtgaaacagcctttacctgatgagtttggcagctcacccttggagccaggggcctgcaatggctccaggaacagctgtgaaggagaagatgaggaagaaatggagcatcaggaagaaggcaaagagcagctttcagaaacagaaggcagtggggaagatgagccaggaaatgaccccagtgagaccacccaaaagaagatcaaaggccagccctgcccaaaaaggctttttaccttcagtcttgtgaactcctatggaacagctgacataaattcacttgcagctgatggaaaactacttaaactcaactctcgatctacactggccatggattgggacagtgaaactcggagactttactatgatgagcaagaatctgaggcctacgagaagcatgtgagcatgttgcagcctcagaagaagaagaagaccacagtggccctgagagactgcatcgagctcttcaccaccatggagacccttggggagcatgacccctggtactgtcccaactgtaagaagcatcaacaggccacaaaaaagtttgacctatggtccttgcccaagatcctggtggtccacctcaaacgtttctcctacaacagatactggagggataagctcgacacagtcgtagaattcccaatcagagggctgaacatgtccgagtttgtctgtaacctgtcagcaaggccttatgtgtacgacctcattgccgtgtccaatcattatggagccatgggggttggccactacactgcatatgcgaagaacaaactgaatggtaaatggtattactttgatgatagcaacgtgtccctggcctctgaggatcagatagtgactaaagcagcttatgtgctattttaccaacgtcgagatgatgaattttataagacaccttcacttagcagttctggttcctctgatggagggacacgaccaagcagctctcagcagggctttggggatgatgaggcttgcagcatggacaccaactaatgctgactccacgatcctgccaccctgtagcgccagtgtaatcccccaggagaacatctttgacactctgcagactgctagtgttctgtctaaaaaccagacaaggaaatacccttcttttatgagcagaaggaaacaaaaaaaaaaaaagaagaccgtttacctagaagaagctatgtcaagaggctgaattatttttatttttaaacaggtggtgagaaatttctgtgaaacctgtgaagctgaaaagggggtgggatgggggtactcaatggagtatgtctgatggatcccgaagaatggagaggaacacaggcgctgagtatggagcagcctggagacccaccccacctgcagggctgccctgagcgcctggatttctggttctgatgccaatactagtcaccccaagtagtctgctcacagtaacccaaacctcaagtaaactcccctttccctcgc

SEQ ID NO: 197393 - DNA, 2141 bp, Homo sapiens
  Payload ID: 18934
  Gene Name: ubiquitin specific peptidase 4 (proto-oncogene)
  ENST ID: ENST00000431357
  CDS Start-End: 1-1864
tccaaaatcatcagcaagtccctattcctcagtgtctgcctctctcattgcaaatggtgatagcactagcacctgtgggatgcacagttccggtgtcagcaggggtggatctggcttttctgcttcgtataattgtcaggagccaccatcctctcatatacaacctgggctctgtggacttggaaacctgggaaacacctgcttcatgaactccgctttgcagtgtttgagcaacactgcaccactgactgactactttctcaaagatgagtatgaagccgaaatcaacagagacaaccctctggggatgaaaggggaaattgcagaagcctatgctgaactcattaagcagatgtggtctggaagggacgcccatgtggcacctcgcatgttcaaaactcaagtaggacgttttgctcctcaattttctggctaccagcaacaagattctcaggagctgctggcctttcttctagatggattgcatgaagatctgaaccgggtggtggcaaaggaagcctgggagaatcacaggttgaggaatgattctgtgattgtggatactttccatggcctcttcaaatctactttggtttgcccagaatgtgctaaggtttctgtgacctttgacccattttgctatctaacgctgccactgcccttgaagaaagatcgagttatggaggttttcctggttcctgctgaccctcactgcagacctactcagtaccgtgtgactgtgccgctgatgggggctgtgtccgacctgtgcgaggctctctccaggctgtctggcattgctgcagaaaatatggtggtcgcagatgtgtataatcaccgattccacaaaattttccaaatggatgaaggtttaaaccacatcatgcctcgggatgacattttcgtgtacgaggtctgcagcacttccgtggatggctcggaatgtgtcacgcttccagtctacttcagggagaggaagtccaggccatcaagcacttcctccgcatcagcgctatatgggcagccactattgctttctgtccccaagcacaagttaacccttgagtctttgtaccaggctgtttgtgatcgtatcagccgctatgtgaaacagcctttacctgatgagtttggcagctcacccttggagccaggggcctgcaatggctccaggaacagctgtgaaggagaagatgaggaagaaatggagcatcaggaagaaggcaaagagcagctttcagaaacagaaggcagtggggaagatgagccaggaaatgaccccagtgagaccacccaaaagaagatcaaaggccagccctgcccaaaaaggctttttaccttcagtcttgtgaactcctatggaacagctgacataaattcacttgcagctgatggaaaactacttaaactcaactctcgatctacactggccatggattgggacagtgaaactcggagactttactatgatgagcaagaatctgaggcctacgagaagcatgtgagcatgttgcagcctcagaagaagaagaagaccacagtggccctgagagactgcatcgagctcttcaccaccatggagacccttggggagcatgacccctggtactgtcccaactgtaagaagcatcaacaggccacaaaaaagtttgacctatggtccttgcccaagatcctggtggtccacctcaaacgtttctcctacaacagatactggagggataagctcgacacagtcgtagaattcccaatcagagggctgaacatgtccgagtttgtctgtaacctgtcagcaaggccttatgtgtacgacctcattgccgtgtccaatcattatggagccatgggggttggccactactaaagcagcttatgtgctattttaccaacgtcgagatgatgaattttataagacaccttcacttagcagttctggttcctctgatggagggacacgaccaagcagctctcagcagggctttggggatgatgaggcttgcagcatggacaccaactaatgctgactccacgatcctgccaccctgtagcgccagtgtaatcccccaggagaacatctttgacactctgcagactgctagtgttctgtctaaaaaccagacaaggaaatacccttcttttat

SEQ ID NO: 197394 - DNA, 1536 bp, Homo sapiens
  Payload ID: 18934
  Gene Name: ubiquitin specific peptidase 4 (proto-oncogene)
  Uniprot ID: Q13107
  ENST ID: ENST00000416417
  CDS Start-End: 13-954
gccgcggaggagatggcggaaggtggaggctgccgtgagcgaccggatgcggagactcagaagtccgagcttggacccttaatgaggaccacactccaacgcggggcgcagtggtatcttattgacagccggtggttcaagcagtggaagaagtatgtgggctttgacagctgggacatgtacaatgtgggtgaacataacctatttcctggcccaatagacaactctgggctattttcagatcctgagagtcagaccttgaaagaacacttaattgatgaattggactatgtattggtccctaccgaggcgtggaataaactactaaactggtacggctgtgtagaaggccagcaacccatcgtcagaaaagttgtggagcatggcctgtttgtcaagcactgcaaagtcgaggtgtatttgctggaactgaagctctgtgagaacagtgaccccaccaatgtgctgagttgccatttcagcaaggcagacaccattgcaaccatcgagaaagagatgcggaagctattcaacatccctgcggagcgtgaaacacggctctggaacaaatacatgagcaacacctacgagcagttgagcaagctagacaacactgtccaggatgctgggctataccagggtcaggtgctagtaattgagcctcaaaatgaagatggcacatggcccaggcagaccttgcagtcaaaagtttcgttctttttgcccaggctggagtgcaatggcgcgatcttggctcactgcaacttctgcctcccgggttcaagcaattctcctgcctcagcttcccgagtagcgccatcacatctggctaatttttttttttttgagatggagtctcactctgtcaccaagctggagtgcggtggtgcagtctcggcttactcccgggttcaagtgatgcttctgccccagcctcccgagtggctgggatgacaggcgcccgccaccatgtccagataatttttgtatttttagtagagatgtggtttcactgtgtcttgaactcctgacctcatggccaggctggtcttgaattcctgaccttgtgatcgtgacctcatgatccgccagcctcggcctcccaaagtgctgggattacaagggtgagccacctcacccagcctaattttgtatttttagtagtgacggggtttctccatgttggtcaggctggtctcaaactcctgacctcaggtgatccgtctgcctcggcctcccaaagtgctgagattacaggcatgagccaccacgcgcgacctggctaatttcttttgcattttagtagagacagggtttcactgtgttgcccaggctggtctcgaactcctgagctcaggcaatctgcctgcctcagcctcccaaagtactaggattacaggcacgagccactgcgcctggtcagccttgtggtttttcacactgaaagggtatgtggtggtgtggactgatgtgacaggaagaccagttaatttgtggactctcacttaaataaagtttaccttgaagtagtatgaa

SEQ ID NO: 197395 - DNA, 1454 bp, Homo sapiens
  Payload ID: 18934
  Gene Name: ubiquitin specific peptidase 4 (proto-oncogene)
  ENST ID: ENST00000415188
  CDS Start-End: 13-1104
gccgcggaggagatggcggaaggtggaggctgccgtgagcgaccggatgcggagactcagaagtccgagcttggacccttaatgaggaccacactccaacgcggggcgcagtggtatcttattgacagccggtggttcaagcagtggaagaagtatgtgggctttgacagctgggacatgtacaatgtgggtgaacataacctatttcctggcccaatagacaactctgggctattttcagatcctgagagtcagaccttgaaagaacacttaattgatgaattggactatgtattggtccctaccgaggcgtggaataaactactaaactggtacggctgtgtagaaggccagcaacccatcgtcagaaaagttgtggagcatggcctgtttgtcaagcactgcaaagtcgaggtgtatttgctggaactgaagctctgtgagaacagtgaccccaccaatgtgctgagttgccatttcagcaaggcagacaccattgcaaccatcgagaaagagatgcggaagctattcaacatccctgcggagcgtgaaacacggctctggaacaaatacatgagcaacacctacgagcagttgagcaagctagacaacactgtccaggatgctgggctataccagggtcaggtgctagtaattgagcctcaaaatgaagatggcacatggcccaggcagaccttgcagtcaaaggggccccaggagatgttgacccagcagggcatggcgctgcagaactacgacaacaagctggtcaaatgcatagaggagctatgccagaagcaggaggagctgtgctggcagatccagcaggaggaggacaagaaacagcggctgcagaatgaggtgaggcagctgacagagaagctggcctgcgtcaacgagaagctggcccgcgtcaacgagaacctggcacgcaagattgcctcttgcagtaagttctaccagaccatcgcggagacggaggccacctacctcaagatgctggagagctcccagactttgctcagtgtcctgaagagggaagctgggaacctgaccaaggctacagcctcagaccagaaaagtagtggtggcagggacagctgaccagaccatgggcagggcctgcctctgtgcgcccctcaactcagccccagcaagtctgtccacagagcgtcttcttcatggcagcagctgccttctttcactgtctcaggtgctaagaggggcagctgccaacctccactggcatcagtgacaagcccggggcacagcctgtgggtcctggctttgtgctcacacaggctatggggagggtgggctctaggtcagctctgcaaggggcctgtctctgcggcacccacactcctgggctgccagggaggtcctggttgtagtctgagcaccatggaggtcccctcagccagcagaggcccagggcagggggcaggggttct

SEQ ID NO: 197396 - DNA, 5692 bp, Homo sapiens
  Payload ID: 18935
  Gene Name: ubiquitin specific peptidase 40
  Uniprot ID: Q9NVE5
  ENST ID: ENST00000251722
  CDS Start-End: 119-3826
actttctggagacccgccctcgccaacatggcggcgcccagttggggcgggttcgttcgcttcgcgttttggccagggcgggggtctgggctttaggcaggtagtatttagtttcacaatgtttggggacctgtttgaagaggagtattccactgtgtctaataatcagtatggaaaagggaagaaattaaagactaaagctttggagccacctgctcctagagaattcaccaatttaagcggaatcagaaatcagggtggaacctgttacctcaattcccttcttcagactcttcatttcacacctgaattcagagaagctctattttctcttggcccagaagagcttggtttgtttgaagataaggataaacccgatgcaaaggttcgaatcatccctttacagttacagcgcttgtttgctcagcttctgctcttagaccaggaagctgcatccacagcagacctcactgacagctttgggtggaccagtaatgaggaaatgaggcaacatgatgtgcaggaactgaatcgaatcctcttcagcgctttggaaacttctttagttgggacctccggtcatgacctcatctatcgtctgtaccatggaaccattgttaaccagattgtttgtaaagaatgtaagaacgttagcgagaggcaggaagacttcttagatctaacagtagcagtcaaaaatgtatccggtttggaagatgctctctggaacatgtatgtagaagaggaagtttttgattgtgacaacttgtaccactgtggaacttgtgacaggctggttaaagcagcaaagtcggccaaattacgtaagctgcctccttttcttactgtttcattactaagatttaattttgattttgtgaaatgcgaacgctacaaggaaactagctgttatacattccctctccggattaatctcaagcccttttgtgaacagagtgaattggatgacttagaatatatatatgacctcttctcagttattatacacaaaggtggctgctacggaggccattaccatgtatatattaaagatgttgatcatttgggaaactggcagtttcaagaggaaaaaagtaaaccagatgtgaatctgaaagatctccagagtgaagaagagattgatcatccactgatgattctaaaagcaatcttattagaggagaataatctaattcctgttgatcagctgggccagaaacttttgaaaaagataggaatatcttggaacaagaagtacagaaaacagcatggaccactgcggaagttcttacagctccattctcagatatttctactcagttcagatgaaagtacagttcgtctcttgaagaatagttctctccaggctgagtctgatttccaaaggaatgaccagcaaattttcaagatgcttcctccagaatccccaggtttaaacaatagcatctcctgtccccactggtttgatataaatgattctaaagtccagccaatcagggaaaaggatattgaacagcaatttcagggtaaagaaagtgcctacatgttgttttatcggaaatcccagttgcagagaccccctgaagctcgagctaatccaagatatggggttccatgtcatttactgaatgaaatggatgcagctaacattgaactgcaaaccaaaagggcagaatgtgattctgcaaacaatacttttgaattgcatcttcacctgggccctcagtatcatttcttcaatggggctctgcacccagtagtctctcaaacagaaagcgtgtgggatttgacctttgataaaagaaaaactttaggagatctccggcagtcaatatttcagctgttagaattttgggaaggagacatggttcttagtgttgcaaagcttgtaccagcaggacttcacatttaccagtcacttggcggggatgaactgacactgtgtgaaactgaaattgctgatggggaagacatctttgtgtggaatggggtggaggttggtggagtccacattcaaactggtattgactgcgaacctctacttttaaatgttcttcatctagacacaagcagtgatggagaaaagtgttgtcaggtgatagaatctccacatgtctttccagctaatgcagaagtgggcactgtcctcacagccttagcaatcccagcaggtgtcatcttcatcaacagtgctggatgtccaggtggggagggttggacggccatccccaaggaagacatgaggaagacgttcagggagcaagggctcagaaatggaagctcaattttaattcaggattctcatgatgataacagcttgttgaccaaggaagagaaatgggtcactagtatgaatgagattgactggctccacgttaaaaatttatgccagttagaatctgaagagaagcaagttaaaatatcagcaactgttaacacaatggtgtttgatattcgaattaaagccataaaggaattaaaattaatgaaggaactagctgacaacagctgtttgagacctattgatagaaatgggaagcttctttgtccagtgccggacagctatactttgaaggaagcagaattgaagatgggaagttcattgggactgtgtcttggaaaagcaccaagttcgtctcagttgttcctgttttttgcaatggggagtgacgttcaacctgggacagaaatggaaatcgtagtagaagaaacaatatctgtgagagattgtttaaagttaatgctgaagaaatctggcctacaaggagatgcctggcatttacgaaaaatggattggtgctatgaagctggagagcctttatgtgaagaagatgcaacactgaaagaacttctgatatgttctggagatactttgcttttaattgaaggacaacttcctcctctgggtttcctgaaggtgcccatctggtggtaccagcttcagggtccctcaggacactgggagagtcatcaggaccagaccaactgtacttcgtcttggggcagagtttggagagccacttccagccaaggtgcttctgggaacgagcctgcgcaagtttctctcctctacttgggagacatagagatctcagaagatgccacgctggcggagctgaagtctcaggccatgaccttgcctcctttcctggagttcggtgtcccgtccccagcccacctcagagcctggacggtggagaggaagcgcccaggcaggcttttacgaactgaccggcagccactcagggaatataaactaggacggagaattgagatctgcttagagccccttcagaaaggcgaaaacttgggcccccaggacgtgctgctgaggacacaggtgcgcatccctggtgagaggacctatgcccctgccctggacctggtgtggaacgcggcccagggtgggactgccggctccctgaggcagagagttgccgatttctatcgtcttcccgtggagaagattgaaattgccaaatactttcccgaaaagttcgagtggcttccgatatctagctggaaccaacaaataaccaagaggaaaaagaaaaaaaaacaagattatttgcaaggggcaccgtattacttgaaagacggagatactattggtgttaagaatctcctgattgacgacgatgatgatttcagtacaatcagagatgacactggaaaagaaaagcagaaacaacgggccctggggagaaggaaaagccaagaagccctccatgagcagagcagctacatcctctccagtgcagagacgcctgcccggccccgagccccggaaacttctctctccatccacgtggggagcttcagataaccgcgccgctgcacggctctactcccgatgaactctccggctgatgccacaaacgtgggtttcctgggcatggggactggctgcctggcgcctccaatcccaaatcctctgcttcctttgagcacagggacggctcctctgaggcctggccagtgcatgtagtcacttagctctgcaacacgtggcagccacgggggctggtgcagctctggatgtcgcccacccagctgccagtaggtgctgggctctctcacacagcacccggccccagctgcctttttttttcttttaaccagaaaatgcacaacgtgtgcgtgaaccgcaggtatggaggcagcggcatgccgttgctccgctgtgggaggtgtgtggggtcaggccagccactttcctccgtgttcagatgactctcgttcgccctgaccggcttctcacagtgtctcaggccactgcgccaccgcgctggtgctgagcagaagcgggcagaagtggggtctgctttcaggacttcatttcccccactcgttccggccccgcatgctccacgtctgccctttggtctgagttaaaactgcgatgctgaaaagtgcgagctctttccacgaggaggagccacacagggtggcctccgagggtgagtcgctctgctaagcaagggcagccgctgcacgtcagcccgcaggccaagggtccagcttatcctgggtgctctgtgatcagaaggtccttggatcccgaggactgcagctgctgccgtccacagcgcctcagcctctcttcctgtgtggaagcggggcaggcagggctgtggcagacaggcctggcatagcccaggttccaggtgtcctgggcagcctgaccggtttcctgagtagcctcaatgaaaacacctgagaaaaagaaaatgtaaactaaggaagggttttcccacttaatccaacccagatttctattcaacttaaaggatttaattggcatttgtgagaaataatagtacctgtgtcactgagttgattgatttgggacatagacggttgactttcccagacagcagcttagcggaaagcagcatcccgaagacggtgtcgcatgtcctgagcctgcttgtcacctgggcctcacggtttctcgtcagccccgtcactgatgggaagcagcactgaagtgtgagggcagaaaggacaccgctggagtcaggcgctcccctgcctgtgacccttttccaacaagctgatgctgagccagcggcctgctttgtccctcatactcctcccaacagtccaaacccctaccagacagaagccacgtcgcttctgcacacgtgtctgagagcgtctgccatagacgtctgtgcgtttccgtgaagcactgcgccctaaggacccaactctgactagcagctgcctcccactcccaaacactaaccccgctcaggagactcgcactgggtgtagactgcgtctttgcagagggagatgatagaggcttctgatgacgccagagctgtaagtgtcgtgacgagctgggcgcccagcccttcttaagctgttctgtttctgtggctttaactgacatatttctgtagcatctgccttcatctcatctcagcgtaatgaaatattaatgaaatcgctgaaaagctttgccttcgagaggccagaagcctcgcggaatgtctgcaagtccaaagacgcgtgtgggttgtgccctgaagtgccgtccagcaggcgcgtgcggccgggccggcctgtgcgtgtggcctttgccttcttccctttcttcctgttttctgtttttttaatttggggattgagaaagctgtacgattttgttaaagaaaaaaataaaccattttttaaagttgta

SEQ ID NO: 197397 - DNA, 1946 bp, Homo sapiens
  Payload ID: 18935
  Gene Name: ubiquitin specific peptidase 40
  Uniprot ID: Q9NVE5
  ENST ID: ENST00000409945
  CDS Start-End: 744-1235
ctccaatacctaatatttaaaaattaccttttggaaactgatttataggacatattttcttccaggtatcttacctttatattgcagaaatccttaaccagaaacaaacacttctgttttctaaatgaaacaccattctttctgattatccgattctcattttactcacgggtttgatctagttatattttttccagctttattttcaaaatttttccatttttttgtgaattttattgcgataccaattatgaaataaaatcttcagttctcatctctgtatcacctcttaccattagatttaatttagtcatggatgagcctaattattgatggtaataacaatctcaactttaaacttggaagaagctacttcttcatttatggattgatttggattatctggcttttaatctatataaacaacagctctttgaacaagtcatttttattaagtaggaaactagactttcatagcttccatttagcattgttacatagaaaacaggaagacaatatcttaagagtatggaaattgaaaatcaaacctaatcttagtgcatgtaatccttttgtctgaagtgcaactcatttttcttctttcttgatattcttgattttcaaagaaatactgatttcagcatttatttttcttagagagctaggaattaataaccttcatcatattatcaaaatttttttaagtgccggacagctatactttgaaggaagcagaattgaagatgggaagttcattgggactgtgtcttggaaaagcaccaagttcgtctcagttgttcctgttttttgcaatggggagtgacgttcaacctgggacagaaatggaaatcgtagtagaagaaacaatatctgtgagagattgtttaaagttaatgctgaagaaatctggcctacaaggagatgcctggcatttacgaaaaatggattggtgctatgaagctggagagcctttatgtgaagaagatgcaacactgaaagaacttctgatatgttctggagatactttgcttttaattgaaggacaacttcctcctctgggtttcctgaaggtgcccatctggtggtaccagcttcagggtccctcaggacactgggagagtcatcaggaccagaccaactgtacttcgtcttggggcagagtttggagagccacttccagccaaggtgagaacagaatgggatttcagcagccagtgcatcataaagagaagtaaattgactgcctgtgctctgagagtcaattgatatatttatttttaaaacgtaagatcttgaaaatcaagacctattaatttcataagtcattccagacatcacataataataacactgtgccatttctgtacgtgctctgtaacctctgtaaagcactatatatcttgttgtttattattatatcaatatattacactttccaaagacttttatgtatcatctctcaagatcctcagggcaacaggggccccatttatcaccacgtaccagaatattgagacttcatccaattctaatgatgtcattttagcccacaggggcagagaccaggagtccacatcctacatgtcttccaatctttctgcctcaaaaccctcaggaactgcttctagggcatttgatatcatctcactgacttctgagaaggaacatagacaagtacaagcatgttgtcttactcagcactcagccgcacacatcacgatgggcagaagtcactatcagtgagttctgttgcccttgtacaaagaggagttccacttcattataaagaaatggagcgagtatatttttaataggcccaactctttagctatgtttttctttttatcaggctttacttatttagtttttctagtgccttgaagtatattacttatatttctttttaatcttttcagcctcagtaataaaattaatataaatgagtc

SEQ ID NO: 197398 - DNA, 3744 bp, Homo sapiens
  Payload ID: 18935
  Gene Name: ubiquitin specific peptidase 40
  Uniprot ID: Q9NVE5
  ENST ID: ENST00000427112
  CDS Start-End: 37-3744
atgtcactttttttaagggtagtatttagtttcacaatgtttggggacctgtttgaagaggagtattccactgtgtctaataatcagtatggaaaagggaagaaattaaagactaaagctttggagccacctgctcctagagaattcaccaatttaagcggaatcagaaatcagggtggaacctgttacctcaattcccttcttcagactcttcatttcacacctgaattcagagaagctctattttctcttggcccagaagagcttggtttgtttgaagataaggataaacccgatgcaaaggttcgaatcatccctttacagttacagcgcttgtttgctcagcttctgctcttagaccaggaagctgcatccacagcagacctcactgacagctttgggtggaccagtaatgaggaaatgaggcaacatgatgtgcaggaactgaatcgaatcctcttcagcgctttggaaacttctttagttgggacctccggtcatgacctcatctatcgtctgtaccatggaaccattgttaaccagattgtttgtaaagaatgtaagaacgttagcgagaggcaggaagacttcttagatctaacagtagcagtcaaaaatgtatccggtttggaagatgctctctggaacatgtatgtagaagaggaagtttttgattgtgacaacttgtaccactgtggaacttgtgacaggctggttaaagcagcaaagtcggccaaattacgtaagctgcctccttttcttactgtttcattactaagatttaattttgattttgtgaaatgcgaacgctacaaggaaactagctgttatacattccctctccggattaatctcaagcccttttgtgaacagagtgaattggatgacttagaatatatatatgacctcttctcagttattatacacaaaggtggctgctacggaggccattaccatgtatatattaaagatgttgatcatttgggaaactggcagtttcaagaggaaaaaagtaaaccagatgtgaatctgaaagatctccagagtgaagaagagattgatcatccactgatgattctaaaagcaatcttattagaggagaataatctaattcctgttgatcagctgggccagaaacttttgaaaaagataggaatatcttggaacaagaagtacagaaaacagcatggaccactgcggaagttcttacagctccattctcagatatttctactcagttcagatgaaagtacagttcgtctcttgaagaatagttctctccaggctgagtctgatttccaaaggaatgaccagcaaattttcaagatgcttcctccagaatccccaggtttaaacaatagcatctcctgtccccactggtttgatataaatgattctaaagtccagccaatcagggaaaaggatattgaacagcaatttcagggtaaagaaagtgcctacatgttgttttatcggaaatcccagttgcagagaccccctgaagctcgagctaatccaagatatggggttccatgtcatttactgaatgaaatggatgcagctaacattgaactgcaaaccaaaagggcagaatgtgattctgcaaacaatacttttgaattgcatcttcacctgggccctcagtatcatttcttcaatggggctctgcacccagtagtctctcaaacagaaagcgtgtgggatttgacctttgataaaagaaaaactttaggagatctccggcagtcaatatttcagctgttagaattttgggaaggagacatggttcttagtgttgcaaagcttgtaccagcaggacttcacatttaccagtcacttggcggggatgaactgacactgtgtgaaactgaaattgctgatggggaagacatctttgtgtggaatggggtggaggttggtggagtccacattcaaactggtattgactgcgaacctctacttttaaatgttcttcatctagacacaagcagtgatggagaaaagtgttgtcaggtgatagaatctccacatgtctttccagctaatgcagaagtgggcactgtcctcacagccttagcaatcccagcaggtgtcatcttcatcaacagtgctggatgtccaggtggggagggttggacggccatccccaaggaagacatgaggaagacgttcagggagcaagggctcagaaatggaagctcaattttaattcaggattctcatgatgataacagcttgttgaccaaggaagagaaatgggtcactagtatgaatgagattgactggctccacgttaaaaatttatgccagttagaatctgaagagaagcaagttaaaatatcagcaactgttaacacaatggtgtttgatattcgaattaaagccataaaggaattaaaattaatgaaggaactagctgacaacagctgtttgagacctattgatagaaatgggaagcttctttgtccagtgccggacagctatactttgaaggaagcagaattgaagatgggaagttcattgggactgtgtcttggaaaagcaccaagttcgtctcagttgttcctgttttttgcaatggggagtgacgttcaacctgggacagaaatggaaatcgtagtagaagaaacaatatctgtgagagattgtttaaagttaatgctgaagaaatctggcctacaaggagatgcctggcatttacgaaaaatggattggtgctatgaagctggagagcctttatgtgaagaagatgcaacactgaaagaacttctgatatgttctggagatactttgcttttaattgaaggacaacttcctcctctgggtttcctgaaggtgcccatctggtggtaccagcttcagggtccctcaggacactgggagagtcatcaggaccagaccaactgtacttcgtcttggggcagagtttggagagccacttccagccaaggtgcttctgggaacgagcctgcgcaagtttctctcctctacttgggagacatagagatctcagaagatgccacgctggcggagctgaagtctcaggccatgaccttgcctcctttcctggagttcggtgtcccgtccccagcccacctcagagcctggacggtggagaggaagcgcccaggcaggcttttacgaactgaccggcagccactcagggaatataaactaggacggagaattgagatctgcttagagccccttcagaaaggcgaaaacttgggcccccaggacgtgctgctgaggacacaggtgcgcatccctggtgagaggacctatgcccctgccctggacctggtgtggaacgcggcccagggtgggactgccggctccctgaggcagagagttgccgatttctatcgtcttcccgtggagaagattgaaattgccaaatactttcccgaaaagttcgagtggcttccgatatctagctggaaccaacaaataaccaagaggaaaaagaaaaaaaaacaagattatttgcaaggggcaccgtattacttgaaagacggagatactattggtgttaagaatctcctgattgacgacgatgatgatttcagtacaatcagagatgacactggaaaagaaaagcagaaacaacgggccctggggagaaggaaaagccaagaagccctccatgagcagagcagctacatcctctccagtgcagagacgcctgcccggccccgagccccggaaacttctctctccatccacgtggggagcttcagataa

SEQ ID NO: 197399 - DNA, 1047 bp, Homo sapiens
  Payload ID: 18935
  Gene Name: ubiquitin specific peptidase 40
  ENST ID: ENST00000430158
  CDS Start-End: 1-740
tgggaagttcattgggactgtgtcttggaaaagcaccaagttcgtctcagttgttcctgttttttgcaatggggagtgacgttcaacctgggacagaaatggaaatcgtagtagaagaaacaatatctgtgagagattgtttaaagttaatgctgaagaaatctggcctacaaggagatgcctggcatttacgaaaaatggattggtgctatgaagctggagagcctttatgtgaagaagatgcaacactgaaagaacttctgatatgttctggagatactttgcttttaattgaaggacaacttcctcctctgggtttcctgaaggtgcccatctggtggtaccagcttcagggtccctcaggacactgggagagtcatcaggaccagaccaactgtacttcgtcttggggcagagtttggagagccacttccagccaaggtgcttctgggaacgagcctgcgcaagtttctctcctctacttgggagacatagagatctcagaagatgccacgctggcggagctgaagtctcaggccatgaccttgcctcctttcctggagttcggtgtcccgtccccagcccacctcagagcctggacggtggagaggaagcgcccaggcaggcttttacgaactgaccggcagccactcagggaatataaactaggacggagaattgagatctgcttagagccccttcagaaaggcgaaaacttggggtgcatattgaccccatgatggccctgaagtgtcagcaagaggcccacccgcagctgttgtcagtgtgttcggacagtctgccatccaacggattcatcattgctcccgtcgctctgcccccttattctactttcttcatcctagtatcacctgacatatctgtacttactgatttatttgttagtatctgtctcccactactagaatataagtacttggtttattcattgctatatccttaatacctagaatagtaattgtgcccatgtcatagtcaataattatttattaaataaagatacacccaaaattgtctacaatcaaa

SEQ ID NO: 197400 - DNA, 348 bp, Homo sapiens
  Payload ID: 18935
  Gene Name: ubiquitin specific peptidase 40
  ENST ID: ENST00000454354
  CDS Start-End: 1-348
tggagttcggtgtcccgtccccagcccacctcagagcctggacggtggagaggaagcgcccaggcaggcttttacgaactgaccggcagccactcagcccccaggacgtgctgctgaggacacaggtgcgcatccctggtgagaggacctatgcccctgccctggacctggtgtggaacgcggcccagggtgggactgccggctccctgaggcagagagttgccgatttctatcgtcttcccgtggagaagattgaaattgccaaatactttcccgaaaagttcgagtggcttccgatatctagctggaaccaacaaataaccaagaggaaaaagaaaaaaaaacaag

SEQ ID NO: 197401 - DNA, 628 bp, Homo sapiens
  Payload ID: 18935
  Gene Name: ubiquitin specific peptidase 40
  ENST ID: ENST00000443711
  CDS Start-End: 71-367
gggttcgttcgcttcgcgttttggccagggcgggggtctgggctttaggcaggtagtatttagtttcacaatgtttggggacctgtttgaagaggagtattccactgtgtctaataatcagtatggaaaagggaagaaattaaagactaaagctttggagccacctgctcctagagaattcaccaatttaagcggaatcagaaatcagggtggaacctgttacctcaattcccttcttcagactcttcatttcacacctgaattcagagaagctctattttctcttggcccagaagagcttggtttgtttgaagataaggataaacccgatgcaaagaaagtgacttggcctataccctatgggtaatggaatttgccttccgagaaagaatcagttttccaagtacaatactgctactgctttataaacatgtaacactctttactatgcttattctttcttctggtgaaggaaatatttgcagaacatccacattagcttcccccagaagtctatttaaagcactttttttgcaacaataccgacctctccaccccacacaaaaaaaaatagaggctagtattctttcaatttggtactctggaaataaattgagtaatgagttaa

SEQ ID NO: 197402 - DNA, 670 bp, Homo sapiens
  Payload ID: 18935
  Gene Name: ubiquitin specific peptidase 40
  ENST ID: ENST00000450940
  CDS Start-End: 1-292
gaccaactgtacttcgtcttggggcagagtttggagagccacttccagccaaggtgcttctgggaacgagcctgcgcaagtttctctcctctacttgggagacatagagatctcagaagatgccacgctggcggagctgaagtctcagtctgttctgatatggcatttgtcatatgccatgttcagtggccatgaccttgcctcctttcctggagttcggtgtcccgtccccagcccacctcagagcctggacggtggagaggaagcgcccaggcaggcttttacgaactgaccggcagccactcagggaatataaactaggacggagaattgagatctgcttagagccccttcagaaaggcgaaaacttgggcccccaggacgtgctgctgaggacacaggtgcgcatccctggtgagaggacctatgcccctgccctggacctggtgtggaacgcggcccagggtgggactgccggctccctgaggcagagagttgccgatttctatcgtcttcccgtggagaagattgaaattgccaaatactttcccgaaaagttcgagtggcttccgatatctagctggaaccaacaaataaccaagaggaaaaagaaaaaaaaacaagattatttgcaaggggcaccgtattacttgaaagacggagatactat

SEQ ID NO: 197403 - DNA, 453 bp, Homo sapiens
  Payload ID: 18935
  Gene Name: ubiquitin specific peptidase 40
  ENST ID: ENST00000452724
  CDS Start-End: 1-297
gaagacatgaggaagacgttcagggagcaagggctcagaaatggaagctcaattttaattcaggattctcatgatgataacagcttgttgaccaaggaagagaaatgggtcactagtatgaatgagattgactggctccacgttaaaaatttatgccagttagaatctgaagagaagcaagttaaaatatcagcaactgttaacacaatggtgtttgatattcgaattaaagccataaaggaattaaaattaatgaaggaactaggtaatcatttacattttcttttcggttcttagtttagcttaattttggtcttgaattgaagaaaatataggagaatacaaaaaacagtttagggagaactcacatacctaccacccaaaatggacaaatattaacattttgtcatatgtttgtttttgtttgaaacattataaatgaagttaaagtcc

SEQ ID NO: 197404 - DNA, 5616 bp, Homo sapiens
  Payload ID: 18935
  Gene Name: ubiquitin specific peptidase 40
  Uniprot ID: Q9NVE5
  ENST ID: ENST00000450966
  CDS Start-End: 1-3744
atgtcactttttttaagggtagtatttagtttcacaatgtttggggacctgtttgaagaggagtattccactgtgtctaataatcagtatggaaaagggaagaaattaaagactaaagctttggagccacctgctcctagagaattcaccaatttaagcggaatcagaaatcagggtggaacctgttacctcaattcccttcttcagactcttcatttcacacctgaattcagagaagctctattttctcttggcccagaagagcttggtttgtttgaagataaggataaacccgatgcaaaggttcgaatcatccctttacagttacagcgcttgtttgctcagcttctgctcttagaccaggaagctgcatccacagcagacctcactgacagctttgggtggaccagtaatgaggaaatgaggcaacatgatgtgcaggaactgaatcgaatcctcttcagcgctttggaaacttctttagttgggacctccggtcatgacctcatctatcgtctgtaccatggaaccattgttaaccagattgtttgtaaagaatgtaagaacgttagcgagaggcaggaagacttcttagatctaacagtagcagtcaaaaatgtatccggtttggaagatgctctctggaacatgtatgtagaagaggaagtttttgattgtgacaacttgtaccactgtggaacttgtgacaggctggttaaagcagcaaagtcggccaaattacgtaagctgcctccttttcttactgtttcattactaagatttaattttgattttgtgaaatgcgaacgctacaaggaaactagctgttatacattccctctccggattaatctcaagcccttttgtgaacagagtgaattggatgacttagaatatatatatgacctcttctcagttattatacacaaaggtggctgctacggaggccattaccatgtatatattaaagatgttgatcatttgggaaactggcagtttcaagaggaaaaaagtaaaccagatgtgaatctgaaagatctccagagtgaagaagagattgatcatccactgatgattctaaaagcaatcttattagaggagaataatctaattcctgttgatcagctgggccagaaacttttgaaaaagataggaatatcttggaacaagaagtacagaaaacagcatggaccactgcggaagttcttacagctccattctcagatatttctactcagttcagatgaaagtacagttcgtctcttgaagaatagttctctccaggctgagtctgatttccaaaggaatgaccagcaaattttcaagatgcttcctccagaatccccaggtttaaacaatagcatctcctgtccccactggtttgatataaatgattctaaagtccagccaatcagggaaaaggatattgaacagcaatttcagggtaaagaaagtgcctacatgttgttttatcggaaatcccagttgcagagaccccctgaagctcgagctaatccaagatatggggttccatgtcatttactgaatgaaatggatgcagctaacattgaactgcaaaccaaaagggcagaatgtgattctgcaaacaatacttttgaattgcatcttcacctgggccctcagtatcatttcttcaatggggctctgcacccagtagtctctcaaacagaaagcgtgtgggatttgacctttgataaaagaaaaactttaggagatctccggcagtcaatatttcagctgttagaattttgggaaggagacatggttcttagtgttgcaaagcttgtaccagcaggacttcacatttaccagtcacttggcggggatgaactgacactgtgtgaaactgaaattgctgatggggaagacatctttgtgtggaatggggtggaggttggtggagtccacattcaaactggtattgactgcgaacctctacttttaaatgttcttcatctagacacaagcagtgatggagaaaagtgttgtcaggtgatagaatctccacatgtctttccagctaatgcagaagtgggcactgtcctcacagccttagcaatcccagcaggtgtcatcttcatcaacagtgctggatgtccaggtggggagggttggacggccatccccaaggaagacatgaggaagacgttcagggagcaagggctcagaaatggaagctcaattttaattcaggattctcatgatgataacagcttgttgaccaaggaagagaaatgggtcactagtatgaatgagattgactggctccacgttaaaaatttatgccagttagaatctgaagagaagcaagttaaaatatcagcaactgttaacacaatggtgtttgatattcgaattaaagccataaaggaattaaaattaatgaaggaactagctgacaacagctgtttgagacctattgatagaaatgggaagcttctttgtccagtgccggacagctatactttgaaggaagcagaattgaagatgggaagttcattgggactgtgtcttggaaaagcaccaagttcgtctcagttgttcctgttttttgcaatggggagtgacgttcaacctgggacagaaatggaaatcgtagtagaagaaacaatatctgtgagagattgtttaaagttaatgctgaagaaatctggcctacaaggagatgcctggcatttacgaaaaatggattggtgctatgaagctggagagcctttatgtgaagaagatgcaacactgaaagaacttctgatatgttctggagatactttgcttttaattgaaggacaacttcctcctctgggtttcctgaaggtgcccatctggtggtaccagcttcagggtccctcaggacactgggagagtcatcaggaccagaccaactgtacttcgtcttggggcagagtttggagagccacttccagccaaggtgcttctgggaacgagcctgcgcaagtttctctcctctacttgggagacatagagatctcagaagatgccacgctggcggagctgaagtctcaggccatgaccttgcctcctttcctggagttcggtgtcccgtccccagcccacctcagagcctggacggtggagaggaagcgcccaggcaggcttttacgaactgaccggcagccactcagggaatataaactaggacggagaattgagatctgcttagagccccttcagaaaggcgaaaacttgggcccccaggacgtgctgctgaggacacaggtgcgcatccctggtgagaggacctatgcccctgccctggacctggtgtggaacgcggcccagggtgggactgccggctccctgaggcagagagttgccgatttctatcgtcttcccgtggagaagattgaaattgccaaatactttcccgaaaagttcgagtggcttccgatatctagctggaaccaacaaataaccaagaggaaaaagaaaaaaaaacaagattatttgcaaggggcaccgtattacttgaaagacggagatactattggtgttaagaatctcctgattgacgacgatgatgatttcagtacaatcagagatgacactggaaaagaaaagcagaaacaacgggccctggggagaaggaaaagccaagaagccctccatgagcagagcagctacatcctctccagtgcagagacgcctgcccggccccgagccccggaaacttctctctccatccacgtggggagcttcagataaccgcgccgctgcacggctctactcccgatgaactctccggctgatgccacaaacgtgggtttcctgggcatggggactggctgcctggcgcctccaatcccaaatcctctgcttcctttgagcacagggacggctcctctgaggcctggccagtgcatgtagtcacttagctctgcaacacgtggcagccacgggggctggtgcagctctggatgtcgcccacccagctgccagtaggtgctgggctctctcacacagcacccggccccagctgcctttttttttcttttaaccagaaaatgcacaacgtgtgcgtgaaccgcaggtatggaggcagcggcatgccgttgctccgctgtgggaggtgtgtggggtcaggccagccactttcctccgtgttcagatgactctcgttcgccctgaccggcttctcacagtgtctcaggccactgcgccaccgcgctggtgctgagcagaagcgggcagaagtggggtctgctttcaggacttcatttcccccactcgttccggccccgcatgctccacgtctgccctttggtctgagttaaaactgcgatgctgaaaagtgcgagctctttccacgaggaggagccacacagggtggcctccgagggtgagtcgctctgctaagcaagggcagccgctgcacgtcagcccgcaggccaagggtccagcttatcctgggtgctctgtgatcagaaggtccttggatcccgaggactgcagctgctgccgtccacagcgcctcagcctctcttcctgtgtggaagcggggcaggcagggctgtggcagacaggcctggcatagcccaggttccaggtgtcctgggcagcctgaccggtttcctgagtagcctcaatgaaaacacctgagaaaaagaaaatgtaaactaaggaagggttttcccacttaatccaacccagatttctattcaacttaaaggatttaattggcatttgtgagaaataatagtacctgtgtcactgagttgattgatttgggacatagacggttgactttcccagacagcagcttagcggaaagcagcatcccgaagacggtgtcgcatgtcctgagcctgcttgtcacctgggcctcacggtttctcgtcagccccgtcactgatgggaagcagcactgaagtgtgagggcagaaaggacaccgctggagtcaggcgctcccctgcctgtgacccttttccaacaagctgatgctgagccagcggcctgctttgtccctcatactcctcccaacagtccaaacccctaccagacagaagccacgtcgcttctgcacacgtgtctgagagcgtctgccatagacgtctgtgcgtttccgtgaagcactgcgccctaaggacccaactctgactagcagctgcctcccactcccaaacactaaccccgctcaggagactcgcactgggtgtagactgcgtctttgcagagggagatgatagaggcttctgatgacgccagagctgtaagtgtcgtgacgagctgggcgcccagcccttcttaagctgttctgtttctgtggctttaactgacatatttctgtagcatctgccttcatctcatctcagcgtaatgaaatattaatgaaatcgctgaaaagctttgccttcgagaggccagaagcctcgcggaatgtctgcaagtccaaagacgcgtgtgggttgtgccctgaagtgccgtccagcaggcgcgtgcggccgggccggcctgtgcgtgtggcctttgccttcttccctttcttcctgttttctgtttttttaatttggggattgagaaagctgtacgattttgttaaagaaaaaaataaaccattttttaaagttgtagccctt

SEQ ID NO: 197405 - DNA, 920 bp, Homo sapiens
  Payload ID: 18936
  Gene Name: ubiquitin specific peptidase 41
  ENST ID: ENST00000292729
  CDS Start-End: 1-920
gcctggttggtttacacaacattggacagacctgctgccttaactccttgattcaggtgtttgtaatgaatgtggacttcgccaggatattgaagaggatcacggtgcccaggggagctgacgagcagaggagaagcgtccctttccagatgcttctgctgctggagaagatgcaggacagccggcagaaagcagtgtggcccctggagctggcctactgcctgcagaagtacaacgtgcccctgtttgtccaacatgatgctgcccaactgtacctcaaactctggaacctgattaaggaccagatcgctgatgtgcacttggtggagagactgcaggccctgtatatgatccggatgaaggactccttgatttgccttgactgtgccatggagagtagcagaaacagcagcatgctcaccctccgactttctttttttgatgtggactcaaagcccctgaagacactggaggacgccctgcactgcttcttccagcccagggagttatcaagcaaaagcaaatgcttctgtgagaactgtgggaagaagacccgtgggaaacaggtcttgaagctgacccatttgccccagaccctgacaatccacctcatgcgattctccatcaggaattcacagacgagaaagatctgccactccctgtacttcccccagagcttggatttcagccagatccttccaatgaagcgagagtcttgtgatgctgaggagcagtctggagggcagtatgagctttttgctgtgattgcgcacgtgggaatggcagactccggtcattactgtgtctacatccggaatgctgtggatggaaaatggttctgcttcaatgactccaatatttgcttggtgtcctgggaagacatccagtgtacctacggaaatcctaactaccactggtaa

SEQ ID NO: 197406 - DNA, 1077 bp, Homo sapiens
  Payload ID: 18936
  Gene Name: ubiquitin specific peptidase 41
  Uniprot ID: Q3LFD5
  ENST ID: ENST00000454608
  CDS Start-End: 1-1077
atggacggcgtcttgttcagggctcatcagtgtcagtacgtgcatccttgtgtacatgtgtatgtcactgtgggcctcatggatcccctgtgtcgccgaaagagtaaatcacgtaaacaaaacaaactgcaacctaacctgagaatatgcccttggagcctggttggtttacacaacattggacagacctgctgccttaactccttgattcaggtgtttgtaatgaatgtggacttcgccaggatattgaagaggatcacggtgcccaggggagctgacgagcagaggagaagcgtccctttccagatgcttctgctgctggagaagatgcaggacagccggcagaaagcagtgtggcccctggagctggcctactgcctgcagaagtacaacgtgcccctgtttgtccaacatgatgctgcccaactgtacctcaaactctggaacctgattaaggaccagatcgctgatgtgcacttggtggagagactgcaggccctgtatatgatccggatgaaggactccttgatttgccttgactgtgccatggagagtagcagaaacagcagcatgctcaccctccgactttctttttttgatgtggactcaaagcccctgaagacactggaggacgccctgcactgcttcttccagcccagggagttatcaagcaaaagcaaatgcttctgtgagaactgtgggaagaagacccgtgggaaacaggtcttgaagctgacccatttgccccagaccctgacaatccacctcatgcgattctccatcaggaattcacagacgagaaagatctgccactccctgtacttcccccagagcttggatttcagccagatccttccaatgaagcgagagtcttgtgatgctgaggagcagtctggagggcagtatgagctttttgctgtgattgcgcacgtgggaatggcagactccggtcattactgtgtctacatccggaatgctgtggatggaaaatggttctgcttcaatgactccaatatttgcttggtgtcctgggaagacatccagtgtacctacggaaatcctaactaccactggtaa

SEQ ID NO: 197407 - DNA, 5155 bp, Homo sapiens
  Payload ID: 18937
  Gene Name: ubiquitin specific peptidase 42
  Uniprot ID: Q9H9J4
  ENST ID: ENST00000306177
  CDS Start-End: 159-4109
aggggcgcggcgggcgcggcgctgacccggaggcggcggcggcggtgcccggatggaggcacgtcattgtcccccgccgggcggctgggctgtgtgcggcggcggcggcggcggccgagggggatggagcgagcgccgagccgggtcagagttgaacaatgaccatagttgacaaagcttctgaatcttcagacccatcagcctatcagaatcagcctggcagctccgaggcagtctcacctggagacatggatgcaggttctgccagctggggtgctgtgtcttcattgaatgatgtgtcaaatcacacactttctttaggaccagtacctggtgctgtagtttattcgagttcatctgtacctgataaatcaaaaccatcaccacaaaaggatcaagccctaggtgatggcatcgctcctccacagaaagttcttttcccatctgagaagatttgtcttaagtggcaacaaactcatagagttggagctgggctccagaatttgggcaatacctgttttgccaatgcagcactgcagtgtttaacctacacaccacctcttgccaattacatgctatcacatgaacactccaaaacatgtcatgcagaaggcttttgtatgatgtgtacaatgcaagcacatattacccaggcactcagtaatcctggggacgttattaaaccaatgtttgtcatcaatgagatgcggcgtatagctaggcacttccgttttggaaaccaagaagatgcccatgaattccttcaatacactgttgatgctatgcagaaagcatgcttgaatggcagcaataaattagacagacacacccaggccaccactcttgtttgtcagatatttggaggatacctaagatctagagtcaaatgtttaaattgcaagggcgtttcagatacttttgatccatatcttgatataacattggagataaaggctgctcagagtgtcaacaaggcattggagcagtttgtgaagccggaacagcttgatggagaaaactcgtacaagtgcagcaagtgtaaaaagatggttccagcttcaaagaggttcactatccatagatcctctaatgttcttacactttctctgaaacgttttgcaaattttaccggtggaaaaattgctaaggatgtgaaataccctgagtatcttgatattcggccatatatgtctcaacccaacggagagccaattgtctacgtcttgtatgcagtgctggtccacactggttttaattgccatgctggccattacttctgctacataaaagctagcaatggcctctggtatcaaatgaatgactccattgtatctaccagtgatattagatcggtactcagccaacaagcctatgtgctcttttatatcaggtcccatgatgtgaaaaatggaggtgaacttactcatcccacccatagccccggccagtcctctccccgccccgtcatcagtcagcgggttgtcaccaacaaacaggctgcgccaggctttatcggaccacagcttccctctcacatgataaagaatccacctcacttaaatgggactggaccattgaaagacacgccaagcagttccatgtcgagtcctaacgggaattccagtgtcaacagggctagtcctgttaatgcttcagcttctgtccaaaactggtcagttaataggtcctcagtgatcccagaacatcctaagaaacaaaaaattacaatcagtattcacaacaagttgcctgttcgccagtgtcagtctcaacctaaccttcatagtaattctttggagaaccctaccaagcccgttccctcttctaccattaccaattctgcagtacagtctacctcgaacgcatctacgatgtcagtttctagtaaagtaacaaaaccgatcccccgcagtgaatcctgctcccagcccgtgatgaatggcaaatccaagctgaactccagcgtgctggtgccctatggcgccgagtcctctgaggactctgacgaggagtcaaaggggctgggcaaggagaatgggattggtacgattgtgagctcccactctcccggccaagatgccgaagatgaggaggccactccgcacgagcttcaagaacccatgaccctaaacggtgctaatagtgcagacagcgacagtgacccgaaagaaaacggcctagcgcctgatggtgccagctgccaaggccagcctgccctgcactcagaaaatccctttgctaaggcaaacggtcttcctggaaagttgatgcctgctcctttgctgtctctcccagaagacaaaatcttagagaccttcaggcttagcaacaaactgaaaggctcgacggatgaaatgagtgcacctggagcagagaggggccctcccgaggaccgcgacgccgagcctcagcctggcagccccgccgccgaatccctggaggagccagatgcggccgccggcctcagcagcaccaagaaggctccgccgccccgcgatcccggcacccccgctaccaaagaaggcgcctgggaggccatggccgtcgcccccgaggagcctccgcccagcgccggcgaggacatcgtgggggacacagcaccccctgacctgtgtgatcccgggagcttaacaggcgatgcgagcccgttgtcccaggacgcaaaggggatgatcgcggagggcccgcgggactcggcgttggcggaagccccggaagggttgagtccggctccgcctgcgcggtcggaggagccctgcgagcagccactccttgttcaccccagcggggaccacgcccgggacgctcaggacccatcccagagcttgggcgcacccgaggccgcagagcggccgccagctcctgtgctggacatggccccggccggtcacccggaaggggacgctgagcctagccccggcgagagggtcgaggacgccgcggcgccgaaagccccaggcccttccccagcgaaggagaaaatcggcagcctcagaaaggtggaccgaggccactaccgcagccggagagagcgctcgtccagcggggagcccgccagagagagcaggagcaagactgagggccaccgtcaccggcggcgccgcacctgcccccgggagcgcgaccgccaggaccgccacgccccggagcaccaccccggccacggcgacaggctcagccctggcgagcgccgctctctgggcaggtgcagtcaccaccactcccgacaccggagcggggtggagctggactgggtcagacaccactacaccgagggcgagcgtggctggggccgggagaagttctaccccgacaggccgcgctgggacaggtgccggtactaccatgacaggtacgccctgtacgctgcccgggactggaagcccttccacggcggccgcgagcacgagcgggccgggctgcacgagcggccgcacaaggaccacaaccggggccgtaggggctgcgagccggcccgggagagggagcggcaccgccccagcagcccccgcgcaggcgcgccccacgccctcgccccgcaccccgaccgcttctcccacgacagaactgcacttgtagccggagacaactgtaacctctctgatcggtttcacgaacacgaaaatggaaagtcccggaaacggagacacgacagtgtggagaacagtgacagtcatgttgaaaagaaagcccggaggagcgaacagaaggatcctctagaagagcctaaagcaaagaagcacaaaaaatcaaagaagaaaaagaaatccaaagacaaacaccgagaccgcgactccaggcatcagcaggactcagacctctcagcagcgtgctctgacgctgacctccacagacacaaaaaaaagaagaagaaaaagaagagacattcaagaaaatcagaggactttgttaaagattcagaactgcacttacccagggtcaccagcttggagactgtcgcccagttccggagagcccagggtggctttcctctctctggtggcccgcctctggaaggcgtcggacctttccgtgagaaaacgaaacacttacggatggaaagcagggatgacaggtgtcgtctctttgagtatggccagggtgattgaaaactcagcctcaaaacaaaaaattcactagttatgattcaacgcgttcaacagaagccatccccagcccagcttaaattataaagatagacaataactctgttccaatctgcgtggtgcttctttagtaaatactgtacagattttaccatggagaactttttttttagtttttaccttttcttaattacccttattccgaatggacgaacactttctaccactgctgaccattgtaaaataccgtgtatataaatcccattgaaataatgccctggaatagaacatctcaaatgctgcttaattacagactcaggtcgattacttgtatttcatgtaatgttcctccaagttagacatctggtgcaagaccaaccgggagaccatggaattgtcaaaagtacaaactgacagtgtgtatatttaatttaaagacttatttaaaaactcacaagctctcacctagactttggagagcagtctgttttctgtaatgtctgatactagaaactaatttgcttattttagttgtattcaagatttgaagatgtattttatagacaagttctgtttttgaactttgtggaactgttccaatcaatcaatttcccagttatgatgagtatttacattatgaatgtataacccagacatgatttgtaaagccgacagtatgtttctattacacaacactttttgatacagcgtctcttgtcttcactgatactggagtctccgttgtctgcttggtcccttcgagtttctagttacagacacaatcatactgtgattttatttttaatatggatatgctatcaaactgtgatacacttataattcactggtcctgcatcaggagatggagtggggaaaactgtatttaatacagtttgtatctgaataatctgtatggtttatacagtttgtgttgttcagagatgtttaaagtttgatctttgtttttctaaagattaaaaaagcacttgccccactgtaaatatacagcatgtaaaatttctatagtatataaatggcagcaaatcaca

SEQ ID NO: 197408 - DNA, 1380 bp, Homo sapiens
  Payload ID: 18937
  Gene Name: ubiquitin specific peptidase 42
  ENST ID: ENST00000404008
  CDS Start-End: 93-617
ttgtcccccgccgggcggctgggctgtgtgcggcggcggcggcggcggccgagggggatggagcgagcgccgagccgggtcagagttgaacaatgaccatagttgacaaagcttctgaatcttcagacccatcagcctatcagaatcagcctggcagctccgaggcagtctcacctggagacatggatgcaggttctgccagctggggtgctgtgtcttcattgaatgatgtgtcaaatcacacactttctttaggaccagtacctggtgctgtagtttattcgagttcatctgtacctgataaatcaaaaccatcaccacaaaaggatcaagccctaggtgatggcatcgctcctccacagaaagttcttttcccatctgagaagatttgtcttaagtggcaacaaactcatagagttggagctgggctccagaatttgggcaatacctgttttgccaatgcagcactgcagtgtttaacctacacaccacctcttgccaattacatgctatcacatgaacactccaaaacattccataattcattccccacagacagctttcctatcacttttgcgcttaatgaaagtagggtgtggatgaaaacccagcactagcacctggacagcaagagagaggaccaagacaaaattcagaagctcccgatgtccagaattagagatttggtctcgctgtgttacccaggctggtctcgaactcctagcctcaagtgatcctcctgccttggcctctgaaagtgttggaattacaggtcatgcagaaggcttttgtatgatgtgtacaatgcaagcacatattacccaggcactcagtaatcctggggacgttattaaaccaatgtttgtcatcaatgagatgcggcgtatagctaggcacttccgttttggaaaccaagaagatgcccatgaattccttcaatacactgttgatgctatgcagaaagcatgcttgaatggcagcaataaattagacagacacacccaggccaccactcttgtttgtcagatatttggaggatacctaagatctagagtcaaatgtttaaattgcaagggcgtttcagatacttttgatccatatcttgatataacattggagataaaggctgctcagagtgtcaacaaggcattggagcagtttgtgaagccggaacagcttgatggagaaaactcgtacaagtgcagcaagtgtaaaaagatggttccagcttcaaagaggttcactatccatagatcctctaatgttcttacactttctctgaaacgttttgcaaattttaccggtggaaaaattgctaaggatgtgaaataccctgagtatcttgatattcggccatatatgtctcaacccaacggagag

SEQ ID NO: 197409 - DNA, 3611 bp, Homo sapiens
  Payload ID: 18937
  Gene Name: ubiquitin specific peptidase 42
  ENST ID: ENST00000426246
  CDS Start-End: 481-3611
ctgttctttgatctaaattaatggctcagattcatgtgtgtatgttctggggctattagttactaggatttaaaaaaaaaaatccttggtttctttttgaatagttctttacttaatggagaatttaaattggttcttttaaaactgatttttttttccctccaaagagccaagtaatgcttgtaaagaatttggaaagtacagaaaaacttaaagaaaccaaagaaaaatcacctagaatctcaccacctacctaggggtgtttgttatgccagaattaacgttctgtttgccctcattttctccctttctcagtccataattcattccccacagacagctttcctatcacttttgcgcttaatgaaagtagggtgtggatgaaaacccagcactagcacctggacagcaagagagaggaccaagacaaaattcagaagctcccgatgtccagaattaggtcatgcagaaggcttttgtatgatgtgtacaatgcaagcacatattacccaggcactcagtaatcctggggacgttattaaaccaatgtttgtcatcaatgagatgcggcgtatagctaggcacttccgttttggaaaccaagaagatgcccatgaattccttcaatacactgttgatgctatgcagaaagcatgcttgaatggcagcaataaattagacagacacacccaggccaccactcttgtttgtcagatatttggaggatacctaagatctagagtcaaatgtttaaattgcaagggcgtttcagatacttttgatccatatcttgatataacattggagataaaggctgctcagagtgtcaacaaggcattggagcagtttgtgaagccggaacagcttgatggagaaaactcgtacaagtgcagcaagtgtaaaaagatggttccagcttcaaagaggttcactatccatagatcctctaatgttcttacactttctctgaaacgttttgcaaattttaccggtggaaaaattgctaaggatgtgaaataccctgagtatcttgatattcggccatatatgtctcaacccaacggagagccaattgtctacgtcttgtatgcagtgctggtccacactggttttaattgccatgctggccattacttctgctacataaaagctagcaatggcctctggtatcaaatgaatgactccattgtatctaccagtgatattagatcggtactcagccaacaagcctatgtgctcttttatatcaggtcccatgatgtgaaaaatggaggtgaacttactcatcccacccatagccccggccagtcctctccccgccccgtcatcagtcagcgggttgtcaccaacaaacaggctgcgccaggctttatcggaccacagcttccctctcacatgataaagaatccacctcacttaaatgggactggaccattgaaagacacgccaagcagttccatgtcgagtcctaacgggaattccagtgtcaacagggctagtcctgttaatgcttcagcttctgtccaaaactggtcagttaataggtcctcagtgatcccagaacatcctaagaaacaaaaaattacaatcagtattcacaacaagttgcctgttcgccagtgtcagtctcaacctaaccttcatagtaattctttggagaaccctaccaagcccgttccctcttctaccattaccaattctgcagtacagtctacctcgaacgcatctacgatgtcagtttctagtaaagtaacaaaaccgatcccccgcagtgaatcctgctcccagcccgtgatgaatggcaaatccaagctgaactccagcgtgctggtgccctatggcgccgagtcctctgaggactctgacgaggagtcaaaggggctgggcaaggagaatgggattggtacgattgtgagctcccactctcccggccaagatgccgaagatgaggaggccactccgcacgagcttcaagaacccatgaccctaaacggtgctaatagtgcagacagcgacagtgacccgaaagaaaacggcctagcgcctgatggtgccagctgccaaggccagcctgccctgcactcagaaaatccctttgctaaggcaaacggtcttcctggaaagttgatgcctgctcctttgctgtctctcccagaagacaaaatcttagagaccttcaggcttagcaacaaactgaaaggctcgacggatgaaatgagtgcacctggagcagagaggggccctcccgaggaccgcgacgccgagcctcagcctggcagccccgccgccgaatccctggaggagccagatgcggccgccggcctcagcagcaccaagaaggctccgccgccccgcgatcccggcacccccgctaccaaagaaggcgcctgggaggccatggccgtcgcccccgaggagcctccgcccagcgccggcgaggacatcgtgggggacacagcaccccctgacctgtgtgatcccgggagcttaacaggcgatgcgagcccgttgtcccaggacgcaaaggggatgatcgcggagggcccgcgggactcggcgttggcggaagccccggaagggttgagtccggctccgcctgcgcggtcggaggagccctgcgagcagccactccttgttcaccccagcggggaccacgcccgggacgctcaggacccatcccagagcttgggcgcacccgaggccgcagagcggccgccagctcctgtgctggacatggccccggccggtcacccggaaggggacgctgagcctagccccggcgagagggtcgaggacgccgcggcgccgaaagccccaggcccttccccagcgaaggagaaaatcggcagcctcagaaaggtggaccgaggccactaccgcagccggagagagcgctcgtccagcggggagcccgccagagagagcaggagcaagactgagggccaccgtcaccggcggcgccgcacctgcccccgggagcgcgaccgccaggaccgccacgccccggagcaccaccccggccacggcgacaggctcagccctggcgagcgccgctctctgggcaggtgcagtcaccaccactcccgacaccggagcggggtggagctggactgggtcagacaccactacaccgagggcgagcgtggctggggccgggagaagttctaccccgacaggccgcgctgggacaggtgccggtactaccatgacaggtacgccctgtacgctgcccgggactggaagcccttccacggcggccgcgagcacgagcgggccgggctgcacgagcggccgcacaaggaccacaaccggggccgtaggggctgcgagccggcccgggagagggagcggcaccgccccagcagcccccgcgcaggcgcgccccacgccctcgccccgcaccccgaccgcttctcccacgacagaactgcacttgtagccggagacaactgtaacctctctgatcggtttcacgaacacgaaaatggaaagtcccggaaacggagacacgacagtgtggagaacagtgacagtcatgttgaaaagaaagcccggaggagcgaacagaaggatcctctagaagagcctaaagcaaagaagcacaaaaaatc

SEQ ID NO: 197410 - DNA, 520 bp, Homo sapiens
  Payload ID: 18937
  Gene Name: ubiquitin specific peptidase 42
  ENST ID: ENST00000451154
  CDS Start-End: 66-362
gtgcggcggcggcggcggcggccgagggggatggagcgagcgccgagccgggtcagagttgaacaatgaccatagttgacaaagcttctgaatcttcagacccatcagcctatcagaatcagcctggcagctccgaggcagtctcacctggagacatggatgcaggttctgccagctggggtgctgtgtcttcattgaatgatgtgtcaaatcacacactttctttaggaccagtacctggtgctgtagtttattcgagttcatctgtacctgataaatcaaaaccatcaccacaaaaggatcaagtagagacgggggttcaccatgttagccaggatggtctcgatcttctgacctcatgatccacccacctcagcgtcctgaagtgctgggattacaggcatgaaccaccacgccaggcccttttattccagttttttttaagaataaactttatcttgccctaggtgatggcatcgctcctccacagaaagttcttttcccatctgagaagatttgt

SEQ ID NO: 197411 - DNA, 1490 bp, Homo sapiens
  Payload ID: 18937
  Gene Name: ubiquitin specific peptidase 42
  ENST ID: ENST00000465073
  CDS Start-End: 66-1490
gtgcggcggcggcggcggcggccgagggggatggagcgagcgccgagccgggtcagagttgaacaatgaccatagttgacaaagcttctgaatcttcagacccatcagcctatcagaatcagcctggcagctccgaggcagtctcacctggagacatggatgcaggttctgccagctggggtgctgtgtcttcattgaatgatgtgtcaaatcacacactttctttaggaccagtacctggtgctgtagtttattcgagttcatctgtacctgataaatcaaaaccatcaccacaaaaggatcaaggtcatgcagaaggcttttgtatgatgtgtacaatgcaagcacatattacccaggcactcagtaatcctggggacgttattaaaccaatgtttgtcatcaatgagatgcggcgtatagctaggcacttccgttttggaaaccaagaagatgcccatgaattccttcaatacactgttgatgctatgcagaaagcatgcttgaatggcagcaataaattagacagacacacccaggccaccactcttgtttgtcagatatttggaggatacctaagatctagagtcaaatgtttaaattgcaagggcgtttcagatacttttgatccatatcttgatataacattggagataaaggctgctcagagtgtcaacaaggcattggagcagtttgtgaagccggaacagcttgatggagaaaactcgtacaagtgcagcaagtgtaaaaagatggttccagcttcaaagaggttcactatccatagatcctctaatgttcttacactttctctgaaacgttttgcaaattttaccggtggaaaaattgctaaggatgtgaaataccctgagtatcttgatattcggccatatatgtctcaacccaacggagagccaattgtctacgtcttgtatgcagtgctggtccacactggttttaattgccatgctggccattacttctgctacataaaagctagcaatggcctctggtatcaaatgaatgactccattgtatctaccagtgatattagatcggtactcagccaacaagcctatgtgctcttttatatcaggtcccatgatgtgaaaaatggaggtgaacttactcatcccacccatagccccggccagtcctctccccgccccgtcatcagtcagcgggttgtcaccaacaaacaggctgcgccaggctttatcggaccacagcttccctctcacatgataaagaatccacctcacttaaatgggactggaccattgaaagacacgccaagcagttccatgtcgagtcctaacgggaattccagtgtcaacagggctagtcctgttaatgcttcagcttctgtccaaaactggtcagttaataggtcctcagtgatcccagaacatcctaagaaacaaaaaattacaatcagtattcacaacaagttgcctgttcgccagtgtcagtctcaacctaaccttcat

SEQ ID NO: 197412 - DNA, 5017 bp, Homo sapiens
  Payload ID: 18937
  Gene Name: ubiquitin specific peptidase 42
  ENST ID: ENST00000521713
  CDS Start-End: 21-680
agccgggtcagagttgaacaatgaccatagttgacaaagcttctgaatcttcagacccatcagcctatcagaatcagcctggcagctccgaggcagtctcacctggagacatggatgcaggttctgccagctggggtgctgtgtcttcattgaatgatgtgtcaaatcacacactttctttaggaccagtacctggtgctgtagtttattcgagttcatctgtacctgataaatcaaaaccatcaccacaaaaggatcaagccctaggtgatggcatcgctcctccacagaaagttcttttcccatctgagaagatttgtcttaagtggcaacaaactcatagagttggagctgggctccagaatttgggcaatacctgttttgccaatgcagcactgcagtgtttaacctacacaccacctcttgccaattacatgctatcacatgaacactccaaaacatgtcatgcagaaggcttttgtatgatgtgtacaatgcaagcacatattacccaggcactcagtaatcctggggacgttattaaaccaatgtttgtcatcaatgagatgcggcgtatagctaggcacttccgttttggaaaccaagaagatgcccatgaattccttcaatacactgttgatgctatgcagaaagcatgcttgaatggcagcaataagtaagtacaacagagcgccagccatgtcttcattggggatctctggttgtagtttattcttatcagaattcattttcaccttttttgttggaagcacacagaacagtgttcactttaccttttggctttgctctgcctcttccttaggtgatgtgcattattttaaaatggttgaaatttacacgtgtgtcttacgtaacagtttgagttggctcaatcatagatgtcaggaaataaacattggtcttgcagctatttaatttctcattatcagcagacgtctgcagatctcaaactagctgcttctcctttctagttgtgcctgacattttcttttctctgctgccctccagcctgtgtttatttcctgaacccccaccccaatcagttactgattcttgtagctagttccttaaaatctaaatgcagactcaagaggaagaacgaggggacagataatgcatcccaagccgcttggtgctgtctgagacacctggtagatctccctctgcattctccctgccctggcaccgccctgtctaggacttcattgtccgggtgatgacatacttgggtcggaggaagactctctgccttttccgcctccgctccctttcctcccacacaggccgcagtgcccggaggctgccatcttcctgcttcaggaccagactcctgccttgcttcccgagtcccttcctgacagacacagctcccacagctctgcgtctcctcccgccactcccagacctccctgtgttctggccaggaagggatgctcttgggctgccacacgtgccatccttttattttccatggctgtcctgtttgaattcttgatcttttgtgagctcccatgtgtttgaaatctggtcacagcatctggagtttttgcaaagctcttctctcatgtcactgttcaacgtttttcagattagacagacacacccaggccaccactcttgtttgtcagatatttggaggatacctaagatctagagtcaaatgtttaaattgcaagggcgtttcagatacttttgatccatatcttgatataacattggagataaaggctgctcagagtgtcaacaaggcattggagcagtttgtgaagccggaacagcttgatggagaaaactcgtacaagtgcagcaagtgtaaaaagatggttccagcttcaaagaggttcactatccatagatcctctaatgttcttacactttctctgaaacgttttgcaaattttaccggtggaaaaattgctaaggatgtgaaataccctgagtatcttgatattcggccatatatgtctcaacccaacggagagccaattgtctacgtcttgtatgcagtgctggtccacactggttttaattgccatgctggccattacttctgctacataaaagctagcaatggcctctggtatcaaatgaatgactccattgtatctaccagtgatattagatcggtactcagccaacaagcctatgtgctcttttatatcaggtcccatgatgtgaaaaatggaggtgaacttactcatcccacccatagccccggccagtcctctccccgccccgtcatcagtcagcgggttgtcaccaacaaacaggctgcgccaggctttatcggaccacagcttccctctcacatgataaagaatccacctcacttaaatgggactggaccattgaaagacacgccaagcagttccatgtcgagtcctaacgggaattccagtgtcaacagggctagtcctgttaatgcttcagcttctgtccaaaactggtcagttaataggtcctcagtgatcccagaacatcctaagaaacaaaaaattacaatcagtattcacaacaagttgcctgttcgccagtgtcagtctcaacctaaccttcatagtaattctttggagaaccctaccaagcccgttccctcttctaccattaccaattctgcagtacagtctacctcgaacgcatctacgatgtcagtttctagtaaagtaacaaaaccgatcccccgcagtgaatcctgctcccagcccgtgatgaatggcaaatccaagctgaactccagcgtgctggtgccctatggcgccgagtcctctgaggactctgacgaggagtcaaaggggctgggcaaggagaatgggattggtacgattgtgagctcccactctcccggccaagatgccgaagatgaggaggccactccgcacgagcttcaagaacccatgaccctaaacggtgctaatagtgcagacagcgacagtgacccgaaagaaaacggcctagcgcctgatggtgccagctgccaaggccagcctgccctgcactcagaaaatccctttgctaaggcaaacggtcttcctggaaagttgatgcctgctcctttgctgtctctcccagaagacaaaatcttagagaccttcaggcttagcaacaaactgaaaggctcgacggatgaaatgagtgcacctggagcagagaggggccctcccgaggaccgcgacgccgagcctcagcctggcagccccgccgccgaatccctggaggagccagatgcggccgccggcctcagcagcaccaagaaggctccgccgccccgcgatcccggcacccccgctaccaaagaaggcgcctgggaggccatggccgtcgcccccgaggagcctccgcccagcgccggcgaggacatcgtgggggacacagcaccccctgacctgtgtgatcccgggagcttaacaggcgatgcgagcccgttgtcccaggacgcaaaggggatgatcgcggagggcccgcgggactcggcgttggcggaagccccggaagggttgagtccggctccgcctgcgcggtcggaggagccctgcgagcagccactccttgttcaccccagcggggaccacgcccgggacgctcaggacccatcccagagcttgggcgcacccgaggccgcagagcggccgccagctcctgtgctggacatggccccggccggtcacccggaaggggacgctgagcctagccccggcgagagggtcgaggacgccgcggcgccgaaagccccaggcccttccccagcgaaggagaaaatcggcagcctcagaaaggtggaccgaggccactaccgcagccggagagagcgctcgtccagcggggagcccgccagagagagcaggagcaagactgagggccaccgtcaccggcggcgccgcacctgcccccgggagcgcgaccgccaggaccgccacgccccggagcaccaccccggccacggcgacaggctcagccctggcgagcgccgctctctgggcaggtgcagtcaccaccactcccgacaccggagcggggtggagctggactgggtcagacaccactacaccgagggcgagcgtggctggggccgggagaagttctaccccgacaggccgcgctgggacaggtgccggtactaccatgacaggtacgccctgtacgctgcccgggactggaagcccttccacggcggccgcgagcacgagcgggccgggctgcacgagcggccgcacaaggaccacaaccggggccgtaggggctgcgagccggcccgggagagggagcggcaccgccccagcagcccccgcgcaggcgcgccccacgccctcgccccgcaccccgaccgcttctcccacgacagaactgcacttgtagccggagacaactgtaacctctctgatcggtttcacgaacacgaaaatggaaagtcccggaaacggagacacgacagtgtggagaacagtgacagtcatgttgaaaagaaagcccggaggagcgaacagaaggatcctctagaagagcctaaagcaaagaagcacaaaaaatcaaagaagaaaaagaaatccaaagacaaacaccgagaccgcgactccaggcatcagcaggactcagacctctcagcagcgtgctctgacgctgacctccacagacacaaaaaaaagaagaagaaaaagaagagacattcaagaaaatcagaggactttgttaaagattcagaactgcacttacccagggtcaccagcttggagactgtcgcccagttccggagagcccagggtggctttcctctctctggtggcccgcctctggaaggcgtcggacctttccgtgagaaaacgaaacacttacggatggaaagcagggatgacaggtgtcgtctctttgagtatggccagggtgattgaaaactcagcctcaaaacaaaaaattcactagttatgattcaacgcgttcaacagaagccatccccagcccagcttaaattataaagatagacaataactctgttccaatctgc

SEQ ID NO: 197413 - DNA, 4169 bp, Homo sapiens
  Payload ID: 18938
  Gene Name: ubiquitin specific peptidase 43
  Uniprot ID: Q70EL4
  ENST ID: ENST00000285199
  CDS Start-End: 97-3468
cggcaccaggagccttagagaagctgtagggcctgctggccgctcgtccgcctcgcgcccgggggctccgcgcctggagctgcgccggcggcagccatggacctgggccccggggacgcggcaggagggggaccgctcgcgccccggccccgccgccgccgctccctgcgccgcctgttcagccgcttcctgctggcgctgggcagccgctcacgccccggggactcaccgccccggccccagccgggacactgtgatggcgacggtgaggggggcttcgcctgcgccccgggcccagttccagcggcccccgggagccccggggaggaacgcccgcccggaccccagccccagctccagctccccgccggcgatggggcgcggccgccgggcgctcagggcttgaagaaccacggcaacacctgtttcatgaacgcggtggtgcagtgtctcagcaacaccgacctgctggccgagttcctggcgctggggcgctaccgggcggctccgggccgcgccgaggtcaccgagcagctggcggcgctggtgcgcgcgctctggactcgcgaatacacgccccaactttccgcggagttcaagaatgcagtttccaagtacggctctcagttccaaggcaattcccagcacgacgccctggaattcctgctctggttgctggatcgtgtacatgaggacctggagggttcatcccgagggccggtgtcggagaagcttccgcctgaagccactaaaacctctgagaactgcctgtcaccatcagctcagcttcctctaggtcaaagctttgtgcaaagccactttcaagcacaatatagatcttccttgacttgtccccactgcctgaaacagagcaacacctttgatcctttcctgtgtgtgtccctacctatccccttgcgccagacgaggttcttgagtgtcaccttggtcttcccctctaagagccagcggttcctgcgggttggcctggccgtgccgatcctcagcacagtggcagccctgaggaagatggttgcagaggaaggaggcgtccctgcagatgaggtgatcttggttgaactgtatcccagtggattccagcggtctttctttgatgaagaggacctgaataccatcgcagagggagataatgtgtatgcctttcaagttcctccctcacccagccaggggactctctcagctcatccactgggtctgtcggcctccccacgcctggcagcccgtgagggccagcgattctccctctctctccacagtgagagcaaggtgctaatcctcttctgtaacttggtggggtcagggcagcaggctagcaggtttgggccacccttcctgataagggaagacagagctgtttcctgggcccagctccagcagtctatcctcagcaaggtccgccatcttatgaagagtgaggcccctgtacagaacctggggtctctgttctccatccgtgttgtgggactctctgtggcctgcagctatttgtctccgaaggacagtcggcccctctgtcactgggcagttgacagggttttgcatctcaggaggccaggaggccctccacatgtcaagctggcggtggagtgggatagctctgtcaaggagcgcctgttcgggagcctccaggaggagcgagcgcaggatgccgacagtgtgtggcagcagcagcaggcgcatcagcagcacagctgtaccttggatgaatgttttcagttctacaccaaggaggagcagctggcccaggatgacgcctggaagtgtcctcactgccaagtcctgcagcaggggatggtgaagctgagtttgtggacgctgcctgacatcctcatcatccacctcaaaaggttctgccaggtgggcgagagaagaaacaagctctccacgctggtgaagtttccgctctctggactcaacatggctccccatgtggcccagagaagcaccagccctgaggcaggactgggcccctggccttcctggaagcagccggactgcctgcccaccagttacccgctggacttcctgtacgacctgtatgccgtctgcaaccaccatggcaacctgcaaggtgggcattacacagcctactgccggaactctctggatggccagtggtacagttatgatgacagcacggtggaaccgcttcgagaagatgaggtcaacaccagaggggcttatatcctgttctatcagaagcggaacagcatccctccctggtcagccagcagctccatgagaggctctaccagctcctccctgtctgatcactggctcttacggctcgggagccacgctggcagcacaaggggaagcctgctgtcctggagctctgccccctgcccctccctgccccaggttcctgactctcccatcttcaccaacagcctctgcaatcaggaaaagggagggttggagcccaggcgtttggtacggggcgtgaaaggcagaagcattagcatgaaggcacccaccacttcccgagccaagcagggaccattcaagaccatgcctctgcggtggtcctttggatccaaggagaaaccaccaggtgcctccgtcgagttggtggagtacttggaatccagacgaagacctcggtccacgagccagtccattgtgtcgctgttgacgggcactgcgggtgaggatgagaagtcagcatcgccgaggtccaacgtcgcccttcctgctaacagcgaagatggtgggcgggccattgaaagaggtccagccggggtgccctgtccctcggctcaacccaaccactgtctggcccctggaaactcagatggtccaaacacagcaaggaaactcaaggaaaatgcagggcaggacatcaagcttcccagaaagtttgacctgcctctcactgtgatgccttcagtggagcatgagaaaccagctcgaccggagggccagaaggccatgaactggaaggagagcttccagatgggaagcaaaagcagcccaccctccccctatatgggattctctggaaacagcaaagacagtcgccgaggcacctctgagctagacagacccctgcaggggacactcacccttctgaggtccgtgtttcggaagaaggagaacaggaggaatgagagggcagaggtctctccacaggtgccccccgtctccctggtgagtggcgggctgagccctgccatggacgggcaggctccaggctcacctcctgccctcaggatcccagagggcctggccaggggcctgggcagccggctcgagagggatgtctggtcagcccccagctctctccgcctccctcgtaaagccagcagggccccgagaggcagtgcactgggcatgtcacaaaggactgttccaggggagcaggcttcttatggcacctttcagagagtcaaatatcacactctttctttaggtcgaaagaaaaccttaccggagtccagcttttgatggagcgtgtcagtattgtgtgacgctggcattcttgggactttgccaagcaactgtaggcagctcatgttgagaatgggtttccaggaaacccgttgtcttgtaatctctaaaaaaaaatttttttttttttgtggtggggggtctccatatctagacttccaacacccaaggtccatataacccaaggtcgaaaaccttcctgcatcattgggtgctttgctacagtttggccactagaggatgctattgggtcagtattaccagtttcagggcaagaactgatatttactaaagagttttggatgtgggcaaacaagatgaggctggtttaataagaatcttcaatgtcatgtcaaatactgtcaatggcttttcctttttctttcttttttttttttaaattgtggacttaaagaaaaatattttatttttaatgcttttctgggataagcattaaagatgccaaaaagaaaaaaaaaacaaaagaatgatagtgatggtaaggcaagattctagcaaagagagatgggagataaatggctgagagttcaggtgaatatttaatatattaaaaattgtattaaagtttttcaaggtattttaaaaataactattttgatactagaaaaaaagtccattttttaatttaaatatgagatctatgtacaattttaataaaatcctgtccatgaaacacg

SEQ ID NO: 197414 - DNA, 3500 bp, Homo sapiens
  Payload ID: 18938
  Gene Name: ubiquitin specific peptidase 43
  Uniprot ID: Q70EL4
  ENST ID: ENST00000570475
  CDS Start-End: 97-3453
cggcaccaggagccttagagaagctgtagggcctgctggccgctcgtccgcctcgcgcccgggggctccgcgcctggagctgcgccggcggcagccatggacctgggccccggggacgcggcaggagggggaccgctcgcgccccggccccgccgccgccgctccctgcgccgcctgttcagccgcttcctgctggcgctgggcagccgctcacgccccggggactcaccgccccggccccagccgggacactgtgatggcgacggtgaggggggcttcgcctgcgccccgggcccagttccagcggcccccgggagccccggggaggaacgcccgcccggaccccagccccagctccagctccccgccggcgatggggcgcggccgccgggcgctcagggcttgaagaaccacggcaacacctgtttcatgaacgcggtggtgcagtgtctcagcaacaccgacctgctggccgagttcctggcgctggggcgctaccgggcggctccgggccgcgccgaggtcaccgagcagctggcggcgctggtgcgcgcgctctggactcgcgaatacacgccccaactttccgcggagttcaagaatgcagtttccaagtacggctctcagttccaaggcaattcccagcacgacgccctggaattcctgctctggttgctggatcgtgtacatgaggacctggagggttcatcccgagggccggtgtcggagaagcttccgcctgaagccactaaaacctctgagaactgcctgtcaccatcagctcagcttcctctaggtcaaagctttgtgcaaagccactttcaagcacaatatagatcttccttgacttgtccccactgcctgaaacagagcaacacctttgatcctttcctgtgtgtgtccctacctatccccttgcgccagacgaggttcttgagtgtcaccttggtcttcccctctaagagccagcggttcctgcgggttggcctggccgtgccgatcctcagcacagtggcagccctgaggaagatggttgcagaggaaggaggcgtccctgcagatgaggtgatcttggttgaactgtatcccagtggattccagcggtctttctttgatgaagaggacctgaataccatcgcagagggagataatgtgtatgcctttcaagttcctccctcacccagccaggggactctctcagctcatccactgggtctgtcggcctccccacgcctggcagcccgtgagggccagcgattctccctctctctccacagtgagagcaaggtgctaatcctcttctgtaacttggtggggtcagggcagcaggctagcaggtttgggccacccttcctgataagggaagacagagctgtttcctgggcccagctccagcagtctatcctcagcaaggtccgccatcttatgaagagtgaggcccctgtacagaacctggggtctctgttctccatccgtgttgtgggactctctgtggcctgcagctatttgtctccgaaggacagtcggcccctctgtcactgggcagttgacagggttttgcatctcaggaggccaggaggccctccacatgtcaagctggcggtggagtgggatagctctgtcaaggagcgcctgttcgggagcctccaggaggagcgagcgcaggatgccgacagtgtgtggcagcagcagcaggcgcatcagcagcacagctgtaccttggatgaatgttttcagttctacaccaaggaggagcagctggcccaggatgacgcctggaagtgtcctcactgccaagtcctgcagcaggggatggtgaagctgagtttgtggacgctgcctgacatcctcatcatccacctcaaaaggttctgccaggtgggcgagagaagaaacaagctctccacgctggtgaagtttccgctctctggactcaacatggctccccatgtggcccagagaagcaccagccctgaggcaggactgggcccctggccttcctggaagcagccggactgcctgcccaccagttacccgctggacttcctgtacgacctgtatgccgtctgcaaccaccatggcaacctgcaagcctactgccggaactctctggatggccagtggtacagttatgatgacagcacggtggaaccgcttcgagaagatgaggtcaacaccagaggggcttatatcctgttctatcagaagcggaacagcatccctccctggtcagccagcagctccatgagaggctctaccagctcctccctgtctgatcactggctcttacggctcgggagccacgctggcagcacaaggggaagcctgctgtcctggagctctgccccctgcccctccctgccccaggttcctgactctcccatcttcaccaacagcctctgcaatcaggaaaagggagggttggagcccaggcgtttggtacggggcgtgaaaggcagaagcattagcatgaaggcacccaccacttcccgagccaagcagggaccattcaagaccatgcctctgcggtggtcctttggatccaaggagaaaccaccaggtgcctccgtcgagttggtggagtacttggaatccagacgaagacctcggtccacgagccagtccattgtgtcgctgttgacgggcactgcgggtgaggatgagaagtcagcatcgccgaggtccaacgtcgcccttcctgctaacagcgaagatggtgggcgggccattgaaagaggtccagccggggtgccctgtccctcggctcaacccaaccactgtctggcccctggaaactcagatggtccaaacacagcaaggaaactcaaggaaaatgcagggcaggacatcaagcttcccagaaagtttgacctgcctctcactgtgatgccttcagtggagcatgagaaaccagctcgaccggagggccagaaggccatgaactggaaggagagcttccagatgggaagcaaaagcagcccaccctccccctatatgggattctctggaaacagcaaagacagtcgccgaggcacctctgagctagacagacccctgcaggggacactcacccttctgaggtccgtgtttcggaagaaggagaacaggaggaatgagagggcagaggtctctccacaggtgccccccgtctccctggtgagtggcgggctgagccctgccatggacgggcaggctccaggctcacctcctgccctcaggatcccagagggcctggccaggggcctgggcagccggctcgagagggatgtctggtcagcccccagctctctccgcctccctcgtaaagccagcagggccccgagaggcagtgcactgggcatgtcacaaaggactgttccaggggagcaggcttcttatggcacctttcagagagtcaaatatcacactctttctttaggtcgaaagaaaaccttaccggagtccagcttttgatggagcgtgtcagtattgtgtgacgctggcattcttgggactttgcc

SEQ ID NO: 197415 - DNA, 3425 bp, Homo sapiens
  Payload ID: 18938
  Gene Name: ubiquitin specific peptidase 43
  ENST ID: ENST00000574408
  CDS Start-End: 1-2731
ggcaattcccagcacgacgccctggaattcctgctctggttgctggatcgtgtacatgaggacctggagggttcatcccgagggccggtgtcggagaagatcttccttgacttgtccccactgcctgaaacagagcaacacctttgatcctttcctgtgtgtgtccctacctatccccttgcgccagacgaggttcttgagtgtcaccttggtcttcccctctaagagccagcggttcctgcgggttggcctggccgtgccgatcctcagcacagtggcagccctgaggaagatggttgcagaggaaggaggcgtccctgcagatgaggtgatcttggttgaactgtatcccagtggattccagcggtctttctttgatgaagaggacctgaataccatcgcagagggagataatgtgtatgcctttcaagttcctccctcacccagccaggggactctctcagctcatccactgggtctgtcggcctccccacgcctggcagcccgtgagggccagcgattctccctctctctccacagtgagagcaaggtgctaatcctcttctgtaacttggtggggtcagggcagcaggctagcaggtttgggccacccttcctgataagggaagacagagctgtttcctgggcccagctccagcagtctatcctcagcaaggtccgccatcttatgaagagtgaggcccctgtacagaacctggggtctctgttctccatccgtgttgtgggactctctgtggcctgcagctatttgtctccgaaggacagtcggcccctctgtcactgggcagttgacagggttttgcatctcaggaggccaggaggccctccacatgtcaagctggcggtggagtgggatagctctgtcaaggagcgcctgttcgggagcctccaggaggagcgagcgcaggatgccgacagtgtgtggcagcagcagcaggcgcatcagcagcacagctgtaccttggatgaatgttttcagttctacaccaaggaggagcagctggcccaggatgacgcctggaagtgtcctcactgccaagtcctgcagcaggggatggtgaagctgagtttgtggacgctgcctgacatcctcatcatccacctcaaaaggttctgccaggtgggcgagagaagaaacaagctctccacgctggtgaagtttccgctctctggactcaacatggctccccatgtggcccagagaagcaccagccctgaggcaggactgggcccctggccttcctggaagcagccggactgcctgcccaccagttacccgctggacttcctgtacgacctgtatgccgtctgcaaccaccatggcaacctgcaaggtgggcattacacagcctactgccggaactctctggatggccagtggtacagttatgatgacagcacggtggaaccgcttcgagaagatgaggtcaacaccagaggggcttatatcctgttctatcagaagcggaacagcatccctccctggtcagccagcagctccatgagaggctctaccagctcctccctgtctgatcactggctcttacggctcgggagccacgctggcagcacaaggggaagcctgctgtcctggagctctgccccctgcccctccctgccccaggttcctgactctcccatcttcaccaacagcctctgcaatcaggaaaagggagggttggagcccaggcgtttggtacggggcgtgaaaggcagaagcattagcatgaaggcacccaccacttcccgagccaagcagggaccattcaagaccatgcctctgcggtggtcctttggatccaaggagaaaccaccaggtgcctccgtcgagttggtggagtacttggaatccagacgaagacctcggtccacgagccagtccattgtgtcgctgttgacgggcactgcgggtgaggatgagaagtcagcatcgccgaggtccaacgtcgcccttcctgctaacagcgaagatggtgggcgggccattgaaagaggtccagccggggtgccctgtccctcggctcaacccaaccactgtctggcccctggaaactcagatggtccaaacacagcaaggaaactcaaggaaaatgcagggcaggacatcaagcttcccagaaagtttgacctgcctctcactgtgatgccttcagtggagcatgagaaaccagctcgaccggagggccagaaggccatgaactggaaggagagcttccagatgggaagcaaaagcagcccaccctccccctatatgggattctctggaaacagcaaagacagtcgccgaggcacctctgagctagacagacccctgcaggggacactcacccttctgaggtccgtgtttcggaagaaggagaacaggaggaatgagagggcagaggtctctccacaggtgccccccgtctccctggtgagtggcgggctgagccctgccatggacgggcaggctccaggctcacctcctgccctcaggatcccagagggcctggccaggggcctgggcagccggctcgagagggatgtctggtcagcccccagctctctccgcctccctcgtaaagccagcagggccccgagaggcagtgcactgggcatgtcacaaaggactgttccaggggagcaggcttcttatggcacctttcagagagtcaaatatcacactctttctttaggtcgaaagaaaaccttaccggagtccagcttttgatggagcgtgtcagtattgtgtgacgctggcattcttgggactttgccaagcaactgtaggcagctcatgttgagaatgggtttccaggaaacccgttgtcttgtaatctctaaaaaaaaatttttttttttttgtggtggggggtctccatatctagacttccaacacccaaggtccatataacccaaggtcgaaaaccttcctgcatcattgggtgctttgctacagtttggccactagaggatgctattgggtcagtattaccagtttcagggcaagaactgatatttactaaagagttttggatgtgggcaaacaagatgaggctggtttaataagaatcttcaatgtcatgtcaaatactgtcaatggcttttcctttttctttcttttttttttttaaattgtggacttaaagaaaaatattttatttttaatgcttttctgggataagcattaaagatgccaaaaagaaaaaaaaaacaaaagaatgatagtgatggtaaggcaagattctagcaaagagagatgggagataaatggctgagagttcaggtgaatatttaatatattaaaaattgtattaaagtttttcaaggtattttaaaaataactattttgatactagaaaaaaagtccattttttaatttaaatatgagatctatgtacaattttaataaaatcctgtccatg

SEQ ID NO: 197416 - DNA, 2641 bp, Homo sapiens
  Payload ID: 18938
  Gene Name: ubiquitin specific peptidase 43
  ENST ID: ENST00000573955
  CDS Start-End: 1-1947
gcagcctgttcgggagcctccaggaggagcgagcgcaggatgccgacagtgtgtggcagcagcagcaggcgcatcagcagcacagctgtaccttggatgaatgttttcagttctacaccaaggaggagcaggtcccgccctgggggtccatgccccggccgggaagggggctggctgcctttggtgggttggccacgtgctgcgggggcctcacagtccgggtggtttgctttccagctggcccaggatgacgcctggaagtgtcctcactgccaagtcctgcagcaggggatggtgaagctgagtttgtggacgctgcctgacatcctcatcatccacctcaaaaggttctgccaggtgggcgagagaagaaacaagctctccacgctggtgaagtttccgctctctggactcaacatggctccccatgtggcccagagaagcaccagccctgaggcaggactgggcccctggccttcctggaagcagccggactgcctgcccaccagttacccgctggacttcctgtacgacctgtatgccgtctgcaaccaccatggcaacctgcaaggtgggcattacacagcctactgccggaactctctggatggccagtggtacagttatgatgacagcacggtggaaccgcttcgagaagatgaggtcaacaccagaggggcttatatcctgttctatcagaagcggaacagcatccctccctggtcagccagcagctccatgagaggctctaccagctcctccctgtctgatcactggctcttacggctcgggagccacgctggcagcacaaggggaagcctgctgtcctggagctctgccccctgcccctccctgccccaggttcctgactctcccatcttcaccaacagcctctgcaatcaggaaaagggagggttggagcccaggcgtttggtacggggcgtgaaaggcagaagcattagcatgaaggcacccaccacttcccgagccaagcagggaccattcaagaccatgcctctgcggtggtcctttggatccaaggagaaaccaccaggtgcctccgtcgagttggtggagtacttggaatccagacgaagacctcggtccacgagccagtccattgtgtcgctgttgacgggcactgcgggtgaggatgagaagtcagcatcgccgaggtccaacgtcgcccttcctgctaacagcgaagatggtgggcgggccattgaaagaggtccagccggggtgccctgtccctcggctcaacccaaccactgtctggcccctggaaactcagatggtccaaacacagcaaggaaactcaaggaaaatgcagggcaggacatcaagcttcccagaaagtttgacctgcctctcactgtgatgccttcagtggagcatgagaaaccagctcgaccggagggccagaaggccatgaactggaaggagagcttccagatgggaagcaaaagcagcccaccctccccctatatgggattctctggaaacagcaaagacagtcgccgaggcacctctgagctagacagacccctgcaggggacactcacccttctgaggtccgtgtttcggaagaaggagaacaggaggaatgagagggcagaggtctctccacaggtgccccccgtctccctggtgagtggcgggctgagccctgccatggacgggcaggctccaggctcacctcctgccctcaggatcccagagggcctggccaggggcctgggcagccggctcgagagggatgtctggtcagcccccagctctctccgcctccctcgtaaagccagcagggccccgagaggcagtgcactgggcatgtcacaaaggactgttccaggggagcaggcttcttatggcacctttcagagagtcaaatatcacactctttctttaggtcgaaagaaaaccttaccggagtccagcttttgatggagcgtgtcagtattgtgtgacgctggcattcttgggactttgccaagcaactgtaggcagctcatgttgagaatgggtttccaggaaacccgttgtcttgtaatctctaaaaaaaaatttttttttttttgtggtggggggtctccatatctagacttccaacacccaaggtccatataacccaaggtcgaaaaccttcctgcatcattgggtgctttgctacagtttggccactagaggatgctattgggtcagtattaccagtttcagggcaagaactgatatttactaaagagttttggatgtgggcaaacaagatgaggctggtttaataagaatcttcaatgtcatgtcaaatactgtcaatggcttttcctttttctttcttttttttttttaaattgtggacttaaagaaaaatattttatttttaatgcttttctgggataagcattaaagatgccaaaaagaaaaaaaaaacaaaagaatgatagtgatggtaaggcaagattctagcaaagagagatgggagataaatggctgagagttcaggtgaatatttaatatattaaaaattgtattaaagtttttcaaggtattttaaaaataactattttgatactagaaaaaaagtccattttttaatttaaatatgagatctatgtacaattttaataaaatcctgtccatg

SEQ ID NO: 197417 - DNA, 4022 bp, Homo sapiens
  Payload ID: 18939
  Gene Name: ubiquitin specific peptidase 44
  Uniprot ID: Q9H0E7
  ENST ID: ENST00000258499
  CDS Start-End: 290-2428
gacttcaggaaagcagtttccaggaggtgagagtttaagccaaacctgaaagaggttgatttgtaatgatttgcaggggggcactggaggcagccgccaggacttttcacttaggagatcagcatttgccctgatggaaactgggcgatcctgcagggactgacctctgagttatccaaaggccgacctggggaaagactgattttgaggttttaatagttttcagatgcttcaagtgttgtgaacagagacttgtttggattatgcatttctcagctagactaaataaatgctagcaatggatacgtgcaaacatgttgggcagctgcagcttgctcaagaccattccagcctcaaccctcagaaatggcactgtgtggactgcaacacgaccgagtccatttgggcttgccttagctgctcccatgttgcctgtggaagatatattgaagagcatgcactcaagcactttcaagaaagcagtcatcctgttgcattggaggtgaatgagatgtacgttttttgttacctttgtgatgattatgttctgaatgataacacaactggagacctgaagttactacgacgtacattaagtgccatcaaaagtcaaaattatcactgcacaactcgtagtgggaggtttttacggtccatgggtacaggtgatgattcttatttcttacatgacggtgcccaatctctgcttcaaagtgaagatcaactgtatactgctctttggcacaggagaaggatactaatgggtaaaatctttcgaacatggtttgaacaatcacccattggaagaaaaaagcaagaagaaccatttcaggaaaaaatagtagtaaaaagagaagtaaagaaaagacggcaggaattggagtatcaagttaaagcagaattggaaagtatgcctccaagaaagagtttacgtttacaagggctcgctcagtcgaccataatagaaatagtttctgttcaggtgccagcacaaacgccagcatcaccagcaaaagataaagtactctctacctcagaaaatgaaatatctcaaaaagtcagtgactcctcagttaaacgaaggccaatagtaactcctggtgtaacaggattgagaaatttgggaaatacttgctatatgaattctgttcttcaggtgttgagtcatttacttatttttcgacaatgttttttaaagcttgatctgaaccaatggctggctatgactgctagcgagaagacaagatcttgtaagcatccaccagtcacagatacagtagtatatcaaatgaatgaatgtcaggaaaaagatacaggttttgtttgctccagacaatcaagtctgtcatcaggactaagtggtggagcatcaaaaggtagaaagatggaacttattcagccaaaggagccaacttcacagtacatttctctttgtcatgaattgcatactttgttccaagtcatgtggtctggaaagtgggcgttggtctcaccatttgctatgctacactcagtgtggagactcattcctgcctttcgtggttacgcccaacaagacgctcaggaatttctttgtgaacttttagataaaatacaacgtgaattagagacaactggtaccagtttaccagctcttatccccacttctcaaaggaaactcatcaaacaagttctgaatgttgtaaataacatttttcatggacaacttcttagtcaggttacatgtcttgcatgtgacaacaaatcaaataccatagaacctttctgggacttgtcattggagtttccagaaaggtatcaatgcagtggaaaagatattgcttcccagccatgtctggttactgaaatgttggccaaatttacagaaactgaagctttagaaggaaaaatctacgtatgtgaccagtgtaactcaaagcgtagaaggttttcctccaaaccagttgtactcacagaagcccagaaacaacttatgatatgccacctacctcaggttctcagactgcacctcaaacgattcaggtggtcaggacgtaataaccgagagaagattggtgttcatgttggctttgaggaaatcttaaacatggagccctattgctgcagggagaccctgaaatccctcagaccagaatgctttatctatgacttgtccgcggtggtgatgcaccatgggaaaggatttggctcagggcactacactgcctactgctataattctgaaggagggttctgggtacactgcaatgattccaaactaagcatgtgcactatggatgaagtatgcaaggctcaagcttatatcttgttttatacccaacgagttactgagaatggacattctaaacttttgcctccagagctcctgttggggagccaacatcccaatgaagacgctgatacctcgtctaatgaaatccttagctgatccaaagacaatggggttttcttcctgtgatttatatatatactttttaaaagactgatgtaccattttaaacttcattttttcttgtgaatcagtgtatactacatttatacattttatatctaacaatttttttttttacaaagtataaatgtatatatcaactgaaggtaactacttttttcatatttggagttttaaacttttggtgtttacctcagactgatgttacctcttttatatttttatgtcttaattggctcggatgatgaacttgtgcaatcttctaccaacaaagttcaagtggcatcattttatatacatgtatctttttcaggtattttctatacaaattcttaatagatggaaaattagactctactttggtcactaatagtctttcatttgtatattgaagttaccttgccccttggagttattgaagtgacatgtcaaggtatcacctaaatattcttcagtcacactcactggtatttctgaggctttgtgtgttaacaggccttgtaattgacattattttggttaatgtaaccccaaaattgctttagtaattgctctttggcatagtcaaactataaatgaaaatggcagctttacaaatagtatatttaagtgaactctggaactatggacatgaaaaaaatgatggctgggatttatgatttttgtctggcagcaaacaggtttgtccagaagtctaataattaagcagtcataaaaagtctgaatttagtaaaccagtgtatgatgttattcaaatagtttaccttgggtatgagttcattttataatgtctgatgacattagatctcttaaaactttatgtattttttttagttcaaaggaatagagtcttgaagagaaaaaattatagggcagaaaagataagtgttcaaaattggcaactggactattattatgtctagcatctcattctaaataactaaagcttgatttactcttgctaggattatgtgactactaggtaggagcctcttaaaacactggccctgagcattaaaaaaaaaaaaaaaaactaaaagctatctatctaaacttgcacaaaaaaaaatacagtgtgagtcactctttttcttcttctgataatctcactgggtttctttaaagtcctgttgctgctaactttatcttatttggagagggtagaatcaactaatctctgtagaccagctatgtatctaagctctgttaaccacaggaagatcatgtatcccttttttataagtgggtttatttgcaggttgaagtcttagtgaaagatagtatcctgtagaatgctgttcaccactagtgatcatctgttaagtacaaacttgaaagaggtctctaccaataaatttttcttaaatttcacaaaacaagtcatctgggttagctgatagtgaggtgcagtgagacttttatcactgaatagacaaatcatttgtgccgaaaatacatctggaatattaaatggctatgtttaaaattgttcataatacctatgcaagttgttacctcaactgttacacacttcttaatacctcattaaaaatttacatggtcaagataa

SEQ ID NO: 197418 - DNA, 3161 bp, Homo sapiens
  Payload ID: 18939
  Gene Name: ubiquitin specific peptidase 44
  Uniprot ID: Q9H0E7
  ENST ID: ENST00000393091
  CDS Start-End: 145-2283
gggtcgtcgcggccgccgaaccggggggcggggggccggggtgagcgctaagatggccgccccggctcgggctgttttcagatgcttcaagtgttgtgaacagagacttgtttggattatgcatttctcagctagactaaataaatgctagcaatggatacgtgcaaacatgttgggcagctgcagcttgctcaagaccattccagcctcaaccctcagaaatggcactgtgtggactgcaacacgaccgagtccatttgggcttgccttagctgctcccatgttgcctgtggaagatatattgaagagcatgcactcaagcactttcaagaaagcagtcatcctgttgcattggaggtgaatgagatgtacgttttttgttacctttgtgatgattatgttctgaatgataacacaactggagacctgaagttactacgacgtacattaagtgccatcaaaagtcaaaattatcactgcacaactcgtagtgggaggtttttacggtccatgggtacaggtgatgattcttatttcttacatgacggtgcccaatctctgcttcaaagtgaagatcaactgtatactgctctttggcacaggagaaggatactaatgggtaaaatctttcgaacatggtttgaacaatcacccattggaagaaaaaagcaagaagaaccatttcaggaaaaaatagtagtaaaaagagaagtaaagaaaagacggcaggaattggagtatcaagttaaagcagaattggaaagtatgcctccaagaaagagtttacgtttacaagggctcgctcagtcgaccataatagaaatagtttctgttcaggtgccagcacaaacgccagcatcaccagcaaaagataaagtactctctacctcagaaaatgaaatatctcaaaaagtcagtgactcctcagttaaacgaaggccaatagtaactcctggtgtaacaggattgagaaatttgggaaatacttgctatatgaattctgttcttcaggtgttgagtcatttacttatttttcgacaatgttttttaaagcttgatctgaaccaatggctggctatgactgctagcgagaagacaagatcttgtaagcatccaccagtcacagatacagtagtatatcaaatgaatgaatgtcaggaaaaagatacaggttttgtttgctccagacaatcaagtctgtcatcaggactaagtggtggagcatcaaaaggtagaaagatggaacttattcagccaaaggagccaacttcacagtacatttctctttgtcatgaattgcatactttgttccaagtcatgtggtctggaaagtgggcgttggtctcaccatttgctatgctacactcagtgtggagactcattcctgcctttcgtggttacgcccaacaagacgctcaggaatttctttgtgaacttttagataaaatacaacgtgaattagagacaactggtaccagtttaccagctcttatccccacttctcaaaggaaactcatcaaacaagttctgaatgttgtaaataacatttttcatggacaacttcttagtcaggttacatgtcttgcatgtgacaacaaatcaaataccatagaacctttctgggacttgtcattggagtttccagaaaggtatcaatgcagtggaaaagatattgcttcccagccatgtctggttactgaaatgttggccaaatttacagaaactgaagctttagaaggaaaaatctacgtatgtgaccagtgtaactcaaagcgtagaaggttttcctccaaaccagttgtactcacagaagcccagaaacaacttatgatatgccacctacctcaggttctcagactgcacctcaaacgattcaggtggtcaggacgtaataaccgagagaagattggtgttcatgttggctttgaggaaatcttaaacatggagccctattgctgcagggagaccctgaaatccctcagaccagaatgctttatctatgacttgtccgcggtggtgatgcaccatgggaaaggatttggctcagggcactacactgcctactgctataattctgaaggagggttctgggtacactgcaatgattccaaactaagcatgtgcactatggatgaagtatgcaaggctcaagcttatatcttgttttatacccaacgagttactgagaatggacattctaaacttttgcctccagagctcctgttggggagccaacatcccaatgaagacgctgatacctcgtctaatgaaatccttagctgatccaaagacaatggggttttcttcctgtgatttatatatatactttttaaaagactgatgtaccattttaaacttcattttttcttgtgaatcagtgtatactacatttatacattttatatctaacaatttttttttttacaaagtataaatgtatatatcaactgaaggtaactacttttttcatatttggagttttaaacttttggtgtttacctcagactgatgttacctcttttatatttttatgtcttaattggctcggatgatgaacttgtgcaatcttctaccaacaaagttcaagtggcatcattttatatacatgtatctttttcaggtattttctatacaaattcttaatagatggaaaattagactctactttggtcactaatagtctttcatttgtatattgaagttaccttgccccttggagttattgaagtgacatgtcaaggtatcacctaaatattcttcagtcacactcactggtatttctgaggctttgtgtgttaacaggccttgtaattgacattattttggttaatgtaaccccaaaattgctttagtaattgctctttggcatagtcaaactataaatgaaaatggcagctttacaaatagtatatttaagtgaactctggaactatggacatgaaaaaaatgatggctgggatttatgatttttgtctggcagcaaacaggtttgtccagaagtctaataattaagcagtcataaaaagtctgaatttagtaaaccagtgtatgatgttattcaaatagtttaccttgggtatgagttcattttataatgtctgatgacattagatctcttaaaactttatgtattttttttagttcaaaggaatagagtcttg

SEQ ID NO: 197419 - DNA, 2499 bp, Homo sapiens
  Payload ID: 18939
  Gene Name: ubiquitin specific peptidase 44
  Uniprot ID: Q9H0E7
  ENST ID: ENST00000537435
  CDS Start-End: 361-2499
gattaccgcgaggtgatgctcgaagccccggggcacttcgggagggcggttgtggcactcggttgaggaggaatgcgcttcccggcgtcttgcccgccttctctccatcgatcggtccccgcgctgccggcacctgctgccgcttaaagcttgaaaatcagcttcctaaagccattcccgatggccttcgatgggaaagaatgccatatggctgaattcattatgggggataagaaatatgtcagtgtgcgcggaggggaacctgttaatacgttcaaatttaagagtagttttcagatgcttcaagtgttgtgaacagagacttgtttggattatgcatttctcagctagactaaataaatgctagcaatggatacgtgcaaacatgttgggcagctgcagcttgctcaagaccattccagcctcaaccctcagaaatggcactgtgtggactgcaacacgaccgagtccatttgggcttgccttagctgctcccatgttgcctgtggaagatatattgaagagcatgcactcaagcactttcaagaaagcagtcatcctgttgcattggaggtgaatgagatgtacgttttttgttacctttgtgatgattatgttctgaatgataacacaactggagacctgaagttactacgacgtacattaagtgccatcaaaagtcaaaattatcactgcacaactcgtagtgggaggtttttacggtccatgggtacaggtgatgattcttatttcttacatgacggtgcccaatctctgcttcaaagtgaagatcaactgtatactgctctttggcacaggagaaggatactaatgggtaaaatctttcgaacatggtttgaacaatcacccattggaagaaaaaagcaagaagaaccatttcaggaaaaaatagtagtaaaaagagaagtaaagaaaagacggcaggaattggagtatcaagttaaagcagaattggaaagtatgcctccaagaaagagtttacgtttacaagggctcgctcagtcgaccataatagaaatagtttctgttcaggtgccagcacaaacgccagcatcaccagcaaaagataaagtactctctacctcagaaaatgaaatatctcaaaaagtcagtgactcctcagttaaacgaaggccaatagtaactcctggtgtaacaggattgagaaatttgggaaatacttgctatatgaattctgttcttcaggtgttgagtcatttacttatttttcgacaatgttttttaaagcttgatctgaaccaatggctggctatgactgctagcgagaagacaagatcttgtaagcatccaccagtcacagatacagtagtatatcaaatgaatgaatgtcaggaaaaagatacaggttttgtttgctccagacaatcaagtctgtcatcaggactaagtggtggagcatcaaaaggtagaaagatggaacttattcagccaaaggagccaacttcacagtacatttctctttgtcatgaattgcatactttgttccaagtcatgtggtctggaaagtgggcgttggtctcaccatttgctatgctacactcagtgtggagactcattcctgcctttcgtggttacgcccaacaagacgctcaggaatttctttgtgaacttttagataaaatacaacgtgaattagagacaactggtaccagtttaccagctcttatccccacttctcaaaggaaactcatcaaacaagttctgaatgttgtaaataacatttttcatggacaacttcttagtcaggttacatgtcttgcatgtgacaacaaatcaaataccatagaacctttctgggacttgtcattggagtttccagaaaggtatcaatgcagtggaaaagatattgcttcccagccatgtctggttactgaaatgttggccaaatttacagaaactgaagctttagaaggaaaaatctacgtatgtgaccagtgtaactcaaagcgtagaaggttttcctccaaaccagttgtactcacagaagcccagaaacaacttatgatatgccacctacctcaggttctcagactgcacctcaaacgattcaggtggtcaggacgtaataaccgagagaagattggtgttcatgttggctttgaggaaatcttaaacatggagccctattgctgcagggagaccctgaaatccctcagaccagaatgctttatctatgacttgtccgcggtggtgatgcaccatgggaaaggatttggctcagggcactacactgcctactgctataattctgaaggagggttctgggtacactgcaatgattccaaactaagcatgtgcactatggatgaagtatgcaaggctcaagcttatatcttgttttatacccaacgagttactgagaatggacattctaaacttttgcctccagagctcctgttggggagccaacatcccaatgaagacgctgatacctcgtctaatgaaatccttagctga

SEQ ID NO: 197420 - DNA, 666 bp, Homo sapiens
  Payload ID: 18939
  Gene Name: ubiquitin specific peptidase 44
  ENST ID: ENST00000551837
  CDS Start-End: 174-666
gggcggggggccggggtgagcgctaagatggccgccccggctcgggctgccaactgtcaagtctgttcggcctcagagtatgttatagagccatgaattaaagttttcagatgcttcaagtgttgtgaacagagacttgtttggattatgcatttctcagctagactaaataaatgctagcaatggatacgtgcaaacatgttgggcagctgcagcttgctcaagaccattccagcctcaaccctcagaaatggcactgtgtggactgcaacacgaccgagtccatttgggcttgccttagctgctcccatgttgcctgtggaagatatattgaagagcatgcactcaagcactttcaagaaagcagtcatcctgttgcattggaggtgaatgagatgtacgttttttgttacctttgtgatgattatgttctgaatgataacacaactggagacctgaagttactacgacgtacattaagtgccatcaaaagtcaaaattatcactgcacaactcgtagtgggaggtttttacggtccatgggtacaggtgatgattcttatttcttacatgacggtgcccaatctctgcttcaaagtgaagatcaactgtatactgctctttggcacaggagaaggatactaatgggtaaaatctttcgaacat

SEQ ID NO: 197421 - DNA, 1818 bp, Homo sapiens
  Payload ID: 18939
  Gene Name: ubiquitin specific peptidase 44
  ENST ID: ENST00000552440
  CDS Start-End: 71-1561
ttttcagatgcttcaagtgttgtgaacagagacttgtttggattatgcatttctcagctagactaaataaatgctagcaatggatacgtgcaaacatgttgggcagctgcagcttgctcaagaccattccagcctcaaccctcagaaatggcactgtgtggactgcaacacgaccgagtccatttgggcttgccttagctgctcccatgttgcctgtggaagatatattgaagagcatgcactcaagcactttcaagaaagcagtcatcctgttgcattggaggtgaatgagatgtacgttttttgttacctttgtgatgattatgttctgaatgataacacaactggagacctgaagttactacgacgtacattaagtgccatcaaaagtcaaaattatcactgcacaactcgtagtgggaggtttttacggtccatgggtacaggtgatgattcttatttcttacatgacggtgcccaatctctgcttcaaagtgaagatcaactgtatactgctctttggcacaggagaaggatactaatgggtaaaatctttcgaacatggtttgaacaatcacccattggaagaaaaaagcaagaagaaccatttcaggaaaaaatagtagtaaaaagagaagtaaagaaaagacggcaggaattggagtatcaagttaaagcagaattggaaagtatgcctccaagaaagagtttacgtttacaagggctcgctcagtcgaccataatagaaatagtttctgttcaggtgccagcacaaacgccagcatcaccagcaaaagataaagtactctctacctcagaaaatgaaatatctcaaaaagtcagtgactcctcagttaaacgaaggccaatagtaactcctggtgtaacaggattgagaaatttgggaaatacttgctatatgaattctgttcttcaggtgttgagtcatttacttatttttcgacaatgttttttaaagcttgatctgaaccaatggctggctatgactgctagcgagaagacaagatcttgtaagcatccaccagtcacagatacagtagtatatcaaatgaatgaatgtcaggaaaaagatacaggttttgtttgctccagacaatcaagtctgtcatcaggactaagtggtggagcatcaaaaggtagaaagatggaacttattcagccaaaggagccaacttcacagtacatttctctttgtcatgaattgcatactttgttccaagtcatgtggtctggaaagtgggcgttggtctcaccatttgctatgctacactcagtgtggagactcattcctgcctttcgtggttacgcccaacaagacgctcaggaatttctttgtgaacttttagataaaatacaacgtgaattagagacaactggtaccagtttaccagctcttatccccacttctcaaaggaaactcatcaaacaagttctgaatgttgtaaataacatttttcatggacaacttcttagtcagcaaagcgtagaaggttttcctccaaaccagttgtactcacagaagcccagaaacaacttatgatatgccacctacctcaggttctcagactgcacctcaaacgattcagggttctgggtacactgcaatgattccaaactaagcatgtgcactatggatgaagtatgcaaggctcaagcttatatcttgttttatacccaacgagttactgagaatggacattctaaacttttgcctccagagctcctgttggggagccaacatcccaatgaagacgctgatacctcgtctaatgaaatccttagctgatccaaagacaa

SEQ ID NO: 197422 - DNA, 677 bp, Homo sapiens
  Payload ID: 18939
  Gene Name: ubiquitin specific peptidase 44
  ENST ID: ENST00000549639
  CDS Start-End: 344-677
gctaagatggccgccccggctcgggctggtgagtgtgcgcgagggcgcgcggccgcggcgattggcggagtgaggacccctgcgggagcggacgtgcgacggcagcccccggggccgggaggcacctgggggcctattctcgccgcgcagggcgctggggggtcctgagagagggagagcctggggctgcgggcgcgcggaagggaatgagccgaggggcgcgcggcggcgacgcgtccggcgaattttgaattgcccccctgggaagtttcgttttcagatgcttcaagtgttgtgaacagagacttgtttggattatgcatttctcagctagactaaataaatgctagcaatggatacgtgcaaacatgttgggcagctgcagcttgctcaagaccattccagcctcaaccctcagaaatggcactgtgtggactgcaacacgaccgagtccatttgggcttgccttagctgctcccatgttgcctgtggaagatatattgaagagcatgcactcaagcactttcaagaaagcagtcatcctgttgcattggaggtgaatgagatgtacgttttttgttacctttgtgatgattatgttctgaatgataacacaactggagacctgaagttactacgacgtacattaagtgccatcaaaagtcaaaattatcact

SEQ ID NO: 197423 - DNA, 1444 bp, Homo sapiens
  Payload ID: 18940
  Gene Name: ubiquitin specific peptidase 45
  ENST ID: ENST00000329966
  CDS Start-End: 109-978
tgggggcgggcgaacgaggccccacctctgccgggagcgggacgagcgcgcaggcgcagtctccccaggttgtagacgctgcggcccggcccggcgggtaaataacagatgcgggtgaaagatccaactaaagctttacctgagaaagccaaaagaagtaaaaggcctactgtacctcatgatgaagactcttcagatgatattgctgtaggtttaacttgccaacatgtaagtcatgctatcagcgtgaatcatgtaaagagagcaatagctgagaatctgtggtcagtttgctcagaatgtttaaaagaaagaagattctatgatgggcagctagtacttacttctgatatttggttgtgcctcaagtgtggcttccagggatgtggtaaaaactcagaaagccaacattcattgaagcactttaagagttccagaacagagccccattgtattataattaatctgagcacatggattatatggtgttatgaatgtgatgaaaaattatcaacgcattgtaataagaaggttttggctcagatagttgattttctccagaaacatgcttctaaaacacaaacaagtgcattttctagaatcatgaaactttgtgaagaaaaatgtgaaacagatgaaatacagaagggaggaaaatgcagaaatttatctgtaagaggaattacaaatttaggaaatacttgcttttttaatgcagtcatgcagaacttggcacagacttatactcttactgatctgatgaatgagatcaaagaaagtagtacaaaactcaagatttttccttcctcagactctcagctggacccattggtggtggaactttcaaggcctggaccactgacctcagccttgttcctgtttcttcacagcatgaaggagactgaaaaaggaccactttctcctaaagttctttttaatcagctttgtcagaagtgggtgcatctacatttaatataaataattatgagttacaaaatactaatgtattcatcatttaacatgaatagtcgtttttactgtaactttgctcttattgccctgactatgaagagaactaaaatttgttacagctctatgctttatgaaaattatatctcagtcctcagaagaagcagcttatcctcatatataaggaaatggagacacagaaattaaatggctcacctagtctgagtgaaaagctgagaatcaaatggagatctgtcctgacttggatgcctatgttgtaataccataaagtgagaaaaccatagagttgtaaaatctagaaagtaccgtaagataacatctaatctagctttcttattttaaaagatgagctgtgaggcaaatagagtttaagtgaatttctcaaggtattacagtatgtttaaaaaccaaatccttatgtgcctggaaataaacacataaaggatctgacttg

SEQ ID NO: 197424 - DNA, 6255 bp, Homo sapiens
  Payload ID: 18940
  Gene Name: ubiquitin specific peptidase 45
  Uniprot ID: Q70EL2
  ENST ID: ENST00000327681
  CDS Start-End: 534-2978
ggcgctttggtcgcagcggcggtatggtcgccgcagtttctcggtcttcgcttcggcgaccttgacccccttgtgggtgggcgaggctggaagagaggctccccaccccactcggcttcctgatccctgggggcgccgggcggtcaccgagggccgtgtgagcgccgctctgccggctccgggtccatgcggctgcgggagaagccctgggcgtcggggctggcctgggaggggcccgagtcccctggtgacctgggcgcgcggcggccccacacctttccgtccgcctcatcgcggcgcatttctcttcacatcctcggggtgtgtgtgtgttggtgaccggaggaagcctgtctaatgacttttctggaagcgtcgtgtattaggagctccggggccggactgcttgggtccgcatctccatccaccgcttactggctttgggacctctgcaagtcacttcacttctctttctcagtttcaagtgtaaaatgcggaaaataatagcaacttatctcctaagtaaataacagatgcgggtgaaagatccaactaaagctttacctgagaaagccaaaagaagtaaaaggcctactgtacctcatgatgaagactcttcagatgatattgctgtaggtttaacttgccaacatgtaagtcatgctatcagcgtgaatcatgtaaagagagcaatagctgagaatctgtggtcagtttgctcagaatgtttaaaagaaagaagattctatgatgggcagctagtacttacttctgatatttggttgtgcctcaagtgtggcttccagggatgtggtaaaaactcagaaagccaacattcattgaagcactttaagagttccagaacagagccccattgtattataattaatctgagcacatggattatatggtgttatgaatgtgatgaaaaattatcaacgcattgtaataagaaggttttggctcagatagttgattttctccagaaacatgcttctaaaacacaaacaagtgcattttctagaatcatgaaactttgtgaagaaaaatgtgaaacagatgaaatacagaagggaggaaaatgcagaaatttatctgtaagaggaattacaaatttaggaaatacttgcttttttaatgcagtcatgcagaacttggcacagacttatactcttactgatctgatgaatgagatcaaagaaagtagtacaaaactcaagatttttccttcctcagactctcagctggacccattggtggtggaactttcaaggcctggaccactgacctcagccttgttcctgtttcttcacagcatgaaggagactgaaaaaggaccactttctcctaaagttctttttaatcagctttgtcagaaggcacctcgatttaaagatttccagcaacaggacagtcaggagcttcttcattatcttctggatgcagtgaggacagaagaaacaaagcgaatacaagctagcattctaaaagcatttaacaacccaactactaaaactgctgatgatgaaactagaaaaaaagtcaaagcatatggaaaagaaggtgtgaaaatgaacttcatagatcggatctttattggtgaattaactagcacggtcatgtgtgaagaatgtgcaaatatctccacggtgaaagatccattcattgatatttcacttcctataatagaagaaagggtttcaaaacctttactttggggaagaatgaataaatatagaagtttacgggagacagatcatgatcgatacagtggcaatgttactatagaaaatattcatcaacctagagctgccaagaagcattcttcatctaaagataagagtcaactaattcatgaccgaaaatgtattagaaaattgtcatctggagaaactgtcacataccagaaaaatgaaaaccttgaaatgaatggggattctttaatgtttgccagcctcatgaattctgagtcacgtctgaatgaaagccctactgatgacagtgaaaaagaagccagccattctgaaagcaatgttgatgctgacagtgagccttcagaatctgaaagtgcttcaaagcagactgggctgttcagatccagtagtggatccggtgtgcagccagatggacccctttaccctctgtcagcaggtaaactgctgtacaccaaggagactgacagtggtgataaggaaatggcagaagctatttctgaacttcgtttgagcagcactgtaactggagatcaagattttgacagagaaaatcagccactaaatatttcaaataatttatgttttttagaggggaagcatttgaggtcttatagtccccaaaatgcttttcagaccctttctcagagctatataactacttctaaagaatgttcaattcagtcctgtctctaccagtttacatctatggaattactaatggggaataataagcttctatgtgagaattgtactaaaaacaaacagaagtaccaagaagaaaccagttttgcagaaaagaaagtagaaggagtttatactaatgccaggaagcaattgctcatttctgctgttccagctgtcctaattctccacctgaaaagatttcatcaggctggcttgagtcttcgtaaagtaaacagacatgtagattttccacttatgctcgatttagcaccattctgctctgctacttgtaagaatgcaagtgtgggagataaagttctctacggtctctatggcatagtggaacatagtggctcgatgagagaaggccactacactgcttatgtgaaagtgagaacaccctccaggaaattatcggaacataacactaaaaagaaaaatgtgcctggtttgaaagcggctgataatgaatcagcaggccagtgggtccatgttagtgacacttacttacaggtggttccagaatcaagagcacttagtgcacaagcctaccttcttttctatgaaagagtattataactattaatggtaatgattatttaggtcatttgtttttgaatgccacagtgataactataatatataatgtgcctttctagtcttccctcttctgtaggaatagcatgttcctcaaatggtcctgaactttttcaccattttggtgaacccttttaaagtaaatttactcaatgctttaaaattcatagtcttaaaataaatgtgaattttgtttccaggtatttattctggggtacaaaaacttcccagaatttacagtaggaaaggaaacccctttatgatgtggcttattattacaagcattcagaaatgatgctggctaagtcaaatcattccttgagacagtgattcctaaatgtaatgccaccttcctgaactctcacatattctatatcatggttattttaaaaaatatatttttagccttttgtaaccttagtcttgttttgagcaatcatattccgtgttttatgtgcttttatatttttataataaatattaaagtaaaactattaaaaattgtttatccacgtaccacttaacttaaaatcatctcagggccatctagtggtatatatgtgtactaccatttaggaaactgctataacacataatttcatgaagtaacacctaatacggtgtagttccctggtcatattttatacaattcaaccatataaaagggtgtcactgtaatttcagtagtgtgggtttacaaataatctgctggttagcttattaccttgaggttttgaaaaactagaattatattgaggcatttcataaacatatctcttgcaccctcttcatggtggagttaaggataacttgcaggtggttggccaaggcccaatatagatgattataacatttagaattggcaattagaagttgataatccatataggaccataggatagctttgaaatataaattaccaaattatatttgtaaatgatagagaattatattcttaacagaaaaatatatactttttctacttcttgtaaatactaaacacagttttggggttttgaaatcactttgtcttcagcaagcatcattaataagttcaggtgaatttagcttttaatggggcattaagctggcatttttgattttctttttaaataatagcaaaaatatcatttttcccctctagaatacaaattattgagctgtcaaaacttggcatgaagaatatactattacttaggcttaaatatcaaaagataatggctacttcagtgtcatattgttgaaatagaaacaaaactgcatggttcaagcatcctaatcattagtgccaatgaatgatagtgcaggcaagtgccaggtaaatgcctagtcccacttcattctcctcctgggaagaaaggataagaatagtggctgcagataaggtatggaaatatttaatcaagactgtcttaaacacataagcatatataatgttatcaaggttaccagtgctgccttttgatatatggatgaacataactgtaattaaagacggtaatagtatacaaaatgcagagcttaaaaatgtcattgcataaattctatttttaagatgttgaaatgttagtagtgtttttcttgatttttaacagtgaaataatcaagaaatatatctttaagttaatctgcaaagtcaggctgtgttctgtaaaaggtatttcacagcattttctgtttaactgtaatctgttatcatggagatctcagtaccagagcagtgaattttttgaaaaatattgactgtctttattcaagtcagccatcttggtaagagcagttttcatccccccactgcccaaatgtaaatatagatcacctaatttttcttacagaaagatactgttaagaggcatgcacttttcatcggatggtcacttgtttcttgtttcaaagacaaatatttggatagatacccatacttgctatgagtcagtcacagtgctgacactattttaacatcatttaaaatggaaagatctacatagatttttgacattattccagaagtaacatgcaagtaagatatttttattgtcattttcttcatgttaaaggagctacttatgaaacctatttttttatggcctagagtttatgagtgctttttccttgtcttctgaaaatggaataaattggatttttgatacttaagaatttcctaaagatagcttttgtaacagagaaagcatgttaaattacacatgggtctaccttaaaatttttgttattatttccaaagcacatttgcagggatagtaaatgtatatagtagcaagtctactataataacagtagtttctggatcacctcaggaaacagtataaataaataataatgtttacttatcatcaacataactaccatagtgtttgaatgaattaaagtttcattagctttatttagaaactggtttaccccagcttcccgtttttttccaaatataaaatgataaaatattgattatgtgccaatattgtcatttaatgttcttaaaacttgtgaagaccacctttttaggtagctgagaagagtgatagttggtatcaatttgttagccaggcatggtggctcatgctgttgggaggctgagtggggaagatgcttgagcccaggaggtcaaggtgcagtgaaccatgatcacaccactgcattcctgcagagtgacggagtgagaccctgtctcaaaaataaataaaaagaagacagttggtatcaattcaaagaatagttgatgcctgttctcttattttaaatgtaccaacagagctattttactgtatttaatagttcttagcttccatgtgtgatgattttaatcagtgattttatgcaatagctgaagaaaattttctgaagattaagctgtgaaatgtatcaaccctcatctaatttttgtagtacaaaatgacatcctgattccttttaaaaattcacgtttgtaatttatttttctgcatgtattgatcaaataagcctaaaccaaatatgtgcaataaaattgagcctttagatagtatctagtgcattgttaaaaaagattatttctagatatttatgatgtttttgtttacgtagaaatcatgaattcaaatgtttaaaagatgaccatattttcaattttgagtaatacatattattcctactgttttttttcttttgccatgtttctagaaaacagctgtgtaacttattgagcgttattttggtgttactgtataaaacatgcataataaatattcttatttatctcatgtta

SEQ ID NO: 197425 - DNA, 2514 bp, Homo sapiens
  Payload ID: 18940
  Gene Name: ubiquitin specific peptidase 45
  ENST ID: ENST00000369233
  CDS Start-End: 42-2342
ggttgtagacgctgcggcccggcccggcgggtaaataacagatgcgggtgaaagatccaactaaagctttacctgagaaagccaaaagaagtaaaaggcctactgtacctcatgatgaagactcttcagatgatattgctgtaggtttaacttgccaacatgtaagtcatgctatcagcgtgaatcatgtaaagagagcaatagctgagaatctgtggtcagtttgctcagaatgtttaaaagaaagaagattctatgatgggcagctagtacttacttctgatatttggttgtgcctcaagtgtggcttccagggatgtggtaaaaactcagaaagccaacattcattgaagcactttaagagttccagaacagagccccattgtattataattaatctgagcacatggattatatggtgttatgaatgtgatgaaaaattatcaacgcattgtaataagaaggttttggctcagatagttgattttctccagaaacatgcttctaaaacacaaacaagtgcattttctagaatcatgaaactttgtgaagaaaaatgtgaaacagatgaaatacagaagggaggaaaatgcagaaatttatctgtaagaggaattacaaatttaggaaatacttgcttttttaatgcagtcatgcagaacttggcacagacttatactcttactgatctgatgaatgagatcaaagaaagtagtacaaaactcaagatttttccttcctcagactctcagctggacccattggtggtggaactttcaaggcctggaccactgacctcagccttgttcctgtttcttcacagcatgaaggagactgaaaaaggaccactttctcctaaagttctttttaatcagctttgtcagaaggcacctcgatttaaagatttccagcaacaggacagtcaggagcttcttcattatcttctggatgcagtgaggacagaagaaacaaagcgaatacaagctagcattctaaaagcatttaacaacccaactactaaaactgctgatgatgaaactagaaaaaaagtcaaagcatatggaaaagaaggtgtgaaaatgaacttcatagatcggatctttattggtgaattaactagcacggtcatgtgtgaagaatgtgcaaatatctccacggtgaaagatccattcattgatatttcacttcctataatagaagaaaggagtcaactaattcatgaccgaaaatgtattagaaaattgtcatctggagaaactgtcacataccagaaaaatgaaaaccttgaaatgaatggggattctttaatgtttgccagcctcatgaattctgagtcacgtctgaatgaaagccctactgatgacagtgaaaaagaagccagccattctgaaagcaatgttgatgctgacagtgagccttcagaatctgaaagtgcttcaaagcagactgggctgttcagatccagtagtggatccggtgtgcagccagatggacccctttaccctctgtcagcaggtaaactgctgtacaccaaggagactgacagtggtgataaggaaatggcagaagctatttctgaacttcgtttgagcagcactgtaactggagatcaagattttgacagagaaaatcagccactaaatatttcaaataatttatgttttttagaggggaagcatttgaggtcttatagtccccaaaatgcttttcagaccctttctcagagctatataactacttctaaagaatgttcaattcagtcctgtctctaccagtttacatctatggaattactaatggggaataataagcttctatgtgagaattgtactaaaaacaaacagaagtaccaagaagaaaccagttttgcagaaaagaaagtagaaggagtttatactaatgccaggaagcaattgctcatttctgctgttccagctgtcctaattctccacctgaaaagatttcatcaggctggcttgagtcttcgtaaagtaaacagacatgtagattttccacttatgctcgatttagcaccattctgctctgctacttgtaagaatgcaagtgtgggagataaagttctctacggtctctatggcatagtggaacatagtggctcgatgagagaaggccactacactgcttatgtgaaagtgagaacaccctccaggaaattatcggaacataacactaaaaagaaaaatgtgcctggtttgaaagcggctgataatgaatcagcaggccagtgggtccatgttagtgacacttacttacaggtggttccagaatcaagagcacttagtgcacaagcctaccttcttttctatgaaagagtattataactattaatggtaatgattatttaggtcatttgtttttgaatgccacagtgataactataatatataatgtgcctttctagtcttccctcttctgtaggaatagcatgttcctcaaatggtcctgaactttttcaccattttggtgaacccttttaaagtaaatttactcaat

SEQ ID NO: 197426 - DNA, 5319 bp, Homo sapiens
  Payload ID: 18940
  Gene Name: ubiquitin specific peptidase 45
  ENST ID: ENST00000496518
  CDS Start-End: 1-628
aggtttaacttgccaacatgtaagtcatgctatcagcgtgaatcatgtaaagagagcaatagctgagaatctgtggtcagtttgctcagaatgtttaaaagaaagaagattctatgatgggcagctagtacttacttctgatatttggttgtgcctcaagtgtggcttccagggatgtggtaaaaactcagaaagccaacattcattgaagcactttaagagttccagaacagagccccattgtattataattaatctgagcacatggattatatggtgttatgaatgtgatgaaaaattatcaacgcattgtaataagaaggttttggctcagatagttgattttctccagaaacatgcttctaaaacacaaacaagtgcattttctagaatcatgaaactttgtgaagaaaaatgtgaaacagatgaaatacagaagggaggaaaatgcagaaatttatctgtaagaggaattacaaatttaggaaatacttgcttttttaatgcagtcatgcagaacttggcacagacttatactcttactgatctgatgaatgagatcaaagaaagtagtacaaaactcaagatttttccttcctcagactctcagctgggcacctcgatttaaagatttccagcaacaggacagtcaggagcttcttcattatcttctggatgcagtgaggacagaagaaacaaagatctccacggtgaaagatccattcattgatatttcacttcctataatagaagaaagggtttcaaaacctttactttggggaagaatgaataaatatagaagtttacgggagacagatcatgatcgatacagtggcaatgttactatagaaaatattcatcaacctagagctgccaagaagcattcttcatctaaagataagagtcaactaattcatgaccgaaaatgtattagaaaattgtcatctggagaaactgtcacataccagaaaaatgaaaaccttgaaatgaatggggattctttaatgtttgccagcctcatgaattctgagtcacgtctgaatgaaagccctactgatgacagtgaaaaagaagccagccattctgaaagcaatgttgatgctgacagtgagccttcagaatctgaaagtgcttcaaagcagactgggctgttcagatccagtagtggatccggtgtgcagccagatggacccctttaccctctgtcagcaggtaaactgctgtacaccaaggagactgacagtggtgataaggaaatggcagaagctatttctgaacttcgtttgagcagcactgtaactggagatcaagattttgacagagaaaatcagccactaaatatttcaaataatttatgttttttagaggggaagcatttgaggtcttatagtccccaaaatgcttttcagaccctttctcagagctatataactacttctaaagaatgttcaattcagtcctgtctctaccagtttacatctatggaattactaatggggaataataagcttctatgtgagaattgtactaaaaacaaacagaagtaccaagaagaaaccagttttgcagaaaagaaagtagaaggagtttatactaatgccaggaagcaattgctcatttctgctgttccagctgtcctaattctccacctgaaaagatttcatcaggctggcttgagtcttcgtaaagtaaacagacatgtagattttccacttatgctcgatttagcaccattctgctctgctacttgtaagaatgcaagtgtgggagataaagttctctacggtctctatggcatagtggaacatagtggctcgatgagagaaggccactacactgcttatgtgaaagtgagaacaccctccaggaaattatcggaacataacactaaaaagaaaaatgtgcctggtttgaaagcggctgataatgaatcagcaggccagtgggtccatgttagtgacacttacttacaggtggttccagaatcaagagcacttagtgcacaagcctaccttcttttctatgaaagagtattataactattaatggtaatgattatttaggtcatttgtttttgaatgccacagtgataactataatatataatgtgcctttctagtcttccctcttctgtaggaatagcatgttcctcaaatggtcctgaactttttcaccattttggtgaacccttttaaagtaaatttactcaatgctttaaaattcatagtcttaaaataaatgtgaattttgtttccaggtatttattctggggtacaaaaacttcccagaatttacagtaggaaaggaaacccctttatgatgtggcttattattacaagcattcagaaatgatgctggctaagtcaaatcattccttgagacagtgattcctaaatgtaatgccaccttcctgaactctcacatattctatatcatggttattttaaaaaatatatttttagccttttgtaaccttagtcttgttttgagcaatcatattccgtgttttatgtgcttttatatttttataataaatattaaagtaaaactattaaaaattgtttatccacgtaccacttaacttaaaatcatctcagggccatctagtggtatatatgtgtactaccatttaggaaactgctataacacataatttcatgaagtaacacctaatacggtgtagttccctggtcatattttatacaattcaaccatataaaagggtgtcactgtaatttcagtagtgtgggtttacaaataatctgctggttagcttattaccttgaggttttgaaaaactagaattatattgaggcatttcataaacatatctcttgcaccctcttcatggtggagttaaggataacttgcaggtggttggccaaggcccaatatagatgattataacatttagaattggcaattagaagttgataatccatataggaccataggatagctttgaaatataaattaccaaattatatttgtaaatgatagagaattatattcttaacagaaaaatatatactttttctacttcttgtaaatactaaacacagttttggggttttgaaatcactttgtcttcagcaagcatcattaataagttcaggtgaatttagcttttaatggggcattaagctggcatttttgattttctttttaaataatagcaaaaatatcatttttcccctctagaatacaaattattgagctgtcaaaacttggcatgaagaatatactattacttaggcttaaatatcaaaagataatggctacttcagtgtcatattgttgaaatagaaacaaaactgcatggttcaagcatcctaatcattagtgccaatgaatgatagtgcaggcaagtgccaggtaaatgcctagtcccacttcattctcctcctgggaagaaaggataagaatagtggctgcagataaggtatggaaatatttaatcaagactgtcttaaacacataagcatatataatgttatcaaggttaccagtgctgccttttgatatatggatgaacataactgtaattaaagacggtaatagtatacaaaatgcagagcttaaaaatgtcattgcataaattctatttttaagatgttgaaatgttagtagtgtttttcttgatttttaacagtgaaataatcaagaaatatatctttaagttaatctgcaaagtcaggctgtgttctgtaaaaggtatttcacagcattttctgtttaactgtaatctgttatcatggagatctcagtaccagagcagtgaattttttgaaaaatattgactgtctttattcaagtcagccatcttggtaagagcagttttcatccccccactgcccaaatgtaaatatagatcacctaatttttcttacagaaagatactgttaagaggcatgcacttttcatcggatggtcacttgtttcttgtttcaaagacaaatatttggatagatacccatacttgctatgagtcagtcacagtgctgacactattttaacatcatttaaaatggaaagatctacatagatttttgacattattccagaagtaacatgcaagtaagatatttttattgtcattttcttcatgttaaaggagctacttatgaaacctatttttttatggcctagagtttatgagtgctttttccttgtcttctgaaaatggaataaattggatttttgatacttaagaatttcctaaagatagcttttgtaacagagaaagcatgttaaattacacatgggtctaccttaaaatttttgttattatttccaaagcacatttgcagggatagtaaatgtatatagtagcaagtctactataataacagtagtttctggatcacctcaggaaacagtataaataaataataatgtttacttatcatcaacataactaccatagtgtttgaatgaattaaagtttcattagctttatttagaaactggtttaccccagcttcccgtttttttccaaatataaaatgataaaatattgattatgtgccaatattgtcatttaatgttcttaaaacttgtgaagaccacctttttaggtagctgagaagagtgatagttggtatcaatttgttagccaggcatggtggctcatgctgttgggaggctgagtggggaagatgcttgagcccaggaggtcaaggtgcagtgaaccatgatcacaccactgcattcctgcagagtgacggagtgagaccctgtctcaaaaataaataaaaagaagacagttggtatcaattcaaagaatagttgatgcctgttctcttattttaaatgtaccaacagagctattttactgtatttaatagttcttagcttccatgtgtgatgattttaatcagtgattttatgcaatagctgaagaaaattttctgaagattaagctgtgaaatgtatcaaccctcatctaatttttgtagtacaaaatgacatcctgattccttttaaaaattcacgtttgtaatttatttttctgcatgtattgatcaaataagcctaaaccaaatatgtgcaataaaattgagcctttagatagtatctagtgcattgttaaaaaagattatttctagatatttatgatgtttttgtttacgtagaaatcatgaattcaaatgtttaaaagatgaccatattttcaattttgagtaatacatattattcctactgttttttttcttttgccatgtttctagaaaacagctgtgtaacttattgagcgttattttggtgttactgtataaaacatgcataataaatattcttatttatctcatgttacaa

SEQ ID NO: 197427 - DNA, 658 bp, Homo sapiens
  Payload ID: 18940
  Gene Name: ubiquitin specific peptidase 45
  ENST ID: ENST00000496090
  CDS Start-End: 1-446
agcaacaggacagtcaggagcttcttcattatcttctggatgcagtgaggacagaagaaacaaagcgaatacaagctagcattctaaaagcatttaacaacccaactactaaaactgctgatgatgaaactagaaaaaaagtcaaagcatatggaaaagaaggtgtgaaaatgaacttcatagatcggatctttattggtgaattaactagcacggtcatgtgtgaagaatgtgcaaatatctccacggtgaaagatccattcattgatatttcacttcctataatagaagaaagggtttcaaaacctttactttggggaagaatgaataaatatagaagtttacgggagacagatcatgatcgatacagtggcaatgttactatagaaaatattcatcaacctagagctgccaagaagcattcttcatctaaagataagagatagggttttgtcatgttggctgggctggtctcaaactcctgatgacctcaagtgatctacctgccttggtctcccaaagtgctggaattgcaggtgtgagccacagcgctgggcctgaatttaacttactctgttagaagacttatgttagaagtcacaagacttcagaaaggacaacatgttttctataaataaaagctaattttgcttcataa

SEQ ID NO: 197428 - DNA, 1741 bp, Homo sapiens
  Payload ID: 18940
  Gene Name: ubiquitin specific peptidase 45
  ENST ID: ENST00000506871
  CDS Start-End: 11-1048
taaataacagatgcgggtgaaagatccaactaaagctttacctgagaaagccaaaagaagtaaaaggcctactgtacctcatgatgaagactcttcagatgatattgctgtaggtttaacttgccaacatgtaagtcatgctatcagcgtgaatcatgtaaagagagcaatagctgagaatctgtggtcagtttgctcagaatgtttaaaagaaagaagattctatgatgggcagctagtacttacttctgatatttggttgtgcctcaagtgtggcttccagggatgtggtaaaaactcagaaagccaacattcattgaagcactttaagagttccagaacagagccccattgtattataattaatctgagcacatggattatatggtgttatgaatgtgatgaaaaattatcaacgcattgtaataagaaggttttggctcagatagttgattttctccagaaacatgcttctaaaacacaaacaagtgcattttctagaatcatgaaactttgtgaagaaaaatgtgaaacagatgaaatacagaagggaggaaaatgcagaaatttatctgtaagaggaattacaaatttaggaaatacttgcttttttaatgcagtcatgcagaacttggcacagacttatactcttactgatctgatgaatgagatcaaagaaagtagtacaaaactcaagatttttccttcctcagactctcagctggacccattggtggtggaactttcaaggcctggaccactgacctcagccttgttcctgtttcttcacagcatgaaggagactgaaaaaggaccactttctcctaaagttctttttaatcagctttgtcagaaggcacctcgatttaaagatttccagcaacaggacagtcaggagcttcttcattatcttctggatgcagtgaggacagaagaaacaaagcgaatacaagctagcattctaaaagcatttaacaacccaactactaaaactgctgatgatgaaactagaaaaaaagtcaaagatgtaactagacaaaatgtttaagtgctccaaagactcctgcaaataaaccgtttattgaagagagtgctgcatatggaaaagaaggtgtgaaaatgaacttcatagatcggatctttattggtgaattaactagcacggtcatgtgtgaagaatgtgcaaatatctccacggtgaaagatccattcattgatatttcacttcctataatagaagaaagggtttcaaaacctttactttggggaagaatgaataaatatagaagtttacgggagacagatcatgatcgatacagtggcaatgttactatagaaaatattcatcaacctagagctgccaagaagcattcttcatctaaagataagagatagggttttgtcatgttggctgggctggtctcaaactcctgatgacctcaagtgatctacctgccttggtctcccaaagtgctggaattgcaggtgtgagccacagcgctgggcctgaatttaacttactctgttagaagacttatgttagaagtcacaagacttcagaaaggacaacatgttttctataaataaaagctaattttgcttcataagatatataggacagttaaattcaatttgagcatatgctttattctaatggtataaaacaaagcatcttacagagtttgaaaaggttaaagcattaattgtgttgctattcccctaaaaagcactggttattaaa

SEQ ID NO: 197429 - DNA, 622 bp, Homo sapiens
  Payload ID: 18940
  Gene Name: ubiquitin specific peptidase 45
  ENST ID: ENST00000511403
  CDS Start-End: 1-408
ctttcaaggcctggaccactgacctcagccttgttcctgtttcttcacagcatgaaggagactgaaaaaggaccactttctcctaaagttctttttaatcagctttgtcagaaggcacctcgatttaaagatttccagcaacaggacagtcaggagcttcttcattatcttctggatgcagtgaggacagaagaaacaaagatctccacggtgaaagatccattcattgatatttcacttcctataatagaagaaagggtttcaaaacctttactttggggaagaatgaataaatatagaagtttacgggagacagatcatgatcgatacagtggcaatgttactatagaaaatattcatcaacctagagctgccaagaagcattcttcatctaaagataagagatagggttttgtcatgttggctgggctggtctcaaactcctgatgacctcaagtgatctacctgccttggtctcccaaagtgctggaattgcaggtgtgagccacagcgctgggcctgaatttaacttactctgttagaagacttatgttagaagtcacaagacttcagaaaggacaacatgttttctataaataaaagctaattttgcttcataaga

SEQ ID NO: 197430 - DNA, 1617 bp, Homo sapiens
  Payload ID: 18940
  Gene Name: ubiquitin specific peptidase 45
  ENST ID: ENST00000472914
  CDS Start-End: 534-1403
ggcgctttggtcgcagcggcggtatggtcgccgcagtttctcggtcttcgcttcggcgaccttgacccccttgtgggtgggcgaggctggaagagaggctccccaccccactcggcttcctgatccctgggggcgccgggcggtcaccgagggccgtgtgagcgccgctctgccggctccgggtccatgcggctgcgggagaagccctgggcgtcggggctggcctgggaggggcccgagtcccctggtgacctgggcgcgcggcggccccacacctttccgtccgcctcatcgcggcgcatttctcttcacatcctcggggtgtgtgtgtgttggtgaccggaggaagcctgtctaatgacttttctggaagcgtcgtgtattaggagctccggggccggactgcttgggtccgcatctccatccaccgcttactggctttgggacctctgcaagtcacttcacttctctttctcagtttcaagtgtaaaatgcggaaaataatagcaacttatctcctaagtaaataacagatgcgggtgaaagatccaactaaagctttacctgagaaagccaaaagaagtaaaaggcctactgtacctcatgatgaagactcttcagatgatattgctgtaggtttaacttgccaacatgtaagtcatgctatcagcgtgaatcatgtaaagagagcaatagctgagaatctgtggtcagtttgctcagaatgtttaaaagaaagaagattctatgatgggcagctagtacttacttctgatatttggttgtgcctcaagtgtggcttccagggatgtggtaaaaactcagaaagccaacattcattgaagcactttaagagttccagaacagagccccattgtattataattaatctgagcacatggattatatggtgttatgaatgtgatgaaaaattatcaacgcattgtaataagaaggttttggctcagatagttgattttctccagaaacatgcttctaaaacacaaacaagtgcattttctagaatcatgaaactttgtgaagaaaaatgtgaaacagatgaaatacagaagggaggaaaatgcagaaatttatctgtaagaggaattacaaatttaggaaatacttgcttttttaatgcagtcatgcagaacttggcacagacttatactcttactgatctgatgaatgagatcaaagaaagtagtacaaaactcaagatttttccttcctcagactctcagctggacccattggtggtggaactttcaaggcctggaccactgacctcagccttgttcctgtttcttcacagcatgaaggagactgaaaaaggaccactttctcctaaagttctttttaatcagctttgtcagaagtgggtgcatctacatttaatataaataattatgagttacaaaatactaatgtattcatcatttaacatgaatagtcgtttttactgtaactttgctcttattgccctgactatgaagagaactaaaatttgttacagctctatgctttatgaaaattatatctcagtcctcagaagaagcagcttatcctcatatataaggaaatggagacacagaaattaaatggctcacctagtct

SEQ ID NO: 197431 - DNA, 5826 bp, Homo sapiens
  Payload ID: 18940
  Gene Name: ubiquitin specific peptidase 45
  Uniprot ID: Q70EL2
  ENST ID: ENST00000500704
  CDS Start-End: 45-2489
ccaggttgtagacgctgcggcccggcccggcgggtaaataacagatgcgggtgaaagatccaactaaagctttacctgagaaagccaaaagaagtaaaaggcctactgtacctcatgatgaagactcttcagatgatattgctgtaggtttaacttgccaacatgtaagtcatgctatcagcgtgaatcatgtaaagagagcaatagctgagaatctgtggtcagtttgctcagaatgtttaaaagaaagaagattctatgatgggcagctagtacttacttctgatatttggttgtgcctcaagtgtggcttccagggatgtggtaaaaactcagaaagccaacattcattgaagcactttaagagttccagaacagagccccattgtattataattaatctgagcacatggattatatggtgttatgaatgtgatgaaaaattatcaacgcattgtaataagaaggttttggctcagatagttgattttctccagaaacatgcttctaaaacacaaacaagtgcattttctagaatcatgaaactttgtgaagaaaaatgtgaaacagatgaaatacagaagggaggaaaatgcagaaatttatctgtaagaggaattacaaatttaggaaatacttgcttttttaatgcagtcatgcagaacttggcacagacttatactcttactgatctgatgaatgagatcaaagaaagtagtacaaaactcaagatttttccttcctcagactctcagctggacccattggtggtggaactttcaaggcctggaccactgacctcagccttgttcctgtttcttcacagcatgaaggagactgaaaaaggaccactttctcctaaagttctttttaatcagctttgtcagaaggcacctcgatttaaagatttccagcaacaggacagtcaggagcttcttcattatcttctggatgcagtgaggacagaagaaacaaagcgaatacaagctagcattctaaaagcatttaacaacccaactactaaaactgctgatgatgaaactagaaaaaaagtcaaagcatatggaaaagaaggtgtgaaaatgaacttcatagatcggatctttattggtgaattaactagcacggtcatgtgtgaagaatgtgcaaatatctccacggtgaaagatccattcattgatatttcacttcctataatagaagaaagggtttcaaaacctttactttggggaagaatgaataaatatagaagtttacgggagacagatcatgatcgatacagtggcaatgttactatagaaaatattcatcaacctagagctgccaagaagcattcttcatctaaagataagagtcaactaattcatgaccgaaaatgtattagaaaattgtcatctggagaaactgtcacataccagaaaaatgaaaaccttgaaatgaatggggattctttaatgtttgccagcctcatgaattctgagtcacgtctgaatgaaagccctactgatgacagtgaaaaagaagccagccattctgaaagcaatgttgatgctgacagtgagccttcagaatctgaaagtgcttcaaagcagactgggctgttcagatccagtagtggatccggtgtgcagccagatggacccctttaccctctgtcagcaggtaaactgctgtacaccaaggagactgacagtggtgataaggaaatggcagaagctatttctgaacttcgtttgagcagcactgtaactggagatcaagattttgacagagaaaatcagccactaaatatttcaaataatttatgttttttagaggggaagcatttgaggtcttatagtccccaaaatgcttttcagaccctttctcagagctatataactacttctaaagaatgttcaattcagtcctgtctctaccagtttacatctatggaattactaatggggaataataagcttctatgtgagaattgtactaaaaacaaacagaagtaccaagaagaaaccagttttgcagaaaagaaagtagaaggagtttatactaatgccaggaagcaattgctcatttctgctgttccagctgtcctaattctccacctgaaaagatttcatcaggctggcttgagtcttcgtaaagtaaacagacatgtagattttccacttatgctcgatttagcaccattctgctctgctacttgtaagaatgcaagtgtgggagataaagttctctacggtctctatggcatagtggaacatagtggctcgatgagagaaggccactacactgcttatgtgaaagtgagaacaccctccaggaaattatcggaacataacactaaaaagaaaaatgtgcctggtttgaaagcggctgataatgaatcagcaggccagtgggtccatgttagtgacacttacttacaggtggttccagaatcaagagcacttagtgcacaagcctaccttcttttctatgaaagagtattataactattaatggtaatgattatttaggtcatttgtttttgaatgccacagtgataactataatatataatgtgcctttctagtcttccctcttctgtaggaatagcatgttcctcaaatggtcctgaactttttcaccattttggtgaacccttttaaagtaaatttactcaatgctttaaaattcatagtcttaaaataaatgtgaattttgtttccaggtatttattctggggtacaaaaacttcccagaatttacagtaggaaaggaaacccctttatgatgtggcttattattacaagcattcagaaatgatgctggctaagtcaaatcattccttgagacagtgattcctaaatgtaatgccaccttcctgaactctcacatattctatatcatggttattttaaaaaatatatttttagccttttgtaaccttagtcttgttttgagcaatcatattccgtgttttatgtgcttttatatttttataataaatattaaagtaaaactattaaaaattgtttatccacgtaccacttaacttaaaatcatctcagggccatctagtggtatatatgtgtactaccatttaggaaactgctataacacataatttcatgaagtaacacctaatacggtgtagttccctggtcatattttatacaattcaaccatataaaagggtgtcactgtaatttcagtagtgtgggtttacaaataatctgctggttagcttattaccttgaggttttgaaaaactagaattatattgaggcatttcataaacatatctcttgcaccctcttcatggtggagttaaggataacttgcaggtggttggccaaggcccaatatagatgattataacatttagaattggcaattagaagttgataatccatataggaccataggatagctttgaaatataaattaccaaattatatttgtaaatgatagagaattatattcttaacagaaaaatatatactttttctacttcttgtaaatactaaacacagttttggggttttgaaatcactttgtcttcagcaagcatcattaataagttcaggtgaatttagcttttaatggggcattaagctggcatttttgattttctttttaaataatagcaaaaatatcatttttcccctctagaatacaaattattgagctgtcaaaacttggcatgaagaatatactattacttaggcttaaatatcaaaagataatggctacttcagtgtcatattgttgaaatagaaacaaaactgcatggttcaagcatcctaatcattagtgccaatgaatgatagtgcaggcaagtgccaggtaaatgcctagtcccacttcattctcctcctgggaagaaaggataagaatagtggctgcagataaggtatggaaatatttaatcaagactgtcttaaacacataagcatatataatgttatcaaggttaccagtgctgccttttgatatatggatgaacataactgtaattaaagacggtaatagtatacaaaatgcagagcttaaaaatgtcattgcataaattctatttttaagatgttgaaatgttagtagtgtttttcttgatttttaacagtgaaataatcaagaaatatatctttaagttaatctgcaaagtcaggctgtgttctgtaaaaggtatttcacagcattttctgtttaactgtaatctgttatcatggagatctcagtaccagagcagtgaattttttgaaaaatattgactgtctttattcaagtcagccatcttggtaagagcagttttcatccccccactgcccaaatgtaaatatagatcacctaatttttcttacagaaagatactgttaagaggcatgcacttttcatcggatggtcacttgtttcttgtttcaaagacaaatatttggatagatacccatacttgctatgagtcagtcacagtgctgacactattttaacatcatttaaaatggaaagatctacatagatttttgacattattccagaagtaacatgcaagtaagatatttttattgtcattttcttcatgttaaaggagctacttatgaaacctatttttttatggcctagagtttatgagtgctttttccttgtcttctgaaaatggaataaattggatttttgatacttaagaatttcctaaagatagcttttgtaacagagaaagcatgttaaattacacatgggtctaccttaaaatttttgttattatttccaaagcacatttgcagggatagtaaatgtatatagtagcaagtctactataataacagtagtttctggatcacctcaggaaacagtataaataaataataatgtttacttatcatcaacataactaccatagtgtttgaatgaattaaagtttcattagctttatttagaaactggtttaccccagcttcccgtttttttccaaatataaaatgataaaatattgattatgtgccaatattgtcatttaatgttcttaaaacttgtgaagaccacctttttaggtagctgagaagagtgatagttggtatcaatttgttagccaggcatggtggctcatgctgttgggaggctgagtggggaagatgcttgagcccaggaggtcaaggtgcagtgaaccatgatcacaccactgcattcctgcagagtgacggagtgagaccctgtctcaaaaataaataaaaagaagacagttggtatcaattcaaagaatagttgatgcctgttctcttattttaaatgtaccaacagagctattttactgtatttaatagttcttagcttccatgtgtgatgattttaatcagtgattttatgcaatagctgaagaaaattttctgaagattaagctgtgaaatgtatcaaccctcatctaatttttgtagtacaaaatgacatcctgattccttttaaaaattcacgtttgtaatttatttttctgcatgtattgatcaaataagcctaaaccaaatatgtgcaataaaattgagcctttagatagtatctagtgcattgttaaaaaagattatttctagatatttatgatgtttttgtttacgtagaaatcatgaattcaaatgtttaaaagatgaccatattttcaattttgagtaatacatattattcctactgttttttttcttttgccatgtttctagaaaacagctgtgtaacttattgagcgttattttggtgttactgtataaaacatgcataataaatattcttatttatctcatgttacaagattggtcctggaattttcacagtttacgttattgacagaatgttttatcaacaatg

SEQ ID NO: 197432 - DNA, 715 bp, Homo sapiens
  Payload ID: 18940
  Gene Name: ubiquitin specific peptidase 45
  ENST ID: ENST00000507717
  CDS Start-End: 1-575
cacaaacaagtgcattttctagaatcatgaaactttgtgaagaaaaatgtgaaacagatgaaatacagaagggaggaaaatgcagaaatttatctgtaagaggaattacaaatttaggaaatacttgcttttttaatgcagtcatgcagaacttggcacagacttatactcttactgatctgatgaatgagatcaaagaaagtagtacaaaactcaagatttttccttcctcagactctcagctggacccattggtggtggaactttcaaggcctggaccactgacctcagccttgttcctgtttcttcacagcatgaaggagactgaaaaaggaccactttctcctaaagttctttttaatcagctttgtcagaaggcacctcgatttaaagatttccagcaacaggacagtcaggagcttcttcattatcttctggatgcagtgaggacagaagaaacaaagcgaatacaagctagcattctaaaagcatttaacaacccaactactaaaactgctgatgatgaaactagaaaaaaagtcaaagatctccacggtgaaagatccattcattgatatttcacttcctataatagaagaaagggtttcaaaacctttactttggggaagaatgaataaatatagaagtttacgggagacagatcatgatcgatacagtggcaatgttactatagaaaatattcatcaacctagag

SEQ ID NO: 197433 - DNA, 469 bp, Homo sapiens
  Payload ID: 18940
  Gene Name: ubiquitin specific peptidase 45
  ENST ID: ENST00000508908
  CDS Start-End: 313-469
gataaaagttggtgctggagaggcagcatgcaaagcgaaaagaagggactgctttgagttctagacccaacgcctccgggaccaccaagctcaccgcagagcgcagcctccgcggacccgaggaccgccctgcgcgcagtctcgagcagcaaccagggtagcaccattgcgggccggcggccgccgcgctagtgaccacttcctcctactccttctcctcctgctccggcctcctggcgccctgctccaggctctccggcgccctccagccaggcaccggccgaaccgggtagtgccgcaagtaaataacagatgcgggtgaaagatccaactaaagctttacctgagaaagccaaaagaagtaaaaggcctactgtacctcatgatgaagactcttcagatgatattgctgtaggtttaacttgccaacatgtaagtcatgctatcagcgtgaatcatgtaaagagag

SEQ ID NO: 197434 - DNA, 4622 bp, Homo sapiens
  Payload ID: 18941
  Gene Name: ubiquitin specific peptidase 46
  ENST ID: ENST00000451218
  CDS Start-End: 141-1160
ctccctctcccagccaaactgaaagccggaccccaggccgccgcgctgccgcccggcctccccgccagcgcgccaccatgggcagtcccggtttccccttgtaaagatggcggtgagggatcgctgcaacctttagactaatgactgtccgaaacatcgcctccatctgtaatatgtttggaaacacatgctactgtaactccgtgcttcaggcattgtacttctgccgtccattccgggagaatgtgttggcatacaaggcccagcaaaagaagaaggaaaacttgctgacgtgcctggcggaccttttccacagcattgccacacagaagaagaaggttggcgtcatcccaccaaagaagttcatttcaaggctgagaaaagagaatgatctctttgataactacatgcagcaggatgctcatgaatttttaaattatttgctaaacactattgcggacatccttcaggaggagaagaaacaggaaaaacaaaatggaaaattaaaaaatggcaacatgaacgaacctgcggaaaataataaaccagaactcacctgggtccatgagatttttcagggaacgcttaccaatgaaactcgatgcttgaactgtgaaactgttagtagcaaagatgaagattttcttgacctttctgttgatgtggagcagaatacatccattacccactgtctaagagacttcagcaacacagaaacactgtgtagtgaacaaaaatattattgtgaaacatgctgcagcaaacaagaagcccagaaaaggatgagggtaaaaaagctgcccatgatcttggccctgcacctaaagcggttcaagtacatggagcagctgcacagatacaccaagctgtcttaccgtgtggtcttccctctggaactccggctcttcaacacctccagtgatgcagtgaacctggaccgcatgtatgacttggttgcggtggtcgttcactgtggcagtggtcctaatcgtgggcattatatcactattgtgaaaagtcacggcttctggcttttgtttgatgatgacattgtagagaaaatagatgctcaagctattgaagaattctatggcctgacgtcagatatatcaaaaaattcagaatctggatatattttattctatcagtcaagagagtaactgaaagacctgcgggactgattcacgtggggagaatgttcacagcactgtcacccggcttctccgcaggctttcctcttccccagtggcccactaatggtatcactccgagtctcaatggtctggctgtgttagactctctccttttgtgtttttacatgcagcactactcttggttttatttcagtctgacatagagttaactgcaatcagattgtagtctgatttatatgaataacggttgctaattttaggactgggtgaaagctatgccattcattatgtctggctgtattagaatgacatttcctatgaatgtctacggtctgttttaggtgtttgctaaacttctatggcttccagggtcttcttacaatgcattcctttaacttgtccctggaagcattgctacccattttcagcttctctgcctctcttctgatacaaggacagaagaattgggtagatattcaccttttaggggtgcaagtatagctttaagtttgtgcaagtgaaaatgttgaaaagtgagtaacctcgatattaaaatcatccttgacatgaaacagggtgaagagaagctgtccgtggcggctggtgttggctggcattggcactgggctgtgctgacctagccattacaattccaggggctaagaaggctcagggcagacaaagtcaagaggaggaagtttttgtggacaatgaaaagttattttcgtacctttctaccaaaaccaagtttcaggaaaataactctatgttgtttattttcagtgacacttatgtaaggccctgtgagttgtatttatcctgtatccggcactgctaagcttttcaaggtatctttccaatcctgctgatgtggcagtcaatggctgcagggctggcaaacctccccttagccagtcagcacggcattgttccttatcaggaataacaaaggtactacatctttccagccatcagcacgttgtacaacttaactttttaacatagtccgtctgtttactgaggcactggcgagtcccagggctgatacagaaccttccctagagggaataccagagttagctgggtatagaggtggctcaaaggaagtgtccgtgggcagggggaggaatgaacaaaatggcgctgtttctttggctcagactcctagaatgcttgacaagacagaatttttttggaagaacctcatctcactatagttacttttttcacttttgttatatatgtatttattagagcatttgaatattggtacctttaaaagggtcatttggtgttttgctgttgagctggtttttgagtcatagatcttggcttcctttagaagccacttaacttccatacactataataaactgtgaacatatttttgttacctaatgcatccactgatgaacatgcaaactttgggcataatgtgaactaaaattgaaatggaaaatgttagtggccattttgcaacaatgaagaggatagcactttatctagatgaaaactggatttcttatctttgaaatatcttgaactgtttattgctcagaacttaagtaagcatgccaacatttcgtttgtttatgcttgaagtgaaatgttttacttttcactggagaagacaaaacagggtgatcttcatgttattgttttatacaagtgatggaaatgtaccttgccttgtttagaggcaatttcacatttataaatatttttttttcctccatgaaacttacgcagtaatcactacctggaaggtgagttttgatctctttttaaggagaggcactttccaactgaaggtgattgatgtagggaaatgtttgtactatatagaatccatatatttgactgcaagttacaaagttttaagaacatgatggttggtctctaatatatttggaactgattcataagaaaagttattaaaattatctttgaaacacctcttgaagctaatttattagaaaaaatatttcagttggaaggctgtagaagtaatgtttaaatgctaagtcataagttcaggatatttcttttctatttggttgtgcaaaatgtttttcccagttatttaatcgaagtaattccttttaatagaaagagtcagttaaaattcagcattcatggatagatttttggaacgaaaaagggtaagtataagaaaatattgcaaacacattaaaacagttgtatggtgcaggaaaagaagattggaaaaagaccaaaacacacttctccagcaacactccatcagctttttaaaatttagagctatctgctaattttttccctcttccttctcaataaatgaaacaaacactgggcagctgcaggtttctcccaatcatgtctctttatgtaaagacagtaacatgcaaacacttttagtttacatccctcattcacagtgtaaagcaggaaatggtgtgggagatgtgagaccattctgaggtcagcgatagcccaaaggctctgcagtattccctccaatggccaaggattccgtgtgtcatctgcaggagtgagtaggcctgctgtatttcttgtaactgctgggtgttacaaaataagttacaatgttttacactttaaaaaaaaaacagaaggaacatttgctttattggttacttactagtttagcctctaggttatggcacagcatgctaaaaaatcatgtgtttaaaagtaaatgttggtaaaatgctggcatctggtcctattgtgttgatgcattttcacttctgtggtcataggaaatggactggtctaaagagagtgaggcacaacacaagcagggcattagtttgaataggaagtcaatcatatttggttttatggcctggtgtattttgggtttaagataaaatagggaaaaatgtcagaaatgatccctatgcatttattttcatggatacccttaatttcatgggcatgcctaataatgatctatgttctaactggagcttagggcttattttagatattggagtgtagctttattacagatggattttatctttcaacattgcattttgatcaactttgtatattcacgtgtattaaaatattgtgcactaaatgttttgcccttgtttgctattatatggtcaaggcatttatcagcactattgtaatgaactcatgtaagtggcatgggtcagggaaaattatttcctacttttctgcctaattaaatttctgttttccagtattacattaatttatttttggcttccatttctgtataaccaaaatagttactgtatttgtgtggcattcctattattttgttgctaaaaatattgtagtttttatttaaaataatctgtaccttaattttttaaaatgtaaccaattcaagcactttaagcaataatgtcaatcttgtgaaattttaatcagtttaacaccctgcctctaaaattgtttgcaaaaaataaataaatgaataaaatg
